United States Patent Application Publication US 2018/0126003 A1 - sequence listing, part 75

SEQ ID NO: 136536 - DNA, 1236 bp, Artificial Sequence
  derived and/or modified sequence
atgaaaatgcatcttcaaagagcattggttgtattggcattgctgaatttcgctacagtctcgttgtcgctgtctacatgtacaactctcgactttggccatatcaagaaaaaacgggtcgaggccattcgcggtcagatcctttccaagttgagactgacatcaccaccggagcccactgtcatgacacacgtaccgtaccaggttttagccttgtataacagcacacgggaactattagaagaaatgcacggcgaaagagaagaaggatgcacacaagagaatacagaaagcgaatactacgcaaaagaaattcataaatttgatatgatccaagggttagctgagcacaatgaactcgcagtgtgtccgaaaggcatcacatctaaggttttccgtttcaatgtgtcctctgtggagaaaaatcgtacaaatttatttcgggccgaattcagagttttacgtgtgccgaatccttcttcgaaacggaatgagcagcgaattgaactgtttcaaattttgagaccagatgagcatatcgccaaacaaagatacatcggagggaaaaatctgccaactagaggcacagcagagtggctttcttttgatgtgacggatacagtgagagaatggttgcttcggcgagaaagtaacctgggtttggaaatcagcattcattgcccttgtcatacgtttcaaccaaacggcgatattttagagaacatccacgaagttatggagatcaaatttaaaggggtggataatgaagatgatcatggcagaggagatctaggtagacttaagaagcagaaagatcatcacaatccgcacctaatcttgatgatgatcccgccgcacagacttgataatccgggtcaaggaggccagagaaagaagcgcgcgcttgatactaactattgtttccgcaatctcgaggagaactgttgcgtaagacctctttatatcgattttagacaggatcttggctggaagtgggtgcatgaacctaaaggctactatgccaatttttgtagcggtccgtgtccatatctgaggagcgcagacacgacgcacagcacagtactgggtttatacaacacacttaatcctgaagcatcagcgagcccctgttgtgttccccaggatttagagcctttaactattctttactatgttggtaggacgcctaaagttgaacagctgtctaatatggtcgttaaatcatgcaaatgctca

SEQ ID NO: 136537 - DNA, 1236 bp, Artificial Sequence
  derived and/or modified sequence
atgaagatgcacttgcagagagctttggtggtcctcgctctacttaactttgccaccgtttccctttccctgagcacatgtacaacactagattttgggcacatcaagaaaaagagagttgaagccatcaggggccagatactcagcaaactacgccttacttccccacccgagcctacagtgatgacacatgtgccgtatcaagtcctggcactgtacaatagtaccagagaactgttagaagaaatgcacggcgagcgggaagagggctgcacacaagagaatactgagagtgagtattacgctaaagaaatccataagtttgacatgattcagggccttgctgagcacaatgagctcgctgtatgtcccaaagggattacatccaaggtgttcaggttcaacgtctctagtgtggagaagaataggaccaatctattccgcgcagagttccgagtactcagagtgccaaacccaagctccaagagaaatgagcagaggatcgagttgttccagatacttcgtcccgacgagcatatcgccaagcaacgttatattggcggcaagaaccttcccacccggggaactgcagagtggctgtcatttgatgttaccgacacggtgcgcgagtggctactgcggcgcgaatcaaacctgggtttagagatctcgattcactgcccttgccatactttccaacccaatggtgacattctggagaatattcatgaagttatggagatcaagttcaaaggtgttgacaatgaggacgaccacggaagaggagatctaggaagattaaagaaacaaaaggaccaccataaccctcacctcatactcatgatgattccaccgcaccggctagataaccctgggcaaggtgggcagcggaagaaacgtgcattagacaccaactactgcttcaggaatttagaagagaattgttgcgtaagacctctgtatatagatttcaggcaggacctggggtggaagtgggtgcatgagcctaagggctattacgcaaatttctgcagtggcccatgtccctatttgcggagtgcggacactactcattcaacagttttgggcttgtacaacacactgaacccggaggcgtccgcgagtccctgctgtgtcccacaggacttagagccgctcactatcctctattacgtcggaaggacacccaaggttgagcagttgtcgaatatggtcgttaaatcgtgcaaatgctcc

SEQ ID NO: 136538 - DNA, 1236 bp, Artificial Sequence
  derived and/or modified sequence
atgaaaatgcatctacagcgagctctggtggtcctagccctcctgaactttgccacggtgagtctgtcactgtctacctgtacaacgcttgacttcgggcatatcaaaaaaaaaagagtggaggcaatcaggggacagattttaagcaagctgaggcttacctcgcccccagaacctaccgtgatgacacacgtgccgtaccaagttctggccctgtataactcgactagggagttactcgaggagatgcatggggaacgtgaggaaggctgcacgcaggagaatacagagagtgagtactatgctaaggaaattcacaagttcgacatgatccagggcttggctgaacacaacgaattagctgtgtgccctaagggaattactagtaaggtattccggtttaatgtaagcagtgtcgagaagaaccggacaaacctgtttagggccgagtttcgcgtgctgagggtgcctaacccttcatctaaaaggaacgagcagagaatagagctcttccagattctgaggccagacgagcacatagccaaacagaggtatatagggggcaagaacctccctactcggggcacagccgagtggctgagtttcgacgtgactgacaccgtccgagaatggctcttgagacgggagtccaatctcggcctggaaatcagcatccattgtccttgtcacacattccagcctaacggggacatactggagaacatccatgaagtgatggagattaagttcaaaggagtggataatgaggacgatcacgggaggggagatcttggcaggctgaagaaacagaaggaccatcacaatccccacctgatcctcatgatgatcccccctcaccggctcgataacccaggccaggggggccaaaggaagaagagggccctggacaccaattattgctttcgtaatcttgaagaaaattgctgtgtgcgacccctttacatagatttccgccaggacctaggttggaaatgggtgcacgaaccaaagggatactacgctaacttctgttccggaccttgcccatatctgaggagcgcagacactacacactcaacggtgctaggcctctacaatacactgaatccagaagcctccgcgtccccttgttgtgtcccccaagatctggaaccactaacgatcttgtattacgttggacgtacccccaaagtggagcaactgagtaacatggtggttaaatcttgcaagtgtagt

SEQ ID NO: 136539 - DNA, 1236 bp, Artificial Sequence
  derived and/or modified sequence
atgaagatgcaccttcagcgcgctctggttgtcctggcactgctgaactttgccactgtgtcgctgtcattgtccacctgcacgaccctggacttcggacacatcaagaagaagagagtggaagccatcagagggcagatcctctcaaagttgcgattgacttcccctcccgagccgactgttatgacccacgttccataccaggtgcttgcgctgtacaactcgactcgagaactcctggaagagatgcatggagagcgggaagaaggatgcacccaggaaaataccgaaagtgagtattacgccaaggagatccacaaattcgatatgatccagggacttgccgaacataatgaactggctgtctgcccaaaggggatcacctcaaaagtctttaggttcaacgtgtcatcagtggagaaaaacaggaccaacctgtttcgagcagagttccgcgtattgagggtcccgaatccatcctcgaaacgcaatgagcagagaattgaactcttccaaatactgcggccggacgaacatatcgccaagcagcgctacatcggcgggaaaaacctgcctactcgcggcactgcggagtggctgtcgttcgatgtgactgatactgtcagggaatggctcctgagacgcgagtccaatttgggacttgaaatcagcattcactgtccctgtcatacttttcaacctaacggcgacattttggagaacatccatgaagtgatggaaatcaagttcaagggagtggataatgaagatgatcacggacggggagatctcggacgcctgaagaagcagaaagatcaccacaacccgcatctgatcctgatgatgatcccaccgcaccgccttgacaacccaggacaaggaggacaacggaaaaagcgggctctggacaccaattactgcttccggaacctcgaagaaaactgctgcgttcggccgctgtacatcgacttcaggcaggacctgggatggaaatgggtgcatgagccaaagggttactacgctaacttttgctcaggaccttgtccgtacctgcggagcgcggacacgacccacagcactgtgcttggcctctacaatactcttaacccggaggccagcgcctctccttgctgtgtcccccaggacttggaaccgctgacgatcctgtactacgtgggccggacgcctaaggtggagcaactgagtaacatggtggtgaagagctgcaaatgctca

SEQ ID NO: 136540 - DNA, 1236 bp, Artificial Sequence
  derived and/or modified sequence
atgaagatgcacctgcagcgggccctggttgtcctcgccttgctgaatttcgccactgtctccctctcgctctctacttgcactactttggactttggacacattaagaaaaagcgggtcgaggccattcgcggacagatcctttccaaactgaggctgacctcgccccctgagccaactgtcatgacccacgtcccttaccaagtgctcgccctgtacaactctaccagagagcttctcgaggaaatgcacggcgaacgcgaagaaggatgcacccaggaaaatactgaatcagaatactacgccaaagaaatccacaaattcgatatgatccaggggctcgccgaacacaatgaactcgcagtgtgtcccaagggtatcacctccaaagtgttcagattcaatgtctcgtcagtcgagaagaacaggaccaacctgtttagagctgaattccgcgtgctgcgggtgccgaatccttccagcaagagaaatgagcagcgcatcgagctcttccaaatcctcagaccagacgagcacatcgctaagcagcgttacatcggaggaaagaaccttccgacgagaggcacggcggagtggctgtcgtttgatgtcactgatactgttcgcgaatggctgctgaggcgggagtcaaacctgggccttgagatttcgattcactgtccatgccataccttccagccaaacggagatatcctggagaacatccacgaagtcatggagatcaagttcaagggcgtcgacaatgaggacgatcacgggcggggtgacctcggacgcctcaagaagcaaaaggaccaccacaacccgcacctcattctcatgatgatcccgccacaccgcctggacaacccgggacaaggagggcagcggaagaagagagcactcgatactaattactgcttccgcaacctggaagaaaactgctgtgtccgcccgttgtacatcgatttccgccaggacctcggatggaagtgggtgcatgaaccgaagggatactacgctaacttttgttcgggtccgtgcccttatctgcggagcgcggacactacgcactcgactgtcctgggcctgtacaatactctgaacccggaggcttcggcctcaccatgctgcgtgcctcaagacctcgaaccactcaccattctgtactacgtgggacggactcccaaggtggaacagctgagcaatatggttgtgaagtcatgcaaatgctca

SEQ ID NO: 136541 - DNA, 1236 bp, Artificial Sequence
  derived and/or modified sequence
atgaagatgcatctgcaaagggccctggtcgtgctggctttgctgaatttcgctaccgttagcctctcccttagtacttgcaccactctggattttggccatatcaagaagaagcgggtagaggctattcgcggtcagattctttcaaagctccgactgacatccccgccagagccgacagtcatgacccatgtcccataccaggtactggcactctacaattccacaagagagctcctcgaagaaatgcacggcgagcgagaagaagggtgcacgcaagagaataccgagtcagaatactatgcgaaggagatccataaatttgacatgattcagggattggccgagcacaacgaacttgccgtttgtccgaaagggatcacgtccaaggttttccgatttaacgtctcctccgtagagaaaaaccgaactaacctgtttcgggctgagttcagagtgctgcgagtgcctaacccctcatccaagcggaacgaacagcgaatcgaactgttccagatactgcggcccgatgagcatattgctaagcagagatacattggtggaaagaatctgcccactagagggactgccgaatggctgagcttcgatgtgactgacacagtgcgagagtggttgctgagaagagaaagcaatttggggctggagatctccattcactgcccatgccacacctttcagcccaatggtgatatcctggagaacatacacgaggtcatggagataaagttcaaaggtgttgacaacgaggacgaccacggccgcggagacttgggccggcttaaaaaacagaaggatcatcataatccccacctcattttgatgatgatccccccgcacagactcgacaacccgggccagggcggccagcggaagaagagggctctcgataccaattattgttttcgcaacttggaagagaattgttgtgttagaccgctgtatatagacttccggcaagacctcggatggaaatgggtccatgagccaaaagggtactacgctaatttttgttccgggccctgcccttatctgaggtcagccgacaccactcatagcaccgtactgggcctttataacactttgaaccccgaggcttctgcaagcccgtgctgtgtgccccaggatttggaacctctgaccatcctgtattatgtcgggcgcacaccaaaggtggaacaacttagtaatatggtggtgaagtcctgcaagtgcagt

SEQ ID NO: 136542 - DNA, 1236 bp, Artificial Sequence
  derived and/or modified sequence
atgaagatgcatttacagcgggcgcttgtggtgttggctcttctgaacttcgctacggtgtcgcttagtctgagcacctgtacaaccttggactttggccatatcaaaaagaaacgggtcgaggccattcgtggccagattttgtcgaaactcaggcttacaagtcccccagaacctactgtcatgactcatgtgccctaccaggtgctggctttgtacaactctacccgcgagctgctggaggagatgcacggtgagagagaggagggttgtacgcaggagaatacggagtctgaatattatgccaaggagatccacaagtttgatatgatacagggactggccgagcataatgaactggcggtctgccctaaaggcattacttcaaaagtcttcagattcaacgtgagttcagtcgaaaagaaccgaacgaacctctttagggccgaattccgagtgctccgcgtccccaacccctcctcaaaaagaaacgagcagagaattgagctctttcagattctcagacctgacgagcacattgcgaaacagaggtacattggagggaaaaacctacccaccaggggaaccgcggaatggctgtctttcgacgtgactgacaccgtccgagagtggctattgagaagagaatcaaacctagggcttgaaatcagcatacattgtccttgtcacacctttcagccaaacggggacatcctcgaaaatatacatgaggtcatggagatcaagttcaagggtgttgacaacgaagacgaccacggccgcggcgacctcggtagactcaaaaagcagaaagatcatcacaatccgcatctgattttgatgatgatacctccccatagactagacaatccgggccagggcgggcaaaggaagaagagagccctggacaccaactactgcttcaggaacctcgaggagaactgttgtgtccgtccactttatattgattttcggcaggacctcggatggaaatgggtgcacgaaccgaagggctactacgcaaatttctgtagcggaccttgtccctacctgcgcagcgccgacacgacacattccacagtattgggtctctacaacacgctcaaccctgaagccagcgcatcgccatgttgtgtgccacaagacctggagccgttgactatcctgtattacgtggggcgcactcctaaggtagaacagctgagtaatatggtagttaagtcttgtaaatgcagt

SEQ ID NO: 136543 - DNA, 1236 bp, Artificial Sequence
  derived and/or modified sequence
atgaaaatgcatctacaacgtgcgctagtagtattagcgttattaaattttgcgacggtatcgttatcgctatcgacgtgtacgacgttagattttggtcatataaaaaaaaaacgagttgaagcgatacgtggtcaaatactatcgaaattacgattaacgtcgccgccggaaccgacggtaatgacgcatgtaccgtatcaagtattagcgttatataattcgacgcgtgaactattagaagaaatgcatggtgaacgagaagaaggttgtacgcaagaaaatacggaatcggaatattatgcgaaagaaatacataaatttgatatgatacaaggtctagcggaacataatgaattagcggtatgtccgaaaggtataacgtcgaaagtttttcgatttaatgtttcgtcggtagaaaaaaatcgtacgaatttatttcgtgcggaatttcgtgttttacgtgtaccgaatccgtcgtcgaaacgtaatgaacaacgtatagaattatttcaaatattacgtccggatgaacatatagcgaaacaacgatatataggtggtaaaaatttaccgacgcgaggtacggcggaatggttatcgtttgatgttacggatacggttcgtgaatggctattacgtcgtgaatcgaatttaggtttagaaatatcgatacattgtccgtgtcatacgtttcaaccgaatggtgatatattagaaaatatacatgaagtaatggaaataaaatttaaaggtgttgataatgaagatgatcatggtcgtggtgatttaggtcgtctaaaaaaacaaaaagatcatcataatccgcatctaatattaatgatgataccgccgcatcgtttagataatccgggtcaaggtggtcaacgtaaaaaacgagcgctagatacgaattattgttttcgaaatttagaagaaaattgttgtgttcgtccgttatatatagattttcgacaagatttaggttggaaatgggttcatgaaccgaaaggttattatgcgaatttttgttcgggtccgtgtccgtatctacgatcggcggatacgacgcattcgacggtattaggtttatataatacgttaaatccggaagcgtcggcgtcgccgtgttgtgttccgcaagatctagaaccgttaacgatactatattatgtaggtcgtacgccgaaagtagaacaattatcgaatatggtagtaaaatcgtgtaaatgttcg

SEQ ID NO: 136544 - DNA, 1236 bp, Artificial Sequence
  derived and/or modified sequence
atgaaaatgcatctgcagagggcattggtggtcttagccctcctcaatttcgcaaccgtgtcactgtccttgagcacctgtactaccctcgacttcggacatattaaaaagaagcgtgtcgaggcaatcaggggccagattctctcaaagctgagattaacttctccccctgaaccgaccgtgatgactcacgtcccttatcaggtcctggccctgtacaacagcaccagagaattactcgaagaaatgcacggtgagcgtgaggagggttgtacccaggaaaacacagagtccgaatactacgcaaaggaaatacataagttcgatatgatccaagggttagcggagcacaatgaattggcagtgtgccccaaaggcatcacttcgaaagtgttccgctttaatgttagttccgtggagaagaataggaccaacctgtttcgtgccgaattcagggtcttaagggtgcccaatcccagttcaaagaggaatgagcagaggatagaactgtttcaaatcctgaggccagacgaacatatcgctaagcagcgatacatcggcggcaagaacttgcctactaggggtaccgcagaatggctgtccttcgacgtgactgatacggttcgcgaatggttgctgagaagagagtcaaatctgggcctggaaattagtatccactgtccctgccacaccttccagcctaatggagatatccttgagaacattcacgaggtgatggaaattaaatttaagggtgtcgacaacgaagacgaccacggtaggggcgacctgggccgattaaagaaacaaaaagatcaccataaccctcatctgattctgatgatgattcccccccatcgtttggacaaccctggccagggcgggcaacgaaaaaagcgagcgcttgacaccaattactgctttcgaaacttagaggagaattgctgcgtgcggccattatacattgacttccgacaggacttaggctggaagtgggtccatgaacccaagggctactatgccaatttttgcagtggcccatgcccctacttgaggagcgcggatactacacattccacggtgttagggctctataacacattaaacccggaggcgagtgccagtccttgttgcgtgccgcaagatctggagcctcttacaatactttattacgttgggcgaacacctaaagtcgaacagctgtccaacatggtggtgaagtcttgtaaatgttca

SEQ ID NO: 136545 - DNA, 1236 bp, Artificial Sequence
  derived and/or modified sequence
atgaaaatgcatcttcagagagcgctcgtcgttttggcactgcttaacttcgccaccgtgtccctgtccctgagcacttgtacgaccctggacttcggacatatcaagaagaagcgggtggaagccatcagggggcaaatcttgagcaagctccggctgacttcgcccccggaaccaaccgttatgactcacgtgccttaccaggtgctcgcgctgtacaattccactagagagctgttggaagagatgcatggagagcgggaggaagggtgcactcaggaaaacaccgaaagtgaatactacgctaaagaaatccataagttcgatatgattcaaggcctggctgaacacaacgagctcgctgtgtgccccaaaggcattactagcaaggtgtttcgctttaacgtgagctcagtcgaaaagaacagaactaatctgttccgtgcggaattcagggtgctgagagtgcccaacccgagctccaagaggaacgaacaacggatcgaactgttccagatcctgcggcccgacgaacacatcgcaaagcaacgctacatcggcggcaaaaacctgccgactagagggaccgctgaatggctctcgttcgacgtcaccgataccgtacgggaatggttgttgcggcgcgagtcaaatctggggttggaaatttcgattcactgcccctgccatactttccaaccaaatggagacatcctcgagaatatccacgaggtgatggagataaagttcaagggcgtcgataatgaagatgatcacgggcgcggtgatctcgggcggctgaaaaagcagaaggaccaccataacccacacctcatcctcatgatgatccctcctcaccgactggacaacccgggacagggtgggcagcgaaagaagagggctctggatactaactactgcttcagaaacctcgaggaaaattgctgcgtgcgaccgttgtatatcgactttaggcaggacctgggctggaagtgggtgcatgagccgaaaggatactacgcaaacttttgctcaggaccttgtccgtacctgcgctccgccgacacgacccatagcactgtcctcggtctgtacaatacgttgaaccccgaggcatctgcttcaccttgttgcgtgccacaggacctggagcccctgaccatcctctactacgttggtcgcaccccaaaggtcgaacagctttcaaacatggtcgtcaagtcgtgcaaatgctcg

SEQ ID NO: 136546 - DNA, 1236 bp, Artificial Sequence
  derived and/or modified sequence
atgaagatgcacctgcagcgcgctcttgtggtgctggccctcctgaatttcgccaccgtctctctgtcccttagcacttgtactactctggacttcggacatatcaaaaagaagcgagttgaggccattagggggcagattctttccaaactgcgtctgacctcgccgccagaaccaaccgtcatgacccacgtcccataccaggtgctggcactttacaatagtactagagaactcctggaggagatgcacggagagagagaagagggctgcacgcaagagaacaccgaaagcgaatactacgctaaagaaattcacaaattcgacatgatacagggactggcagaacataacgaattggccgtgtgccccaagggaatcacctccaaggtattccggtttaacgtctcgtcagtggaaaagaatagaaccaatttgtttcgggcggagttccgcgtgctgcgtgtgccgaatccttcatcgaaacggaacgaacagcggatcgaactcttccagatcctcagaccggacgagcatatcgcgaagcagcggtacattggaggaaaaaacctccctactcgaggcaccgcggagtggcttagctttgacgtgactgacaccgtgcgggaatggctgctgaggcgggaatccaatctggggctggagatatccatccattgcccctgccacacgtttcagccgaacggagacatcctggaaaacatccatgaggtcatggaaatcaagtttaagggcgtagataatgaagatgatcacggtcgcggagatctcggtagactgaagaagcaaaaggatcaccacaacccgcacctcatcctgatgatgatcccgccacatcgcctcgacaatccgggtcaaggaggacagaggaagaagcgggccctggacaccaactactgtttcaggaacctcgaggagaactgctgcgtgcggcctctgtacatcgatttcaggcaagacctgggatggaagtgggtgcacgaaccgaagggctactatgccaacttttgctcgggtccgtgcccgtacctccggtcggcagacacgacgcattctacggtgctcggactgtacaacacgctgaacccggaagctagcgcctcaccttgttgtgtgccacaggaccttgagcctctgactatcctctattacgttggccgcacccccaaggtggaacagctttccaatatggtggtgaaatcatgtaaatgcagc

SEQ ID NO: 136547 - DNA, 1236 bp, Artificial Sequence
  derived and/or modified sequence
atgaagatgcatctccaacgggctcttgtggtcctcgccctcctgaacttcgctacggtgtctttgtcgctttccacgtgcaccaccctggattttggacacattaagaagaagcgtgtggaggcgatccgcggtcaaatcctctcgaagctcagactgacgtcccctccggaaccgaccgtgatgacccatgtgccctaccaggtgctcgccctctacaatagcactagagaactgctggaagaaatgcatggagaacgggaagaaggctgcactcaggaaaacacggaatcggaatactacgcgaaagaaatccataagtttgatatgatccagggactcgcagagcacaacgagctggcagtgtgtccgaagggaatcacctccaaggtgttcagatttaacgtttcctcggtcgagaagaacaggactaatctgttccgagccgagttcagggtgctgcgagtgccaaacccttcgagtaaacgcaatgaacaaaggatagagcttttccagatcctgcggccggacgaacacatagccaaacaaagatacattggaggcaagaatcttccgacccgagggaccgcggagtggctgtccttcgacgtcaccgacactgttcgggagtggctgctccggcgggagtcgaatctggggctggagatttcgatccactgcccgtgccatactttccagccgaacggcgacatcctggaaaacatccacgaggttatggagatcaagttcaagggtgtcgataacgaggacgatcacgggagaggcgatctggggagattgaaaaaacaaaaggaccaccataaccctcaccttatcctgatgatgatcccgccccacaggttggataaccctggacagggaggacagagaaaaaagcgggctctggacaccaattactgcttcagaaatttggaggaaaattgctgtgtccgcccactctacattgacttccgccaggacctgggatggaaatgggtgcatgaacctaaaggttactacgccaatttctgtagcgggccctgcccgtatctccgctcggcggacaccacccactccaccgtcctgggactctacaacactttgaatccggaagcctcagcatccccgtgctgtgtgccccaagatcttgaaccactgaccatcctgtattacgtaggacgcaccccaaaggtggagcaacttagcaacatggtagtgaaaagctgcaagtgctcc

SEQ ID NO: 136548 - DNA, 1236 bp, Artificial Sequence
  derived and/or modified sequence
atgaagatgcaccttcagagagcactggtggtcctcgccctgctcaactttgcaactgtgtcattgtcgctgtcaacttgcactacccttgatttcggtcacatcaagaaaaaacgtgttgaagctatcaggggccagatcctctcgaagctcaggctcacttcgcctccagaaccaaccgtgatgacccacgttccttaccaagtccttgccctttacaactctactcgcgagctgctcgaagaaatgcatggggaaagagaagaaggttgcacgcaggaaaacaccgaatcagagtactacgccaaggagatccacaagtttgacatgatccaagggcttgcggaacataacgaactggcagtgtgcccaaaaggtattactagtaaagtttttcggtttaatgtctcgtcggtggaaaagaatcggaccaacctctttcgggccgagtttagagtcctcagagtgcccaacccatcatccaagcgaaacgaacagaggattgagctgtttcagattcttcgacctgatgaacatattgctaagcagcgatacatcggtggaaagaatctgcctactcggggcactgcagagtggcttagctttgacgtgactgatactgtgcgcgaatggctgcttagaagagagagcaacctgggcttggaaatttcaattcactgtccttgtcacactttccaaccgaacggcgatattctggaaaacattcatgaggtgatggagattaagtttaagggagtggataatgaagatgaccatggtcggggtgatctgggccgccttaagaagcaaaaagatcatcataaccctcaccttattcttatgatgataccaccccatcgactggataacccaggacaaggaggccagaggaaaaagagagcccttgataccaattactgctttcgtaacctggaggaaaactgttgtgtgcgccccctgtatattgactttagacaagatcttggttggaaatgggtgcacgagccaaagggatactacgcaaatttctgttcgggtccatgtccctacctgcgctccgctgacactactcattccaccgtgctcgggctttacaacaccctcaatcccgaggcatctgcatccccatgttgtgtgccgcaagatcttgagccactgaccatcctgtactacgtcggaagaaccccaaaggtcgagcaactctcgaatatggtggtgaagtcatgcaagtgttcg

SEQ ID NO: 136549 - DNA, 1236 bp, Artificial Sequence
  derived and/or modified sequence
atgaagatgcacctgcaacgggctctcgtggtgctggcactgctcaacttcgctactgtctcgctgtccctttccacttgtaccactttggattttgggcatatcaagaagaaaagagtggaagccatccgaggacagatcctgtccaagctcaggctcaccagccccccggagcctactgtcatgactcacgtgccgtaccaagtgctcgcgctgtacaacagcacgcgggaacttttggaggaaatgcacggagaaagagaggaaggatgcactcaggaaaataccgagtcagaatactatgctaaggagatccataaattcgacatgatccaagggctggccgaacacaacgaactcgcggtctgtcctaagggtatcacctcgaaggtgttccgcttcaatgtgtctagcgtggagaaaaaccgcaccaatcttttccgcgccgagtttcgtgtgctgagagtgccgaacccgagctccaaacgcaatgagcaacggattgaactgttccagatcctccgcccggatgagcacatagcaaagcagcgctacatcggaggaaagaacctgccaacccggggaaccgccgagtggctctcgttcgacgttactgacaccgtgagggagtggctgctgcggcgcgaaagtaatttgggcttggaaatctcaattcactgcccatgccatacgtttcagcccaacggagacatcctggaaaatattcatgaagtgatggaaatcaaatttaagggcgtcgacaacgaggatgatcatggccgcggggatcttggacggctgaaaaagcagaaggaccatcacaacccacacctgatcctgatgatgatccctcctcacaggcttgataacccgggacagggcggccagagaaagaagcgggccctcgacaccaattactgcttccgcaatctcgaggagaactgctgcgtgcgcccactctacatcgacttcagacaagacctgggatggaagtgggtgcacgagccgaagggttactacgcaaacttctgctccggaccgtgcccatacctgagatcagccgataccactcatagcactgtgctgggcctgtataatactctgaaccctgaagcgtcggcgtcaccctgctgtgtcccgcaggacctggaaccgctcacgattttgtactacgtcggtcggaccccaaaggtcgaacaactgtccaacatggttgtgaaatcgtgtaaatgctcg

SEQ ID NO: 136550 - DNA, 1236 bp, Artificial Sequence
  derived and/or modified sequence
atgaaaatgcacttgcagcgggcgttggtggttttagccctgcttaactttgcaacagtgtccctgagcctgtcaacgtgcacgacactggatttcggtcacattaaaaagaagcgagtcgaggccatccgtggccaaatcttgtcaaagctacgcctgacctccccaccagagcccaccgttatgacgcacgttccctaccaggtgctggctttgtacaatagcacccgcgagctgctggaggaaatgcacggcgagcgtgaggaagggtgcacccaggagaacacggagtcggagtactatgccaaggaaatacacaagttcgacatgatccaaggcctcgcggaacataacgaactggctgtttgtccaaagggaattaccagcaaggtgttccgattcaatgtctccagcgtggagaagaaccgtacaaaccttttccgcgcggaatttagggttttgcgagtgccgaacccatcttctaagcgcaacgagcaacgtatcgaattgttccagattttacgacccgacgagcacattgccaagcagaggtatatcggcggcaagaatctccccacccgcggcacggcagaatggctttcatttgatgttacggacaccgtccgggagtggttgctgaggagggagtccaacctgggcctcgagatctccatccactgcccgtgccatacgtttcagcccaatggagatatcttggagaatatccacgaggtcatggagatcaaattcaaaggcgtggataatgaggacgaccacggcaggggagatcttggccgtttgaagaaacagaaggaccatcacaatccgcacctaattctgatgatgatacctccccacagactggataacccaggtcaaggcggccagaggaagaagcgagccttggacacgaactactgcttccggaacttggaagaaaactgttgcgtccggcccctgtacattgacttccgccaggatctgggctggaagtgggttcacgagcccaaaggatattatgctaacttttgcagtggcccatgcccatacctgcgttcggcggacaccacgcactcgacagtgctgggtctctataatactctgaaccccgaggcgagcgcaagtccgtgctgcgtgccgcaggacctggagccgctgacaatcctgtattacgtgggccggacccccaaagtggagcaactatccaacatggtggttaaaagctgcaagtgcagc

SEQ ID NO: 136551 - DNA, 1236 bp, Artificial Sequence
  derived and/or modified sequence
atgaaaatgcaccttcagcgggctctcgtagtccttgctttgctgaactttgctacagtgtctctatccctctctacttgtacaacgttggatttcgggcacatcaagaaaaaacgggtggaagccatccgggggcagatattatccaagctccgccttactagtcctcctgaaccaactgtcatgactcacgtgccctatcaggttttggctttatataattccacacgggaattattggaagagatgcacggagaacgagaagagggatgtactcaggagaacacagaaagtgaatattacgcaaaagaaatccacaaatttgatatgatccaggggctggcagaacataacgagctcgccgtgtgtccaaaagggataacttccaaagtttttcgctttaatgtatccagtgtggaaaaaaaccgaacaaacctatttagggccgaatttcgagtcctacgcgtgcctaatccttcatctaaaagaaatgaacagcgaatcgaactctttcagattctacgacccgatgaacacatcgctaaacagaggtatatcggggggaaaaatctccccacacgcggaacagctgaatggctctccttcgatgttacagatactgtgcgcgagtggctactccgccgggaatccaatctcgggctagaaatctcaatacattgtccatgtcatactttccagcccaatggggacatcctagaaaatatacatgaggttatggaaatcaaatttaagggagttgataatgaagatgaccatgggcggggagatttagggcgcctaaaaaaacagaaggatcaccataatccccatctgatcttaatgatgatacctccccatcggctggataatccaggacagggagggcagcggaagaaacgggcactggacactaactactgcttccgaaatctggaagaaaattgttgtgtccggcccctttatatcgatttcagacaggatttgggatggaaatgggtccacgaaccaaaaggatattatgccaacttctgttcaggaccgtgcccctatctgcgatccgctgatactactcattcaactgtgctggggctctacaatactctgaatcctgaagcatcagcctctccatgctgtgtgcctcaggatctcgaaccactgactatcctgtattatgttgggcggacacccaaagttgagcagctctcaaacatggtcgttaaatcttgcaaatgtagt

SEQ ID NO: 136552 - DNA, 1236 bp, Artificial Sequence
  derived and/or modified sequence
atgaaaatgcacctgcagagagcgctcgtcgtgttggcactcctgaacttcgccactgtgagcttgtcgctctccacgtgtacgactctggacttcgggcacatcaagaaaaagcgcgtggaagcgatccgcggacagatcttgtctaaactgcggctgacttcgccacctgagccgaccgtcatgacccacgtcccataccaagtcctggccctgtacaacagcactcgggagctgctggaagagatgcatggggagcgcgaagaagggtgcacccaagagaacaccgagtcagagtattacgcaaaggaaatccacaagttcgacatgatccagggactggcagaacacaatgagctggccgtctgtccgaaaggaatcacttctaaggtgttccgattcaatgtgagctcggtggagaagaacaggaccaacctgtttcgcgccgagtttagagtcctgagagtgccaaatccgtcgtcgaagcgaaacgaacaacgcatcgaactctttcaaatcctgcgcccggatgaacacattgccaagcaacggtacattgggggaaagaacttgccgaccagaggaaccgcggaatggctgtcgttcgacgttaccgacaccgtgagagaatggctgctccgcagggagtccaatttgggacttgaaatcagcatacactgtccgtgccatacttttcagccgaatggcgacatcctcgagaacatccacgaagtgatggaaatcaagttcaagggagtggacaatgaggacgatcatggaaggggtgacctgggacgactgaagaaacagaaggatcatcacaatccgcatttgatccttatgatgatccctccacatcgcctcgataaccccggacagggcgggcagcgaaagaagcgcgcccttgacacgaactattgtttccggaatctggaagagaattgctgtgtgaggccgctctacatcgacttccgccaagatctggggtggaagtgggtccacgaaccaaagggatactacgctaacttctgtagcggcccttgcccgtatctgcgttctgcggatacgactcattcaaccgtgctgggcctgtacaacactctgaacccagaagcctcagcatccccttgttgcgttcctcaagacctcgagccgctcaccattctgtactacgtgggacgcacgcccaaggtcgagcagctgtcgaacatggtcgtgaaatcatgtaaatgctcc

SEQ ID NO: 136553 - DNA, 1236 bp, Artificial Sequence
  derived and/or modified sequence
atgaaaatgcacctccaacgagcgcttgtggtgctggcacttctgaactttgcaacggttagcctctcactctcgacgtgtacgaccctcgattttggtcatatcaagaaaaagcgggtggaagcaatccggggacaaatactttccaagctcagacttacgagccctcccgagccaaccgtgatgacccatgtgccttaccaagtgctggcgttgtacaatagcactcgggagctccttgaagagatgcatggtgagagagaggaaggctgcactcaggagaacaccgaatcagaatactacgctaaggagatccataagttcgacatgatccagggactcgcagaacacaatgagcttgcagtctgccctaaggggattacgtcaaaggttttccgtttcaatgtgtcctcggtggaaaagaacagaaccaaccttttccgagccgaatttagagttttgcgtgtgccaaatccatcgtccaagcggaacgaacaaagaattgaactgtttcaaatactgcggccggacgaacatattgcaaagcagaggtatatcgggggtaagaatctccccacgcgcggaacggcagaatggctgagcttcgatgtgactgataccgtcagggagtggctgctgcggcgggaatccaatctgggacttgagatctccattcactgtccctgtcataccttccagcctaacggagacatactcgagaacatccacgaggtgatggagataaagtttaagggcgtggataacgaagatgatcacggaaggggtgatcttggaagattgaagaagcaaaaggaccatcacaatccacatctgattctcatgatgattccgcctcatcgactggataaccctggtcagggtggtcagcggaagaagcgggccctggatactaactactgttttaggaacctcgaagaaaattgttgtgtcagaccactgtacatcgattttaggcaggatcttggatggaagtgggtgcatgaaccaaagggttactacgcgaacttttgttcgggtccatgcccataccttagatcagctgatactacccattccacggtgcttggactgtacaacactctgaaccctgaagcgagcgcctcaccgtgctgtgtgccccaagacctggagcccctcaccatcctttactacgtcggtagaacccctaaagtcgaacaactctccaatatggttgtcaaatcgtgtaaatgctca

SEQ ID NO: 136554 - DNA, 1236 bp, Artificial Sequence
  derived and/or modified sequence
atgaaaatgcacctgcagagagccttggtggtcttggctctgttgaacttcgcaacagtttccctgtccctgtccacatgcaccaccctcgatttcggtcacattaaaaaaaaaagagtggaagctataagaggacagatactgtctaagctgaggcttacaagcccccctgaaccaaccgtcatgactcacgtaccttaccaggtgcttgcattgtataactccacacgggagcttttggaggaaatgcacggagagagggaggaggggtgcacacaagaaaatacggaatcagagtactacgctaaggagattcataagttcgacatgattcaaggacttgccgaacacaatgaactggccgtttgcccgaagggtatcacatccaaggtgttccgcttcaacgtcagcagcgtggagaaaaatagaaccaatctgttccgagctgaattccgcgtcttgcgagtgccaaacccttcctctaagcgcaacgagcaacgaattgagttgtttcagatattgaggcctgatgaacacatcgctaagcagcgctacataggaggcaaaaatctcccaactagagggactgcggaatggctgagcttcgatgtgactgataccgtccgcgaatggcttcttcggagggagtcaaacttggggctggagatcagtatccactgtccttgccacacatttcagccaaacggcgacatactggagaatatccatgaggttatggaaataaagttcaagggcgtcgacaacgaggacgatcatggtcgaggagacctgggacgactgaagaaacagaaggaccaccataaccctcacctcatccttatgatgatcccgccccaccgcctggataaccctggacagggcggtcaacggaagaagcgggctttggacactaattactgctttaggaacttggaggagaactgttgcgtcaggcctctgtatattgactttcgccaggacctgggctggaaatgggtgcatgagccaaaagggtactacgcaaacttctgcagcggaccctgtccgtatctgcgcagcgccgacaccacccatagcactgtgctggggctctacaataccctgaatcccgaagccagcgcctcaccctgttgtgtgcctcaggatctggagcctctcacaatcttgtactacgtgggtcgcacacctaaagtggaacagctgagcaatatggttgtcaagtcttgcaagtgctct

SEQ ID NO: 136555 - DNA, 1236 bp, Artificial Sequence
  derived and/or modified sequence
atgaagatgcacttgcagagggctttggtggtgctggctttattgaattttgcaaccgtcagcctaagcctgagcacatgcacaacactggattttgggcatatcaagaagaagcgggtggaagccattagagggcagattctgagtaaattgagactcaccagcccccccgagcccactgttatgacacacgtgccttaccaggtactggccctctataactctaccagagaactgttggaggagatgcacggggagcgagaagagggatgcactcaagagaacacagagtcagagtactatgccaaagaaattcacaagttcgatatgatccagggtttagccgagcacaatgagttggcggtgtgtcccaagggcattacaagcaaggtttttagattcaatgtgtcttccgtcgagaaaaacagaacgaatttatttagagctgaattccgcgtgcttcgggttccaaatccgagcagtaagcggaacgagcagcgtatcgagctgttccagatccttaggccggatgagcacattgcaaagcagagatacattggaggcaagaacctccccactcgagggaccgccgagtggttatcgttcgatgttactgacaccgtgcgtgagtggcttctgcgccgggaatcaaatttgggactggaaatcagtattcattgtccatgccacactttccagcctaatggagacatcctggaaaatatccatgaagtgatggagatcaaattcaagggagtagacaatgaagatgaccacggacgaggagatctggggaggttgaaaaaacagaaggaccatcacaatccgcatttgattctcatgatgatcccaccccaccgtctcgacaacccgggccagggcgggcagagaaaaaaaagggcccttgacacgaactactgttttagaaacctagaagaaaattgttgcgtacgtccactctacattgactttcgccaggatctcggatggaaatgggtgcatgaaccgaaaggctattacgccaatttctgttctggcccatgcccgtatctgcgctcagcagacaccacccactcaaccgtgctggggctgtataatacgctcaaccctgaagcgagtgcgtctccctgctgtgtccctcaagatcttgaacccctgaccatactgtactacgttggacgaacaccaaaggtagaacagctatctaatatggtggtgaagagctgtaaatgtagc

SEQ ID NO: 136556 - DNA, 1236 bp, Artificial Sequence
  derived and/or modified sequence
atgaagatgcatttgcagagagcactggtcgtgctggcattgttgaattttgcaaccgtgtccctctcattgtccacttgtactaccttggactttggacacataaagaaaaagcgagtggaagcaattagaggacaaattctttcaaagctgaggcttacgtcgcctccggagccaaccgttatgactcatgtgccttaccaggtgctggcactgtacaactccactagggaactcctcgaggaaatgcatggggaaagagaagagggttgtacccaggaaaataccgaatccgaatactacgccaaggaaattcataagtttgacatgattcaggggctggcggaacacaacgaactcgcagtgtgtcctaagggaataacctcgaaggtgtttagatttaacgtttcgagcgtcgagaagaacaggacgaatctgttccgggcagaattcagagtgcttcgagtccctaacccatcgtccaagcgcaatgagcagcgcatagaattgttccaaatacttcgcccggatgaacatattgccaaacaaaggtacatcggaggtaaaaacctccccacccggggcacggccgagtggcttagctttgatgtgacggacacggtcagagagtggcttctgcgacgcgagtcaaacctggggcttgaaattagcatccactgcccatgccatacctttcagcctaatggtgacattctcgaaaacattcatgaagtgatggagattaagttcaaaggggtggacaatgaagatgaccatggacgcggtgacctcggccggctcaagaaacaaaaggatcatcataacccccaccttatcctcatgatgatacctcctcatcggctcgacaatccaggacagggaggtcaacggaagaagagagcgctggataccaactactgctttcgcaaccttgaagaaaactgttgtgtcagacccctgtacatcgacttcagacaggatctggggtggaagtgggtccacgaacctaagggctactacgcaaacttctgttcagggccttgcccctacctcagatctgcggacactacccattccaccgtgctggggctttacaatactcttaaccctgaagcatccgcatcgccatgttgtgtccctcaagaccttgaaccacttacgattctctactacgtgggccgaacccctaaggtggaacagctgtcgaacatggtggtgaaatcgtgcaagtgcagc

SEQ ID NO: 136557 - DNA, 1236 bp, Artificial Sequence
  derived and/or modified sequence
atgaaaatgcatctacagagagctctcgttgttctagctttgctcaatttcgccacagtgtccctgtccctttctacttgcactactctagatttcggacatataaaaaaaaaacgagttgaagcaatcagagggcagatactgtctaaattgcgactgacgtctccccccgagcctactgttatgacacatgttccctaccaggtactcgcattatataactcgacacgcgagctcctcgaggaaatgcacggggaaagagaagaaggatgcacacaggaaaacacagaatcagaatactacgctaaagaaatccataaatttgatatgatacagggacttgccgaacataatgaactggccgtctgtcctaaagggattacatcgaaagtattccggttcaatgtatcttcggtagaaaaaaaccgaacaaatctttttcgggcagaattcagggtgctcagagtgcctaaccctagttctaaacgcaacgaacagcgcatcgaactgttccagatactgagacccgatgaacatatagcaaaacagcgttacataggggggaaaaacctcccaactcgagggacagccgaatggttatcctttgatgtgacagatacagtgagggaatggcttctcaggcgggaatcaaatctcgggcttgaaataagtatacactgtccctgtcatactttccagcctaacggagatatactagaaaacattcacgaagtgatggaaatcaaatttaaaggagtggataatgaagacgatcacgggcggggggatctagggcggctcaaaaaacaaaaggatcaccacaatccccatttgatacttatgatgatccctccccataggttggataaccctgggcagggggggcagagaaaaaaaagagccctcgatacaaattattgctttagaaacctggaagaaaattgctgtgtcagacctctatatatcgatttccggcaggatctcggatggaagtgggtccacgaacccaaagggtattatgcaaatttttgttctggaccatgtccataccttaggtctgccgatacaactcactcaactgtgttagggctctacaacactctcaacccagaagcatctgcgtctccttgttgtgtcccccaggatctggagcccctcactatcctgtattatgtggggaggactcccaaagtggaacagctatctaacatggtggtgaagagttgtaaatgcagt

SEQ ID NO: 136558 - DNA, 1236 bp, Artificial Sequence
  derived and/or modified sequence
atgaaaatgcatctgcaacgggcacttgtcgttcttgccttactgaattttgcaaccgtctccctctctctcagcacctgtactaccctggattttggccatattaagaaaaagcgggtcgaagctataaggggacaaattctgagtaagttaagactcacttctccgcctgaacctacagtgatgacccatgtaccctaccaggttctggcgctgtacaactcaactcgcgagctgttggaggaaatgcacggagagagagaagaggggtgcacccaggaaaacactgaatctgagtactatgcgaaggaaatacacaagtttgacatgattcagggcttggccgaacataatgagctggcggtgtgtcccaaggggatcacttccaaagtgtttaggtttaatgtatcttcagttgaaaaaaatagaacaaacctgttccgcgctgagttcagagtgctgagggtgccaaacccaagctcaaaacggaacgagcagcgaatcgagctttttcagatcttgcgccccgacgaacacattgcgaaacaacggtacattggcggaaaaaatctgcccacacggggcacagccgaatggctatccttcgacgttactgacaccgtacgcgagtggttgcttaggcgtgagagcaacctgggtcttgaaatcagcattcactgcccatgtcataccttccagccaaacggcgacatattggaaaacattcatgaggtgatggaaatcaaatttaagggcgtggataacgaggacgaccacggcagaggagatctcgggcgacttaagaagcagaaggaccaccacaatccacatctgatcctaatgatgattccacctcatcgactggacaaccccggccagggtggacaacgcaagaaacgggcactcgatactaactattgcttcagaaatctggaggaaaactgttgtgtacgacctctgtatattgattttcgacaggacctcgggtggaagtgggttcacgagcccaaggggtattatgcgaatttctgcagtgggccctgcccctacctccgcagcgctgacaccacccatagtacggttctggggttatacaacactttgaatcctgaggcttccgcgagcccttgctgtgtgccccaggacttggagcccctaactattctttattatgttggcaggacccccaaggttgaacagttatccaacatggtggtaaaatcctgcaaatgttcg

SEQ ID NO: 136559 - DNA, 1236 bp, Artificial Sequence
  derived and/or modified sequence
atgaagatgcacctccagcgtgccctggttgtgctggccttgttgaatttcgccaccgtctcgctgtccctctccacctgcaccaccctagacttcggacacatcaagaagaagagggtggaagccatcaggggccaaatcctctcaaagttacgcctgaccagtcccccagaacctacagttatgacccacgttccataccaggttttggccctgtataattccacccgagagctgcttgaagagatgcacggcgagcgggaggaaggctgcactcaggaaaataccgagtcggaatactacgcaaaggaaatccataagttcgacatgatccaggggctggccgaacataacgaactagccgtgtgccctaagggcatcacgtcaaaggtttttcgcttcaatgtgagctctgtggaaaagaaccggactaacttgttccgagctgaattccgggtcctgcgagtccctaatccaagcagtaagagaaacgaacaaagaatcgagttgttccagatcttgaggccggacgagcatatcgccaagcagaggtacattggaggaaagaaccttcctacaagaggtacggctgagtggctcagtttcgatgttaccgacacagtgagggaatggttactgcggagagaaagcaatctgggcctggagatttccatccactgcccttgccatacgttccagccgaatggggatattctcgagaatatccacgaagtgatggagattaagttcaaaggggtcgataacgaggacgaccatggtcgaggcgatctgggaagactgaaaaagcagaaggatcatcacaatcctcatctgatcctgatgatgattccaccacaccgcctggacaacccgggccagggcggacagcgaaagaagagagccctagatacaaattactgttttagaaacctggaggaaaactgctgtgtcagaccgctgtatatcgattttcgccaggacctgggatggaaatgggtgcatgagccaaaaggctactacgcaaatttctgctccgggccctgcccctacctgagatctgctgatactacccactcaactgtcctggggttatataacaccctgaatcccgaagcctccgcttctccttgctgcgtccctcaggacttggagcccctcacaatactgtattatgtgggacggactcctaaggtagaacagctgtccaacatggtggtcaaaagctgcaagtgctcc

SEQ ID NO: 136560 - DNA, 1236 bp, Artificial Sequence
  derived and/or modified sequence
atgaaaatgcatctgcagagggcccttgtagttttagccctgctgaacttcgccacagttagcttgtctctcagcacctgcaccaccctggactttggccacattaaaaagaaacgggttgaagcaatcaggggccagattctgtctaagttgcgcctgaccagccctccggagccaactgtgatgacccacgtcccctatcaggtgctcgcactgtacaattctacaagggagctcctggaggagatgcatggcgagcgcgaggagggctgcacacaagaaaataccgaatcagagtactatgctaaggagatacacaagtttgacatgatccagggtctggctgaacacaacgaactcgcagtgtgtccaaaaggtatcacatcaaaagtgttccggttcaacgtgtctagcgtggagaagaatcgaacaaatctgtttcgcgcagagtttcgggtgctgcgcgtgccaaatccctcttctaaacgcaacgagcagcgaattgaactgtttcagattctcagaccagatgagcacattgccaaacaacgctacataggaggaaaaaacctgcccactaggggaacggccgaatggctgtcctttgacgtcacagataccgttcgggaatggttgctgcgccgcgaatcgaatctgggtttggagataagtattcattgcccatgccatacattccagcccaacggtgatattctcgagaatattcacgaagtgatggagatcaaatttaagggtgtggacaatgaggacgaccatggaaggggggacctcggcagactcaagaaacaaaaggaccaccacaatccgcacctaattcttatgatgataccaccacatagactagataaccctggacagggaggtcagcgaaagaaacgcgctttggatactaactattgcttcaggaacctagaagagaactgctgcgtgcgccccctctacatcgacttcagacaggatttggggtggaaatgggtccacgagcctaaaggatactacgccaacttctgttccgggccatgcccatatcttcgctccgcggataccactcactccaccgttctggggctgtataacacacttaaccccgaggctagcgccagtccttgttgcgtcccacaggatttagagcccctcactatcctgtactatgtgggccggaccccaaaagtagaacaactgagtaatatggtagtgaagagctgtaagtgcagc

SEQ ID NO: 136561 - DNA, 1236 bp, Artificial Sequence
  derived and/or modified sequence
atgaaaatgcacctccagcgcgctcttgtagtcttggcactgctgaacttcgctacggtatcattgtccttgagcacctgcaccacactggactttggtcacattaaaaagaaacgagtcgaggctattaggggtcagatcctctccaagctgaggttgacttcaccccctgagcctactgttatgacccatgtgccttaccaggttctcgctctgtacaatagcacccgcgagctgctggaggagatgcacggggagcgcgaagagggttgcacccaggagaacaccgagtctgaatactacgcgaaggagattcacaaattcgacatgatccagggcctggctgaacataatgagctcgccgtgtgccctaaaggaatcacctctaaggtgttccggttcaacgtatccagcgtagagaaaaatcggacaaatctttttcgcgctgaattccgcgtgctgcgagtacccaatccctcctctaaaaggaacgaacagagaatagaactcttccagatactgaggcccgatgaacatatcgctaagcagcggtatattggaggtaaaaaccttccaacccgggggactgcagagtggctgagctttgacgtcacagacactgtccgggagtggctcttgcggagagaatccaatctcggactggagatcagcattcactgtccatgtcacacctttcagcctaatggcgacattcttgaaaatattcacgaagtgatggaaataaaattcaagggggtggataacgaggacgaccatggccggggggacctcggaaggctgaagaagcagaaggaccaccacaacccccaccttatcctgatgatgataccaccgcaccgactcgacaaccctggacagggggggcagcggaagaaaagagctcttgacacaaattattgctttcggaatctggaagaaaattgctgtgtgcggccgttgtacatcgattttagacaggacctgggttggaagtgggtgcacgagcctaagggctattatgccaacttttgttctggcccctgcccttatctgagatccgctgacaccacccactctaccgtgctggggctttacaacaccctgaaccccgaagcatctgcgtcaccctgttgcgtgcctcaggacctggaaccgcttacaatcctgtattatgtcggtcgaacccctaaggtggaacagctgtctaacatggttgtgaagtcttgtaaatgcagc

SEQ ID NO: 136562 - DNA, 1236 bp, Artificial Sequence
  derived and/or modified sequence
atgaagatgcacctccagcgcgcactggttgtgttggctctgctcaatttcgccactgtctccctgagtttgtcaacgtgcaccactctcgattttggacacatcaaaaagaagagggtggaggccatcaggggacagatcctcagtaaactgcggctgaccagcccgccggaacctaccgtcatgacccacgtgccttaccaggtgcttgctttgtataactccactcgggagctgcttgaagaaatgcatggcgagcgcgaggagggatgtacccaagaaaataccgagtcagagtattacgcgaaggaaatccacaaatttgatatgatccaagggttggcagagcacaatgaacttgccgtgtgcccaaagggaatcacttcaaaagtgttcaggttcaacgtgtcatccgtggagaaaaaccggactaatcttttcagagcggagtttcgggtgcttcgggtgccaaacccgtccagcaagaggaacgaacaacgcattgagctgttccagattctgcggccggacgaacatatagcgaaacaaagatacatcggtggaaagaacctgccgactcgcggcaccgcagagtggcttagcttcgacgtcaccgacactgtcagagaatggctgctgcgcagagaatcaaatcttggtctggagattagcattcattgcccgtgccatacgttccagcccaatggagatatccttgaaaacatccacgaagttatggagatcaagttcaagggtgtggacaatgaggacgaccatggacgcggggacctggggcgcctgaagaagcagaaggatcaccataacccgcacctcatcctcatgatgatcccaccgcatcgccttgacaatcccgggcaaggaggacagcggaagaaacgcgctctggacactaattactgttttagaaatcttgaggaaaactgctgtgtgcggcccctgtacatcgacttccgccaagatctgggatggaagtgggtacacgaacccaagggctactacgccaacttctgctcgggaccatgcccttacctccgctcggctgacacgactcactctacggtgctgggactgtacaacactctcaaccctgaagcgtccgcctccccctgctgcgtgccacaggatctggaaccgcttactatcttgtactacgtcggccggacccctaaagtggagcagctgtccaacatggtcgtgaaatcgtgtaaatgttcc

SEQ ID NO: 136563 - DNA, 1236 bp, Artificial Sequence
  derived and/or modified sequence
atgaagatgcatctacaaagagcattagtggtgttagctttgttaaactttgcaactgttagtctttctttgtctacatgcacaaccctcgatttcggtcatataaagaagaagagagttgaagcaataagggggcaaattctatctaagctccggttgacctccccgccagaaccaacggttatgactcacgtcccgtatcaggtacttgccctttataattcgacccgagaattgttggaagaaatgcatggtgagagagaggaggggtgcactcaagagaataccgaatctgagtattatgcgaaggaaattcataagtttgatatgatacaaggattggcagagcataatgaactggccgtttgtccaaaaggtattacatccaaagtattcaggttcaatgtaagtagtgtggagaagaacagaactaacctttttcgggctgagttcagagtgttgagggtgcccaacccgtcgtcaaagagaaacgagcagagaatcgagcttttccaaatcctgaggccggatgaacacattgctaagcaacgatatattggtggaaagaacttacctacgcgcggaaccgctgaatggttgtctttcgacgtgactgatactgtcagggaatggcttctccgacgggagagcaatctaggtctggaaattagtattcattgcccttgccatacctttcaacctaatggtgacatactcgagaacatccacgaggtcatggagataaaattcaaaggggtggacaatgaggatgatcacggtcgtggtgatcttggaagattgaagaaacagaaggatcatcataatcctcacctcatattaatgatgatccctccacaccgactagataaccctggtcaggggggacaacggaaaaagagggcgcttgataccaactactgcttcagaaatttggaagagaactgttgcgttcgtccactatacattgacttcagacaagacttgggttggaagtgggtgcacgagcccaagggttattacgcaaatttctgcagtggtccgtgcccatatcttcgatcggcggatactactcacagtactgtgttgggactgtataatacgttgaatcctgaggcttctgcttccccttgttgtgtgcctcaagatttggaacctttaacaatcctgtactatgttggtcgtacgccaaaggtggagcaattgtcaaatatggttgttaagtcttgcaagtgcagc

SEQ ID NO: 136564 - DNA, 1236 bp, Artificial Sequence
  derived and/or modified sequence
atgaagatgcacctgcaaagagcgctggtggtccttgcgctactgaatttcgccaccgtttctctctctctcagcacgtgcactactctcgacttcggtcacataaaaaaaaaaagagtggaagcaatccgggggcagattctgtccaagcttaggctgaccagcccacctgagcctaccgtaatgacgcacgtgccttaccaggttcttgccctgtacaacagcacgcgagagttactggaggaaatgcatggtgaaagagaggaaggatgcacccaagaaaacactgagtcagaatattacgccaaggagatacacaaattcgacatgatacagggtcttgcggaacataacgaactcgctgtatgtccgaagggcattacgagcaaagtgttccgatttaatgtgagctctgtggaaaagaacagaaccaatctgttccgcgccgagtttcgcgtgttgcgcgtgcccaatccctctagcaaacgtaacgaacaacgaattgagctgttccagatacttaggcccgatgagcatatcgccaaacaacggtatatcggaggcaaaaatctgccgaccagagggaccgccgaatggctaagttttgacgtaacggataccgtgagggaatggttgttacggcgcgagtccaatctagggttagagatctccatccactgtccatgccacacatttcagcctaatggggacatccttgaaaacatccatgaggtgatggagattaagttcaaaggtgtggataatgaagatgaccacgggcggggggacttaggccgtctgaagaagcagaaggatcaccataatccgcacctcattctgatgatgatccctccccacagacttgataatccgggacagggcggtcagagaaaaaaacgagcgctggacacaaattattgtttccgcaacctggaggagaattgctgcgtgagaccgttgtatattgacttcaggcaggacctgggttggaagtgggtgcatgaaccaaagggttattacgcaaacttctgtagcgggccttgcccctacctgagatcggctgatacgactcattctactgtattgggactgtacaatactctgaatccagaagcctccgcttctccttgctgtgtgccccaggacctggaacctctaaccatcctctactacgtcggacgcacccccaaggtggagcagctgtctaacatggtcgtgaaaagctgtaaatgctcc

SEQ ID NO: 136565 - DNA, 1236 bp, Artificial Sequence
  derived and/or modified sequence
atgaagatgcacttgcagcgcgcccttgtcgtgcttgctttgctcaactttgctaccgtcagtctgagcctctcaacctgtaccacacttgattttggacacataaagaaaaagagagttgaagccattagaggtcagattttatctaagctgcggttgacatctccccccgagccaaccgtcatgactcacgtgccatatcaggttctggcactgtacaatagcacaagagaactgttagaggagatgcacggagagcgcgaagagggttgtactcaggaaaatactgagtccgaatattatgccaaagagatccataaattcgatatgatccagggcttggccgaacacaatgaacttgcagtatgtcctaagggaataactagcaaagtctttagattcaacgtttccagcgttgaaaagaaccgaaccaatctgttcagagccgagtttagagtcttgcgtgtgcccaatccgtcctcaaaacggaatgaacaacggattgaactgtttcagatcctgagacccgacgagcacattgctaaacagaggtacatcggcgggaagaatctaccaaccagggggacagcagagtggttgagttttgacgttaccgatacagtcagggagtggctgctcaggcgggaaagcaacttgggtctggagatttctatccattgcccctgccatacttttcaacccaatggtgacatcctggagaatatacatgaagtcatggaaatcaaatttaagggggtcgataacgaagatgatcacggccgcggcgacctgggccggcttaagaaacagaaggaccatcataacccccatcttatactcatgatgattccaccacaccggctggataatccaggccaggggggacagcggaaaaagagagcgctcgacactaattactgctttaggaatctcgaagagaattgttgtgtacggccactgtatattgactttcgacaggacctcggttggaagtgggtccatgaaccaaaggggtattacgccaatttctgttcaggtccttgtccgtatctgagaagtgcggacactacccattcgactgtgcttggactgtacaataccttgaatcctgaagcaagtgcttctccatgttgtgtgccgcaggacctcgagcctttgaccattctctactatgttggacgcacgcccaaagtggagcagcttagtaacatggtcgtgaagtcctgcaagtgtagc

SEQ ID NO: 136566 - DNA, 1236 bp, Artificial Sequence
  derived and/or modified sequence
atgaagatgcacctgcagcgcgcacttgtcgtgctggccctgctcaatttcgcaaccgtctcgcttagcctgtctacttgtactactctggatttcggacacatcaagaagaagagagtggaggccatcaggggccagatcctctcgaagctgcggctgacctcaccccctgagccaaccgtcatgacccatgtcccgtaccaggtgctggcactttacaatagcactcgggagctcctggaagagatgcacggagaacgggaggagggctgcacccaggaaaacacggaatccgaatactacgccaaggaaatccacaagtttgatatgatccaaggattggccgagcacaatgaattggctgtgtgcccaaagggtatcacttcaaaggttttccgcttcaacgtgagcagcgtggaaaagaaccgcactaacctgttccgcgccgaatttagagtgctccgggtgccaaacccatcctcgaagcgtaacgaacagcggatcgaactgttccaaatcctgcgacctgacgaacacattgccaagcagcgctacatcgggggaaagaacctgccaacccgtggaactgcagaatggctgtccttcgacgtgactgacaccgtgagagagtggctgctgcggagagaatccaacctgggactggaaatctcaatccactgcccatgccatacctttcagccgaatggagacatcctcgagaacatccacgaagtgatggaaatcaagtttaagggagtggataatgaggacgatcatggtcggggagatctgggacggctcaagaagcagaaggaccaccacaacccacaccttattctgatgatgattccgcctcaccggcttgacaatccgggtcaaggaggccagcgcaaaaagagggccctggacacgaattactgctttaggaacctggaggaaaactgttgtgttagaccactctacattgacttccggcaggacctcggttggaagtgggtgcatgagccgaagggctactacgcgaacttttgctccggcccatgcccgtacctgcgctcggccgacactacccattccactgtgctgggactgtacaataccctgaacccagaagcaagcgcctcgccgtgctgcgtgcctcaagatctggaaccgttgaccatcttgtactatgtgggaaggactccaaaagtcgaacagctttcgaacatggtggtgaagtcctgcaagtgttcc

SEQ ID NO: 136567 - DNA, 1236 bp, Artificial Sequence
  derived and/or modified sequence
atgaaaatgcacctccagagggccctcgtggtgttggccttgctcaactttgccactgtctccctctccctgtctacttgtacaactctcgactttggccacattaaaaagaagagggtggaggccattagaggtcagattttatccaagctgcgactcacctctcctccagaacccacagtaatgacccacgtgccgtatcaagtgctcgcactgtacaattccacaagagaactcctcgaagaaatgcacggcgaaagggaggaggggtgcacacaggaaaacacagaatcggagtattatgcaaaggaaatccacaagttcgatatgatacagggactggccgagcacaacgagctcgccgtgtgccccaagggcattacatcgaaggttttcaggttcaatgtgtcaagcgtcgaaaagaatcggacaaatctgtttagggctgagttcagggtgcttcgtgtccctaatccttcatccaaacgcaacgagcagaggatcgagctatttcagatattgcgtcccgacgagcatatcgctaagcagagatacatcggagggaagaatctgcccactcggggcaccgcagaatggctgagcttcgacgtgacagatacagtgcgcgagtggctgctgcgtagggagtccaacctcggtttggagatatcgatccattgcccatgtcatacatttcaacctaacggcgatatcttggaaaacatccacgaagtcatggagattaagttcaagggcgtagataacgaggatgaccatggaagaggggacctgggccgcctgaaaaagcaaaaggaccaccataaccctcacctgatcctcatgatgatcccaccccaccgcctagacaaccctgggcaggggggacagagaaagaaacgtgcactggatacaaattactgctttcggaacctcgaggagaactgttgcgtacgaccattgtatatagacttccggcaagacctaggttggaaatgggtccacgagcccaagggatactacgctaacttctgctccggtccatgcccgtacctcaggtcagcggacacgactcattcaactgtgttgggtctctacaacacattgaaccccgaggctagcgcaagtccatgttgcgtgcctcaagatctggaaccacttacgatactttactatgtgggacggacccccaaggtagagcagctgtcaaacatggtggtaaagtcttgcaagtgctcc

SEQ ID NO: 136568 - DNA, 1236 bp, Artificial Sequence
  derived and/or modified sequence
atgaagatgcacttgcagagggctctggtcgttctggcgctgctgaatttcgcgactgtttcactgtccctcagcacttgtaccactctcgactttggacacattaagaaaaaacgcgttgaggccattcgcggacagatcctgagcaagctgcggctcactagccctccagaaccgactgtgatgactcacgtgccctaccaggtcctggcactgtacaactcgactcgcgaactgcttgaggagatgcacggggagcgggaggaaggatgcacccaagaaaatacggagtccgaatactacgcaaaggaaatccacaaatttgacatgatccagggactggccgaacataatgagctggcggtgtgccccaagggcatcacgtccaaagtgttccggttcaacgtgtccagcgtggaaaagaatcgcaccaatctgttccgcgctgagtttcgcgttctccgcgtcccgaacccgagttccaagagaaacgaacagcggatcgaactttttcagatcctgcgcccggacgaacacatcgcgaagcaacggtacattggcggcaagaatctcccgacgaggggcaccgcggaatggttgtcgtttgacgtcaccgacaccgtgcgcgagtggctgctccgacgggaatccaacctgggtcttgagatctctatccactgcccatgccataccttccagccgaatggagacatcttggagaatatccacgaagtcatggaaatcaagtttaagggcgtggacaacgaggatgaccacggtcggggtgacctgggccgtctgaaaaagcagaaggaccatcataacccccacctcatcctgatgatgatcccgcctcaccgcctcgataatcctgggcaaggtggccagagaaagaagagggcactggataccaactactgcttccggaaccttgaggagaattgttgcgtgcggccactgtacatcgattttagacaggacctggggtggaaatgggtgcacgagcccaagggatactacgccaacttctgttccgggccctgcccgtacttgagatctgcagataccacccactccacggtcctcggactctacaataccctcaacccagaggctagcgcatccccgtgctgcgtaccgcaggacctggaaccacttactatcctttactacgtggggcgcactcctaaggtcgagcaactctcgaacatggtcgtgaagtcgtgcaagtgctcg

SEQ ID NO: 136569 - DNA, 1236 bp, Artificial Sequence
  derived and/or modified sequence
atgaagatgcaccttcaacgggccctggttgtgctggccttgctcaatttcgccactgtctcactgagcctgtcgacttgcaccactctcgattttggtcacattaagaagaaaagagtcgaagcaatcagaggacagatcctgtcaaagctccggctcacctccccgccggaaccaactgtcatgacccacgtgccataccaggtcctcgccctttacaacagcacccgcgaactgctggaggagatgcatggagaacgggaggagggctgcacccaggaaaacaccgaatcggagtactacgccaaggaaattcataagttcgacatgatccaaggactggccgaacataatgaactggcggtgtgcccgaaaggcatcacctccaaggtgtttcgcttcaatgtctcctccgtcgagaagaaccgcactaacctgtttcgggctgaattccgcgtgctgcgagttcccaacccgtcgtccaagcgaaatgaacaaagaatcgaactgttccagatcctgcgaccggatgagcacatcgcgaagcaacgatacatcggaggcaagaaccttcctaccaggggaaccgctgagtggctgtcctttgacgtcactgacaccgtgagagaatggttgctgcgcagagaatctaacctgggactcgaaatttccatacattgcccctgccacacttttcagccgaatggcgatatcttggaaaacatccacgaagtcatggaaatcaaattcaagggtgtcgacaacgaagatgatcatggcagaggtgacttggggcggctcaagaagcagaaagaccatcacaatccgcatctcatcctcatgatgatcccaccgcacagactggataacccaggacaggggggccagagaaaaaagcgcgcactggacaccaactactgcttccggaacctcgaagaaaattgttgcgtccggccactgtacattgacttcaggcaggacctgggatggaaatgggtgcatgagccgaagggctattacgccaacttctgctcaggaccgtgtccgtacctgcgcagcgccgataccacccactctactgtgctcgggctctacaacaccctgaacccagaagcgtccgcgtcgccgtgttgcgtgccacaagatctcgagccgctcactatcctgtattacgtgggacgcaccccgaaagtggagcagctctcaaacatggttgtgaaatcatgcaaatgttca

SEQ ID NO: 136570 - DNA, 1236 bp, Artificial Sequence
  derived and/or modified sequence
atgaaaatgcacctccaaagagcccttgtggtgcttgccttgctgaatttcgcaaccgtgtcactctcactgagcacctgtactacgctcgattttggccacataaagaaaaaacgggtggaagcaatcagagggcagatcctcagcaaactgcggctgactagccctccagaaccaaccgtgatgacccatgtgccctatcaagtcctggctctgtacaactcaaccagagaacttctggaagaaatgcatggtgagagagaggaaggatgtacccaggagaatactgagagcgaatactacgcgaaagaaatacataagtttgatatgattcagggtttggctgagcacaacgaactcgcagtgtgtcctaagggaattacttccaaagtgtttagattcaatgtctcttccgtggaaaagaataggacgaacctctttagagccgagttcagggtgctgcgtgtgcccaatccgtccagcaagcgcaatgaacagcgcattgaactgttccagatcctgcgtccagacgagcatatcgcaaaacagcgttacatcggtgggaaaaacctgcctactagagggacggccgagtggctgtcattcgatgtcactgatactgtccgggaatggctgttgcggcgggagtcgaaccttggactcgagatatctattcattgtccatgccatacctttcaacccaacggtgacatcttggagaatatccacgaagtgatggagattaagttcaagggggtggataatgaagatgaccatggcaggggagatctcggtagactgaaaaagcagaaggatcaccacaacccgcatcttatccttatgatgatacctccacacagactcgacaacccggggcagggaggccaacgaaagaagcgggcactcgataccaactactgttttagaaatcttgaagaaaactgctgtgtgcgtcctttgtacattgattttcgtcaagatctgggatggaagtgggtgcatgagcctaagggatactatgcgaacttctgttcagggccctgtccctacctgcgaagcgctgatactactcatagcaccgtgctgggtctgtacaacacccttaatcctgaggcctccgcctccccctgctgtgtgccgcaagacctggaaccactcactattctgtactacgtcggacgcactcctaaggtggagcagctttccaacatggtggtcaagtcatgtaaatgcagc

SEQ ID NO: 136571 - DNA, 1236 bp, Artificial Sequence
  derived and/or modified sequence
atgaagatgcacctgcagcgggcactggtggtccttgcattgctgaatttcgctaccgtgtcactgtcactttcgacgtgtaccactctggactttggacacattaagaagaaacgggtggaagcaatcaggggtcagatcctttccaaattgcggttgacctctccacctgaacctactgtgatgacccatgtgccttaccaagtgctggccctgtacaattcaaccagagagctccttgaggaaatgcatggagaacgtgaggaaggatgtacccaagaaaacaccgaatccgagtactacgcaaaggaaattcacaagtttgacatgatccagggacttgccgaacacaacgaactcgcggtctgtccaaaagggatcacttccaaggtgtttcgcttcaatgtgtcctcggttgaaaagaataggactaacctgttccgcgcagaatttcgagtgctgagagtgccgaacccatcctccaagcgcaatgagcaacgaatcgagctttttcagattcttagacctgacgagcacatagcaaagcagaggtatattggaggcaaaaaccttcccacccggggtaccgctgagtggctgtccttcgacgtgaccgatactgtgcgagagtggctcctgagacgagaatcaaaccttggtcttgaaatatcaattcactgcccgtgtcatacctttcaacccaacggagacatcctcgaaaacatccatgaggtgatggagatcaaattcaaaggagtggataatgaggatgatcacggacgaggtgacctgggtagactcaagaagcaaaaagatcatcacaatccgcaccttatcctgatgatgatcccaccacatcggctggataatcctggacaaggtggacaacggaagaagcgtgcgcttgacacgaactactgtttcagaaaccttgaagaaaactgttgcgtgaggcccctttacatagattttcgccaggatcttggttggaagtgggtgcatgaacctaaagggtattacgcgaacttttgctcgggcccttgtccttacctgaggtcggcagacactacccactcgactgtgctgggactgtacaataccctgaacccagaggcctcagcctccccatgttgcgtgccccaggatcttgaacccttgactatcctctactacgtcggcagaacccctaaggtcgaacaactttcgaacatggtggtgaagtcgtgtaagtgtagc

SEQ ID NO: 136572 - DNA, 1236 bp, Artificial Sequence
  derived and/or modified sequence
atgaaaatgcaccttcaacgagcccttgtcgtgctggcccttctgaactttgcaaccgtttcgctgagcctctcaacctgtaccactcttgatttcggacatatcaagaagaagagggtcgaagcaatccgcggtcagattctgagtaagctgagactcacctccccaccggaacctaccgtgatgacccatgtgccttaccaagtgctcgcactttacaacagcactcgcgaacttctggaagaaatgcacggggaaagggaggagggatgcacccaggagaacaccgagtcggaatactacgcaaaagaaatccacaaattcgacatgattcaaggtctggcagaacacaatgagctggccgtctgtcctaagggcatcacttcaaaagttttccgctttaacgtgtcgtccgtggagaagaacagaaccaaccttttccgcgcggagtttagagtcctgcgtgttcctaatccttcctcgaaaagaaacgagcagaggatcgagttgtttcagatcctcagacccgatgagcatatagctaagcagcgatacattggggggaaaaatctgccaactaggggaaccgccgagtggctgtcgtttgatgtcactgatactgtccgggagtggctgcttagaagagagtcgaatctggggctcgagatcagcattcattgcccctgtcacaccttccaacctaatggagacattctcgaaaacattcatgaagtgatggagattaagttcaagggagtggataatgaggacgaccatggaagaggtgaccttggacgcctgaaaaaacaaaaggaccatcataatccacatttgatccttatgatgatccctccccaccgtctcgacaatcctggacagggaggacaacggaaaaagcgggcactggataccaattactgttttcgcaaccttgaagaaaactgctgcgtgcgccctctctatatcgactttagacaggatctcggatggaaatgggtgcatgaacccaagggttactatgcaaatttctgttcaggtccatgtccatacctcaggagcgcagacaccacccactccactgtgctgggcctttacaataccttgaaccccgaagcatcagcgtcaccttgctgtgtgcctcaggacctggaacctttgaccatcttgtactacgtcggacggacccctaaggtggagcagttgtccaacatggtcgtcaagtcatgtaagtgtagc

SEQ ID NO: 136573 - DNA, 1236 bp, Artificial Sequence
  derived and/or modified sequence
atgaagatgcatctgcagagagccctggtggtgttggccctcctgaatttcgcgactgtttctctgagtctgagtacttgtaccactcttgattttggtcatattaagaaaaagcgcgtcgaagcgattcgcggccaaatccttagcaagcttaggctcacttctcctccagagccaactgtgatgacgcacgttccttatcaagtcctggccctatataattctacacgagaactgctggaagagatgcatggagaacgtgaagaaggttgcacgcaggagaacacggagagcgaatattatgcgaaagagatccacaaatttgacatgattcaaggtctcgccgagcataacgaacttgccgtctgcccaaagggtattacaagcaaggtatttcgctttaacgtaagcagcgtcgaaaagaaccgtaccaatctgtttcgagctgagtttcgcgtcctgagggtcccgaatccttcgagcaagcgcaatgaacaacgaattgaactgtttcagatcctgcgtccggatgagcatatcgcaaagcagcgctacatcggcggtaaaaacctgccgactcgggggaccgcagagtggctgagtttcgacgtgaccgacaccgtgcgggagtggctgttgcgcagagaaagcaatctgggcttggagattagcattcattgtccgtgccataccttccaaccgaacggtgatatcctggagaacatccacgaggtcatggagattaaattcaagggtgttgacaatgaggacgaccacggacgtggagatctaggtcgtctcaagaaacaaaaagatcatcacaatcctcatctgattctgatgatgatcccgcctcaccgcctggacaaccctggccaaggtggtcaacgcaagaagcgagctctggatacaaattactgctttcgcaacctggaggaaaactgctgtgttcgcccgttgtatatcgacttccgccaggatcttggttggaaatgggttcacgagccaaaaggatattatgccaacttctgtagcgggccgtgtccgtaccttcggagcgcggatactacccacagcactgtgttaggtctatataacactctgaatcctgaggcgagcgcgtctccatgctgcgttccgcaggatctggagccactgaccattctgtattacgtgggtcgcacccctaaagtggagcagctcagcaatatggtggttaaatcctgcaaatgcagc

SEQ ID NO: 136574 - DNA, 1236 bp, Artificial Sequence
  derived and/or modified sequence
atgaagatgcacctgcagcgggcgctggtcgttctggcgctgcttaactttgcaaccgtgagcctcagcctctcgacttgcaccacccttgactttggccatatcaaaaagaagagggtcgaggccatccgggggcaaatcctgtcaaagctgcgactgacctcgccgccagagcctacggtcatgactcatgtcccataccaggtcttggctctttacaactccactcgtgaactcctcgaagaaatgcatggagagagagaagaagggtgcacccaagagaacactgagtcggaatactatgctaaggaaatacataagttcgatatgattcagggactggccgaacataatgagcttgcggtgtgcccaaaaggtatcacctcgaaagtgttcagattcaatgtgagctcggtggagaaaaaccgcacgaatctctttcgagcagaattcagagtgctgagggtgcctaacccctcgtcaaagcggaacgagcaaaggattgaactgttccagatccttagaccagatgaacacatcgcgaaacagcggtacatcggaggcaaaaacctccccactcggggaactgccgagtggctgtcattcgacgttaccgataccgtgcgcgaatggctgcttcgccgtgaatctaatcttggactcgaaatctctatccactgcccgtgccacactttccagccaaacggtgacattcttgagaacatccacgaagtgatggaaatcaaattcaagggagtggataatgaggacgatcacgggcgcggcgaccttggaagattgaagaagcagaaggatcaccataatccacatctcatcctgatgatgatcccgcctcaccggctggacaacccgggccagggtggacagcggaagaagagagcgctcgacactaactactgctttcggaatctcgaggaaaactgctgcgtcagaccgctgtacattgacttcaggcaagacctgggatggaaatgggtccacgagcccaagggatactacgccaatttctgttcgggcccctgtccttatctgcgcagcgcagacaccacccactccacggtgctgggattgtacaatacgctcaacccagaggcatcggcctccccgtgctgcgtcccacaagatttggagccccttaccatcctctactacgtggggcgaactccgaaggtggaacaactgtctaacatggttgtgaaaagctgtaagtgttcc

SEQ ID NO: 136575 - DNA, 1236 bp, Artificial Sequence
  derived and/or modified sequence
atgaagatgcacctgcagcgggccttggtggtcttggctctgcttaacttcgccaccgtcagcctttccctgtcgacctgtaccactctcgatttcgggcacatcaaaaagaagagggtcgaagccatccgcggtcagattctgtcgaaactgcgcttgacttcgccaccagaaccaaccgtgatgactcacgtgccataccaggtgctggctctctacaactcgactagagagctgctcgaagagatgcatggagaacgcgaagaggggtgcacgcaggaaaatactgaatccgagtactatgcgaaggaaatacacaagttcgacatgatccagggattggctgagcataacgagctggcggtgtgcccaaagggaattacttcgaaggtgtttcggttcaacgtgagctcggtggaaaagaaccggaccaacctgttccgcgcggagttccgggtgctccgagtgccaaatccatcgtcaaagcggaacgaacagcgcatcgaactgtttcaaatcctgcgcccggacgaacatatcgccaaacaacgctacatcggaggcaagaatcttccgaccaggggaactgctgagtggctctcgtttgatgtgactgacaccgtccgtgaatggctgctccgtagagagagtaatctgggactcgagatctccatccattgcccatgccatacttttcagccgaacggcgatatcttggagaatattcatgaggtcatggagatcaagttcaagggagtggacaacgaggatgaccacggaagaggagatctgggtcgtctgaaaaaacagaaggaccaccacaacccgcacctcatcctcatgatgatcccgcctcacaggctcgacaatccgggacagggtggccagcgaaagaagcgggccctggatactaattactgcttccggaacctggaagagaactgctgcgtgcggccactctacatcgactttcggcaggacctcgggtggaaatgggtgcacgagcccaagggatactacgccaatttctgctccggcccctgcccgtacctgagatcagccgataccactcattccaccgtgctgggactttacaacactctgaatccggaagcatcggcgagcccgtgctgtgtccctcaggatctggaaccactgactatcctctactacgtgggaaggactcctaaggttgagcagctgtctaacatggtggtgaagagctgcaagtgctcg

SEQ ID NO: 136576 - DNA, 1236 bp, Artificial Sequence
  derived and/or modified sequence
atgaagatgcacctgcaacgagccctggtggtactggctctgctgaattttgctacagttagcctgtctctgtccacatgtaccactctggattttggacacataaaaaagaaaagggtcgaagcaatcaggggacagattctttctaagctgagacttacctctcctccagagcctaccgtgatgacccacgtgccatatcaggtgctggccctgtataatagcacgagagagctcttggaagagatgcatggagaacgcgaggagggctgcactcaggagaatactgagagcgagtactatgccaaggaaatccacaaattcgacatgatccaggggctggctgagcacaacgagctcgcagtgtgcccaaaaggaatcaccagcaaggtgtttcggttcaatgtttcttccgttgagaaaaacaggaccaacctcttccgggctgaattcagagtcctcagagtcccgaatccatcctccaagcgtaatgaacagcgtattgaactgttccaaattttgaggcctgacgagcacatcgctaaacagcggtacatcgggggcaagaatcttccaactagggggacagccgagtggctctctttcgacgtgacggataccgtaagggagtggttgctgagaagggaatcgaacctgggcctggagatatcgattcactgtccctgtcacacctttcagcccaacggcgacatcctggagaacattcacgaggtgatggaaatcaagtttaaaggcgtggacaacgaggatgaccatggcaggggcgatctcggacgactgaagaagcagaaggatcaccataatccacatctcatcctgatgatgataccgccgcatagactggacaatcctgggcaaggcggccagcggaagaagagagctctagatacgaattattgcttcaggaacctcgaggaaaactgttgcgtccgacctctgtatattgactttcggcaggacctgggctggaagtgggtgcatgaacccaaagggtattatgccaacttctgcagcggaccatgtccataccttcgttcagctgatacgacccacagcacggtgctgggattatacaacacactgaatcccgaggcttctgcaagcccttgctgtgttccccaggatcttgaacctctgacgatcctatactacgtaggacggactcccaaagttgagcaactgagtaacatggtcgttaaaagctgtaagtgttcc

SEQ ID NO: 136577 - DNA, 1236 bp, Artificial Sequence
  derived and/or modified sequence
atgaagatgcacttgcagagggcgttggtcgtgcttgcacttctgaacttcgccactgtgtcactgtcgttgagcacctgcaccactctggactttgggcacatcaagaaaaagcgggtcgaagctatacgtggacagattttgtccaaacttagactgaccagcccacctgagcctactgtgatgactcatgtgccttaccaagtgcttgcattgtacaatagcacccgtgaactgctcgaagaaatgcatggagaaagagaagagggctgcacccaagaaaacaccgagtccgagtactacgctaaggaaattcacaaatttgatatgattcagggactcgcagaacataacgagttggccgtttgtcctaagggaatcacctccaaagtgttccgctttaatgtgtcaagcgtggaaaagaaccggaccaatctgttcagagcagaattcagagtgctcagagtccctaatccatcctcgaagagaaatgagcaacgcatcgaactctttcaaatacttcgccctgatgagcacattgccaagcagaggtacattggcggcaagaaccttcccaccagaggcacggcagaatggcttagctttgacgtgactgacaccgtgcgtgaatggctgctgcgtcgcgaatcgaacctggggctggagatatccatccattgtccttgtcatactttccaaccaaatggtgatattctggaaaacattcacgaagtcatggaaatcaagttcaagggtgtcgataacgaggatgatcacggacggggtgatttgggaagattgaaaaagcagaaagatcaccataacccacacctgatcctgatgatgatccctccccatagactcgacaaccctggtcaaggtggacaaaggaagaagagagcactggacactaactactgttttagaaacctggaggagaattgttgcgtgcgcccactttacattgactttcgacaagacctcgggtggaagtgggtgcatgaacctaaaggctattacgcaaacttctgttctggcccttgtccttacctgagatctgcagataccacccattcgacggttctgggactttacaacaccctcaaccctgaagcatcggcatccccgtgctgtgtgccacaagatttggagcctctcactatcctctactacgtcggtcgtaccccaaaggtggaacagctctcaaatatggtggtcaagtcgtgcaaatgctcg

SEQ ID NO: 136578 - DNA, 1236 bp, Artificial Sequence
  derived and/or modified sequence
atgaaaatgcatctccagagagccttggtagtcctggccctccttaatttcgccaccgtgagcctatccctcagtacgtgcacgaccctcgacttcggccacattaaaaagaagcgggtggaagccatacgaggccagattctgtctaagttacgtcttacctctcctccagaacccaccgtgatgacgcacgtgccataccaggttctggccctgtataatagtacgagggaactgctggaggagatgcacggcgagagagaagagggttgtacccaggaaaacaccgagagcgagtattatgcaaaagaaatacataaatttgacatgatccagggactagcagaacacaacgagttggcagtgtgcccgaaaggcatcacgtccaaggtattccgcttcaatgtgtccagcgttgaaaaaaatcgtaccaacctgtttcgggccgaattcagagtcctgcgcgtgcccaatccaagctctaagcgcaacgagcagcgaatcgagctgtttcagatcttgagacccgacgagcacatcgctaagcagcgttacataggcggaaagaacttgcctacccgcgggacggcggagtggctaagctttgacgtgaccgacaccgttcgagagtggctgttgaggcgtgagagcaacctgggcctcgagatttctatccattgcccttgccataccttccagcctaacggtgacatcctcgaaaatattcatgaggtgatggaaattaagttcaagggggtggacaacgaggatgatcacggacgcggtgacctgggtcgtctgaagaaacaaaaggaccaccataacccccatctgatcctgatgatgatcccaccacacagactggacaaccccggtcaaggaggccagcggaaaaagagggctctcgacaccaattattgctttcggaatctggaggagaactgctgcgtgagaccactttacatagactttagacaggatctcggctggaagtgggtccacgagccaaaggggtattacgcaaatttttgttccgggccatgtccctatcttaggtcagcggacaccacccatagtactgtgctgggactttacaacacactcaaccccgaagcttccgcctctccatgctgcgtgccacaggatctcgaacccctcacgatcctgtattatgtgggtaggaccccaaaggtagaacagctatccaacatggtagttaaatcttgcaagtgctcc

SEQ ID NO: 136579 - DNA, 1236 bp, Artificial Sequence
  derived and/or modified sequence
atgaagatgcacctgcagcgggccctggtggtccttgctctgctgaatttcgccacggtgtcgctgtccctgtccacctgcactactctggacttcggccacatcaagaagaagcgggtagaggcgatccggggtcagatcctttcaaagctcaggcttacctcgcctcccgagccgaccgtgatgacccacgtgccatatcaagtccttgctctctacaactcaactagagaactgcttgaggaaatgcatggtgagcgggaagaagggtgcactcaggaaaatacggagtcggaatactacgccaaggaaatccacaagttcgacatgatccaagggctggcagaacataatgaactggccgtgtgcccgaaaggtatcacctcgaaggtgtttcgtttcaacgtgtcaagcgtcgaaaagaatcgcacgaacctgttcagagcggagttccgagtcctccgggtgccgaatccttcctcaaagaggaacgagcagcgcatcgaactgttccagatcctgcgacctgacgaacatattgcgaaacagagatacatcggcggaaagaacttgccgacccgaggcactgcggaatggctctcattcgatgtcactgatactgtcagggaatggctcctcaggcgggaatcgaatttgggcctggagatctctatccattgcccgtgccacacctttcagccaaatggggacatcttggagaacatccacgaggttatggaaatcaaattcaagggcgtggacaatgaggatgatcacggtcgcggcgatttgggccggctgaagaagcaaaaggaccaccataacccacacctgatcctgatgatgatcccgccgcaccgcctcgataacccgggacaaggaggacagcgcaaaaagcgggcacttgacaccaattactgcttcaggaacctggaagaaaactgctgtgtgaggccattgtacatcgactttcggcaagacctgggctggaagtgggtccacgagcctaagggatactacgcgaacttttgctctggaccatgcccgtacctgcggagcgctgacaccacccattcaactgtccttggactgtacaacaccctgaacccggaagcgtccgccagcccttgctgcgttcctcaggacctggagccgctcaccattctgtactacgtgggccggactccaaaggtggaacaactctcgaacatggtggtcaagtcatgcaagtgttca

SEQ ID NO: 136580 - DNA, 1236 bp, Artificial Sequence
  derived and/or modified sequence
atgaagatgcacctgcaacgggccctggtcgtcctggcacttctcaatttcgcaaccgtctccctgtcactctcaacttgtacgacgctcgactttggacacataaagaagaaacgcgtcgaggctatccggggtcagatcctctcgaagctgcggctgacttcaccgcccgaaccaacggtgatgactcacgtgccgtaccaggtcctggccttgtacaattcgacccgcgagttgctcgaggagatgcacggagagcgggaggagggatgtacccaagagaacactgaaagcgaatactatgccaaagagatccataagttcgatatgattcaggggctggccgaacataatgaactggctgtgtgcccgaagggaatcacttccaaagtttttcgcttcaacgtcagctcggtggaaaagaatcggactaatttgttccgggcagaattccgtgtgctgagggttccgaatccctcgtccaagcgcaatgaacagaggatcgagcttttccagatccttagaccagacgaacacatcgccaagcaaagatacatcggcggcaagaacctgccgaccagagggactgccgaatggcttagcttcgacgtgaccgacactgtgcgggagtggctcctgcggcgcgaatctaacctggggctggaaatctccatccactgcccgtgccacaccttccagcccaatggcgacatcctcgaaaacatacacgaagtgatggagatcaaattcaagggggtcgataacgaagatgatcacgggcgcggcgacttgggcagactgaagaagcaaaaagaccaccacaacccccatctcatccttatgatgatcccaccgcaccgactcgacaatccaggacaaggcggacagcgaaagaagagggccctggacaccaactactgctttaggaacctggaggagaactgctgcgtgcggccgctgtacatcgattttcggcaggacctgggatggaagtgggtgcacgagccgaagggctactacgcgaacttctgcagcggtccctgcccgtacttgcgctcggcggacaccacccactcgactgtcctgggactgtataacactttgaacccagaagcctctgccagcccatgctgtgttccgcaggaccttgaacctttgaccatcctctattacgtcggaaggacccccaaggtggaacaactgtccaatatggtggtcaagagctgtaagtgctcg

SEQ ID NO: 136581 - DNA, 1236 bp, Artificial Sequence
  derived and/or modified sequence
atgaaaatgcatcttcagcgtgcgctagtcgtgctcgccttgctcaatttcgcgaccgtgagtctaagcctgagtacgtgtacaacactcgactttggacatataaaaaagaaaagagtggaagctatccggggccaaattctgtctaaactgcgcctgacgtccccgccagaacccaccgttatgacccacgttccataccaggtgctggcgctatataactccacacgggagctgctcgaggagatgcacggggagcgggaggaaggatgcactcaagaaaataccgagagcgagtactatgccaaagagattcataaattcgatatgattcagggattggcggagcacaacgaactggctgtctgtccgaaggggatcacatctaaggtttttcgattcaatgttagctctgtggaaaagaaccggacgaacctgtttagagccgagttccgagtgctgagagttcccaacccttcttcaaagcggaacgagcaacgcattgagctgttccaaatattgcgtcctgatgaacacattgctaagcagcgctatattggcgggaaaaatcttcctacaaggggaactgccgaatggctcagttttgacgtgacagacacggtacgagagtggcttttacggcgcgagtcgaatctcggactggaaatttctattcactgcccttgccatacattccagccaaatggggatatcttggaaaacatccatgaggtgatggagatcaaattcaaaggcgttgacaatgaggacgatcacggacgcggagacctgggccggctgaagaaacagaaggaccaccataatccacacctgattttgatgatgatacccccccatagactggataatcctggacaggggggccagcgcaagaaacgtgctctcgacaccaactattgcttcagaaatctagaagaaaattgctgcgtaagacccctttacatagattttcggcaggatctgggttggaagtgggtgcacgagcccaaaggatattatgctaacttctgcagtggtccctgcccatatctccgatccgccgacaccacacacagtactgtgttgggcctgtataacacgctaaaccccgaggcctcagcttccccttgctgtgtgccccaggatttagagcccctcacgattctatattacgttggaaggacgccaaaagtggagcagttgtctaatatggtggtgaaaagctgcaagtgctct

SEQ ID NO: 136582 - DNA, 1236 bp, Artificial Sequence
  derived and/or modified sequence
atgaaaatgcatttgcaacgcgcattggtggtactcgcgctgctaaatttcgcaactgtttctttgagtttgagcacctgtaccacacttgacttcgggcacattaagaaaaagagggtggaagctatccgcggacagatactgagtaagctgaggcttacatcgccccctgaacctaccgtaatgacgcacgtaccctatcaggtgctggccttgtacaacagtactcgagaactattggaggaaatgcacggcgaacgcgaggaggggtgcacccaggagaacacagagagtgagtactacgctaaggagattcacaagtttgatatgattcaaggtttggcggagcacaatgaactggccgtgtgtcccaagggaataacgagtaaagtgtttcgctttaatgtgtctagcgtggaaaagaaccgtaccaatctgttcagggcagaattccgagttctccgggtgccaaacccgtccagcaagcgaaatgagcagagaattgagctcttccaaattcttagacccgatgagcacatcgcgaagcagcggtacatcggcggcaaaaatctgcccaccaggggaactgccgaatggctttcctttgacgtgacagatacagtgcgagaatggctgcttaggagggagagtaatctgggcctggagatctctattcactgcccctgccacactttccaacccaatggggacattctggagaatattcatgaggtgatggagatcaagttcaaaggtgtggacaacgaggacgaccatggtcggggtgatctagggagacttaaaaagcagaaggatcatcacaatccacacttgatacttatgatgattccgcctcatcgcctggacaatccggggcagggggggcagagaaagaaacgggcactggacacgaactactgcttccgtaatctggaagagaactgttgcgtgcgacctctgtatatagactttagacaggatctgggctggaagtgggtccatgagcccaagggctattacgcaaatttctgtagcggtccgtgtccgtacctccgcagtgccgacaccacgcacagtacagtgctcggcctgtacaacacgttgaacccagaagcaagcgccagtccatgttgcgttccgcaagatctcgagccgttgacgattctctattatgtcggacgtacaccaaaggtggagcagcttagcaacatggtcgtgaagtcatgtaagtgttcc

SEQ ID NO: 136583 - DNA, 1236 bp, Artificial Sequence
  derived and/or modified sequence
atgaagatgcatctacagcgggccctcgtggtgctcgccctgctcaacttcgctacagtgtcactgagcctctcgacatgtacaaccctggatttcggccacatcaaaaaaaagcgtgtagaggcaatcaggggccagatcctaagtaagctgcgtcttactagccctccggagcccaccgttatgacacatgtcccctatcaggttctggccctgtataattccaccagggaactgttggaggaaatgcacggcgaaagagaagagggatgtacacaggagaacactgagagcgagtactacgcaaaggagatccataagttcgatatgatccaagggttggccgagcataacgagctggctgtctgtccaaagggtattacatccaaggtgttcagatttaatgtctcaagtgtggaaaagaatcgcacaaatctgttcagggctgaatttcgcgtgctgcgtgtccctaatccctccagcaagagaaatgagcagcgcatcgaactttttcagattctaagacctgatgaacacatcgctaaacagcggtacatcggcggcaagaacctgccaacaagaggaaccgcagagtggttgagtttcgacgtcacagatactgtacgggagtggctgttgaggcgcgagagcaacctgggtcttgagatctccatccactgcccgtgccacaccttccaacctaacggcgacatcctcgagaatattcacgaagtgatggaaataaagttcaagggggtggacaacgaagatgatcacgggcgcggtgacctgggccggcttaagaaacagaaagaccaccacaacccacacctgatcctgatgatgattcctccccacagactggacaatcctgggcagggaggacagcgaaagaaacgggctctggatactaattactgtttcaggaatctggaggagaattgttgcgttaggcccctatacatcgacttcaggcaagacctcggatggaaatgggttcatgaaccgaaggggtattacgccaatttttgttctggcccttgtccttatttgagaagtgcggatacaactcacagcacagtactgggcttgtataacactctgaaccctgaggcctctgctagcccttgttgtgttcctcaagacctcgagccgctcaccattttgtactatgtcggtagaactccaaaggtagagcagttgtctaacatggtcgtcaagtcctgcaaatgttct

SEQ ID NO: 136584 - DNA, 1236 bp, Artificial Sequence
  derived and/or modified sequence
atgaaaatgcaccttcagcgcgccttagtggtcctggccctgctaaactttgctactgtgagcctaagcttgtccacctgtaccaccctcgattttggtcacatcaagaaaaagcgtgttgaagctattcgaggccaaatcctgtctaagctgaggctgaccagtccccctgagcccacagttatgactcacgtgccgtaccaagtcttagcactgtataactctacacgggagctcttagaagaaatgcacggcgagcgtgaggaggggtgcacacaggaaaacaccgaatctgagtactacgccaaggagatccacaaattcgacatgatacagggcttggctgaacacaacgagttggccgtttgtccgaagggcattacctccaaggttttcaggttcaacgtgtcctcagtggagaaaaataggaccaatctttttcgcgccgaatttagggtgctcagagtgccaaacccctcctccaagcgcaatgagcagcggatagaactatttcagattttacggccagatgaacatattgccaaacagaggtacattggtgggaagaatctccccacccgaggtaccgcggagtggttgtcatttgatgtcactgacacagtgcgcgaatggctcctgcggcgggaaagcaatctggggctggagatctccattcattgcccgtgtcacacctttcagcctaacggggacattttggagaatattcacgaggtgatggaaatcaagttcaaaggggttgataatgaagacgatcacggtcgtggcgatcttggtcggctgaaaaaacagaaagaccaccacaacccccatctcattctgatgatgatccctccgcataggctggataatcccgggcagggaggtcagcggaagaaacgcgcgctggatactaactattgtttccgcaacttggaagagaactgttgcgtgagacctctctatatcgatttcagacaagatttgggatggaaatgggtgcacgagccaaaaggctattatgcgaatttctgtagtggcccctgtccttatctaagaagtgcagacaccacccattctactgttcttggcctgtacaacaccttaaaccctgaggcaagtgcaagcccttgctgcgtgcctcaagatctggagccgctcacaattttatactacgtagggcgcacgccaaaagtggagcagctttccaacatggttgtgaaatcttgtaaatgttct

SEQ ID NO: 136585 - DNA, 1236 bp, Artificial Sequence
  derived and/or modified sequence
atgaaaatgcatctgcaacgagcattggtggtgcttgctctcctcaactttgctaccgtgagtctctccctgtctacgtgtaccacactcgacttcgggcacatcaaaaagaaacgggtggaagccatccgaggacagattctttccaagttacgactgacttccccgcctgagccaaccgtcatgacccatgtaccctatcaggtcctggccttatataactctacgcgagaactgttagaagaaatgcacggggagcgggaagaaggctgtacacaagagaacactgagtccgagtactatgctaaggagatccacaagttcgatatgatccagggccttgccgaacacaatgagctggctgtgtgtcccaaaggcattaccagcaaagttttccggttcaacgtcagttcagtggaaaagaatcgaaccaatttgttcagggccgaatttcgcgtgctgagagttcccaacccctcatcgaagagaaacgaacagcgcatcgagctgtttcaaatcctgaggccggacgaacatatcgcaaaacagaggtatattggcggtaagaacctgccgacaagaggcacggcggagtggctcagcttcgacgtgactgacaccgttagagagtggttattgagacgagagtccaacttagggctagagatcagcattcattgtccatgtcataccttccagcctaacggagatattctggaaaatatccatgaagtcatggagataaaatttaagggggttgacaacgaggacgaccacggcagaggtgacctaggacggctgaaaaagcagaaagatcatcataatcctcaccttatactaatgatgatccctcctcataggctggataatcctggccaggggggccaaaggaagaaacgggcactcgacaccaactactgcttcagaaacctagaagaaaactgctgcgttcgccctctctatattgacttcagacaggacttagggtggaagtgggttcacgaacctaaggggtactacgcgaatttctgctctggcccatgtccttatctgcggagtgcagacactactcactcaaccgttctcggactgtacaacacactcaacccggaagccagcgcctcaccatgctgtgttccacaggatctcgaacctttgaccattctgtattacgtggggaggacacccaaggttgaacaactgtctaacatggtggtcaaatcttgcaagtgttca

SEQ ID NO: 136586 - DNA, 1236 bp, Artificial Sequence
  derived and/or modified sequence
atgaagatgcatcttcagagggccctggtggtgctcgctctcctcaattttgcaaccgtcagcctttctcttagtacttgcactacactggatttcgggcatatcaagaagaaacgcgtagaagcgatccgcggacaaattttgtcaaaactcaggctgacaagcccccctgaaccgaccgttatgactcacgtaccctatcaggtgctggccctgtataatagtaccagggagttactagaggagatgcatggagaaagagaggaagggtgcacccaagagaacaccgaaagtgagtattatgcgaaagaaattcacaaatttgatatgattcagggcctggcagagcacaacgaactggccgtgtgtcccaaaggaataacatcgaaggtcttccgtttcaacgtttcttcagtcgaaaaaaatagaaccaacctgttccgggcagaatttcgcgtactgcgcgttccaaacccatctagcaaacggaatgaacagcggattgagcttttccagatcctgcgaccagatgagcatatcgcaaaacaacgctacatcggggggaaaaacctgcccacacggggtaccgccgagtggttgagtttcgacgtgaccgacactgttagagagtggctgctcaggagagagagcaatttgggcctggagatttccatccattgtccctgtcacacatttcagccgaatggggatattctcgaaaatattcatgaggtgatggaaatcaagttcaaaggcgttgacaatgaggacgatcacggccggggagaccttggccgactaaagaagcagaaggatcaccacaacccacacctgatattaatgatgatccctccgcatcgcttggataaccctggccagggtggccagcggaagaagcgggccctagatacaaactattgtttccgcaacctcgaagaaaattgctgcgtaagaccactttatatcgacttccgacaggacctcggatggaagtgggtgcatgagcccaaaggctactacgctaacttctgctccggcccatgtccttacctcagaagcgccgataccactcacagcacggtactagggctgtacaacacattgaacccagaggcctctgccagtccctgttgtgtgcctcaggacctcgaaccactcaccatcttatactatgtgggtcgcacacccaaggtggagcagctttccaatatggtcgtaaagtcatgcaagtgttct

SEQ ID NO: 136587 - DNA, 1236 bp, Artificial Sequence
  derived and/or modified sequence
atgaagatgcatctccagcgggctctggtggtgttagcgctgctgaatttcgcaaccgtaagcctctcactttcaacatgtacaactctcgacttcggtcacattaaaaaaaagcgagtcgaagccatcagaggacagatcctgagtaaactacggctgacttcaccccccgagccaacagtcatgactcatgtaccctaccaggttttggcactgtacaactcaacccgcgagctgctcgaggagatgcatggagagagggaagaaggctgtactcaggagaacacagaatcagagtactatgctaaagaaatacacaagtttgatatgattcagggcctcgccgagcacaacgagttggcagtctgccccaagggcatcacaagtaaagtgtttaggttcaacgtgagctccgttgagaagaatagaaccaaccttttcagagccgagttcagggtcctgcgcgttcccaatccctcttctaagagaaatgaacagaggatcgagctgtttcagattttaaggcccgacgagcatatcgccaagcagcgctatatcggtggcaagaacctgcccacccgggggactgctgagtggctgagcttcgatgtgaccgatacagtacgtgagtggctgctacgtcgggagtcgaacttagggctggagatctccattcattgtccctgccacaccttccagccaaatggcgacattctggaaaatatccatgaagtcatggaaattaaatttaagggggttgacaacgaggatgatcatggtcgaggagatctcgggagactgaagaagcaaaaggatcatcataacccccacctgattctcatgatgataccaccacatcggctcgacaacccagggcaaggcggccagcggaaaaagcgagctcttgacactaactattgctttaggaacttggaagaaaattgctgtgtccgccctctctacatcgattttcgtcaggacctcggttggaagtgggtacacgaacccaagggctattacgccaacttttgcagcggcccttgtccctatctgcgttcagccgatactactcatagcacggtccttgggctctacaacactctcaacccagaggcctctgcatcaccatgctgcgttccacaagacctggagcctctgaccattctctactatgtgggccgtactcccaaggtggaacaactgtcaaatatggtggtcaagtcttgtaaatgctcc

SEQ ID NO: 136588 - DNA, 1236 bp, Artificial Sequence
  derived and/or modified sequence
atgaagatgcatctgcaaagagctctcgtggtgcttgccctgttgaattttgcgacggtgtcactctccctgtcgacttgcaccaccttggattttggccatatcaaaaagaagagggtagaggcaatccgcggccaaatcctctcaaagctgcgcctcacttcaccgcccgaacccaccgtgatgacgcacgtcccttaccaggtgctggctttgtacaactctactcgcgaactgctggaggagatgcacggcgaaagagaagaaggatgcacccaggaaaacacggaaagcgaatactacgcaaaagagatccacaaatttgacatgatccagggtctggctgagcataatgagctggccgtctgcccgaaggggatcaccagcaaggtgtttcgcttcaatgtgtcctccgtggaaaagaaccggaccaacctgttcagagccgagttcagagttctccgtgtgccgaacccatcgtccaagcgcaacgaacagcggatcgaactgtttcaaatccttagaccggacgagcatattgccaaacaaagatacattggaggaaaaaacctgcctacccgaggcactgccgagtggctgtcgtttgacgtgaccgatacggtgcgggaatggctcctgagacgcgagagcaatctgggacttgagattagcatccactgtccgtgccatacgtttcaacccaatggcgacatccttgaaaacatccacgaggtcatggagatcaaattcaaaggagtcgacaacgaagatgatcacggtagaggagatctcgggcggcttaagaagcagaaagaccaccacaacccgcacctcattttgatgatgatcccgcctcatcgactggacaatcctgggcaggggggacagcgcaagaaaagagcgctggataccaactactgtttcagaaacctcgaagagaattgctgcgtgcgaccgttgtacattgacttcagacaggatctgggatggaagtgggtgcacgaacccaagggatactacgcgaatttctgcagtggaccatgtccttatctgagatcggccgacaccactcactccaccgtgctgggcctgtacaacaccctgaaccctgaagcctccgcgtcgccgtgctgcgtcccacaggatctggaacccctcacgatcttgtactacgtcggacggactccgaaggtggaacaattgtcgaacatggtggtgaagagctgcaagtgctcg

SEQ ID NO: 136589 - DNA, 1236 bp, Artificial Sequence
  derived and/or modified sequence
atgaagatgcatctccaacgggcgttggtcgtgctcgcactgctgaactttgctactgtgagcctttcgctttcgacctgtaccaccctggacttcggacacattaagaaaaaacgagtcgaagcaattcgcggccagatcctgtccaagctcaggcttacctccccgcccgaacccaccgtgatgactcatgtgccttatcaggtcctggccctttacaactcgactagggaactgcttgaagaaatgcacggggagcgggaagaaggatgtactcaggagaataccgaatcagagtactacgccaaagaaatacacaagtttgatatgatccaaggactggcggagcataatgaattggcagtctgccctaagggtattacctccaaagtctttcgttttaacgtgagctccgtagagaagaatcgaacgaatctgttccgtgctgaattccgggttcttagagtgcctaacccttcgtcgaagagaaatgaacaaagaattgaactttttcagatcttgcggcctgatgagcatatcgcaaagcagagatacattggtggaaaaaaccttcctacccgtggaaccgcagaatggctctcatttgacgttactgacactgtgagagagtggcttctccgtagagagtcgaacctgggcctggagattagtattcactgtccatgccacaccttccagcctaatggagatattctggagaacatccatgaagtgatggaaatcaagtttaagggtgtcgacaacgaagatgaccatggacggggcgatcttggacggctcaaaaaacaaaaagatcaccataatccccatctgatacttatgatgataccacctcaccgactggacaacccaggacagggtggtcaaagaaagaagcgagcactggataccaattactgttttaggaacctggaagaaaactgttgcgtacgcccgttgtacattgattttcgacaagacctgggctggaaatgggtccatgaacccaagggctactacgccaacttctgtagcgggccatgcccatacttgcggagtgcagatacgactcattcgactgtactcggtctgtacaacactctcaacccggaggcatcggcgtcaccatgttgcgtgccacaagatctcgagccgcttacgatcctttactacgtgggcaggacccctaaggttgagcaactcagcaatatggtggtgaagtcctgtaagtgttca

SEQ ID NO: 136590 - DNA, 1236 bp, Artificial Sequence
  derived and/or modified sequence
atgaagatgcatttgcaacgggccctcgttgttctggcgctgttgaatttcgccaccgttagcctctcgctgtcgacttgcaccacccttgatttcggacatatcaagaaaaagcgagtggaggcgatccgaggacagatcctttccaagctcagactgacttccccaccagagccaactgtcatgacccatgtcccctaccaggtgctcgctctctataactctacgagagaactgctggaggagatgcacggtgagcgggaagaaggctgcacccaggaaaacactgaatctgaatactacgcgaaggagatccacaagttcgacatgatccagggactggcggaacacaatgagctcgccgtgtgtccgaaagggatcacgagcaaggtgttccgcttcaacgtgagcagcgtcgagaaaaaccggaccaacctctttagggccgagttcagagtgcttagagtgcctaacccgagctcgaagaggaacgagcagcgcatcgagctgtttcagatcctgcgccctgacgaacacattgcaaagcaaagatacattggcggcaagaatctcccgacccgtggcactgctgaatggctgtccttcgatgtgaccgacactgtcagggaatggctgttgcgccgcgagtctaatctgggactggaaatctcaatccactgtccgtgtcacactttccaaccaaatggagacatactggagaacattcacgaagtgatggagatcaagtttaaaggagtggataacgaggatgatcacggccggggagatctcgggagactgaagaagcagaaagatcatcataacccacacctgatcttgatgatgattccgccgcaccggctggacaacccagggcagggaggacaaaggaagaagagggcactcgacactaattactgcttccgtaaccttgaagaaaactgctgcgtcagacctctgtacatcgactttcgacaggacctggggtggaagtgggtgcatgaaccaaagggctactacgctaatttctgctcaggaccgtgcccttacctcagatcggcggacaccacgcatagcaccgtcctgggtctgtacaacacgcttaatccggaagcctcagcctccccttgctgcgtccctcaagacctcgaaccgcttaccatcctgtattacgtgggccgcactcccaaggtcgagcaattgtcgaatatggtggtgaagtcatgtaagtgctcg

SEQ ID NO: 136591 - DNA, 1236 bp, Artificial Sequence
  derived and/or modified sequence
atgaagatgcacttgcagagggctttggtggtgctggcgttgctcaatttcgcaactgtgagccttagcctgtctacctgcactactctggacttcgggcacatcaaaaagaagcgagttgaggccatcaggggacaaatcctgtcaaagctgcgcctgaccagcccaccagaacccacggtgatgacccacgtgccataccaggtgctggccctgtacaatagcacccgcgagctcctggaagaaatgcacggcgaaagagaagaaggctgcacccaggaaaataccgagtcggagtactacgctaaggaaatccacaaatttgacatgatccagggactggcagaacacaacgagctcgccgtgtgtcctaagggaatcacgagcaaggtgttccggtttaatgtgagctccgtggagaagaaccgcaccaatttgttcagggccgagtttcgggttctccgggtgccgaacccctcaagcaaacgcaacgagcagcggatcgaactcttccagattctccgcccggatgaacatatcgccaagcagaggtacatcggtggcaaaaacctcccgacgcggggaactgccgaatggctcagcttcgacgtgaccgataccgtgcgagagtggctcctcagacgggagtcgaacctgggtttggagatctctatacactgcccatgccacacttttcaaccgaatggcgacatcctggaaaacatccatgaagtgatggaaatcaaattcaaaggagtggataatgaagatgatcatggacgcggggaccttggacgccttaagaagcagaaggatcatcacaacccacaccttatcctgatgatgatccctccacacagacttgacaaccctggtcagggaggacaacgcaagaagagggccctggacactaactactgctttagaaacctcgaagagaattgttgtgtgcgcccgctctacatcgatttccggcaggacctgggatggaagtgggttcacgaacctaagggctactacgctaatttctgtagcggaccctgcccttacctgagaagcgcagacaccacccattccaccgtgctgggactgtacaacacgttgaaccccgaggcgtccgctagcccgtgttgcgtgccgcaagacctggaaccgctgaccatcctgtactacgtgggccgcaccccgaaggtcgaacagctctcgaacatggtggtgaagtcatgcaagtgctcg

SEQ ID NO: 136592 - DNA, 1236 bp, Artificial Sequence
  derived and/or modified sequence
atgaagatgcacctccaacgcgccctcgtggtcctcgccttactgaacttcgcaacagtctccctgagtttgtctacctgtacaacactcgattttgggcatatcaaaaagaaaagggttgaggccatacgaggccagatcctatcaaaactgcgtctgacaagtccccctgagcctaccgtgatgacccacgtcccataccaggtgctcgcactttacaactctacccgggaactcctggaagagatgcatggcgaaagggaggaaggctgcacccaggaaaacacagagagtgaatactacgctaaagagattcacaagttcgatatgatccaaggactggcagagcataacgaactcgctgtgtgccctaaaggcatcacaagcaaggtcttccggttcaatgtaagcagcgtcgaaaagaaccggaccaacttgtttagagccgagttccgcgtcctgagggtgcctaatccatccagcaaaagaaacgaacagcggattgaactgttccagatcctcagaccagacgagcatattgcgaagcagaggtacattggcggtaagaacctccctaccagaggtaccgcagagtggctgagcttcgatgtgaccgacacagtgagagaatggctgctgaggagggaatccaacttgggcctcgaaataagcatacactgcccatgtcatactttccagccgaatggagacatcctcgagaacatccacgaggttatggagatcaagttcaagggagtggacaatgaagacgatcacggcagaggggatctgggccgcctaaagaaacaaaaagatcaccacaatccacacctgatcctaatgatgatcccccctcaccgcctggataatcctgggcagggggggcaacgcaagaagcgggctttggatacgaactactgcttcaggaatctcgaggaaaactgttgcgtgaggccactgtacattgactttcggcaagatctgggatggaagtgggttcacgaaccgaaggggtattacgctaacttctgctcaggaccatgcccttacttgagaagcgctgacaccacacacagcaccgtgctggggttatacaacacactgaacccggaagctagtgcatcaccttgttgcgtgccccaggatctcgagcctctcaccattctgtactatgttggccgcacccctaaagtcgagcaactctcaaatatggtagtaaagtcttgcaaatgtagc

SEQ ID NO: 136593 - DNA, 1236 bp, Artificial Sequence
  derived and/or modified sequence
atgaaaatgcacctgcaaagagcactggtggtgttggcgttgttgaacttcgcaaccgtgtccctgtcgctgtccacgtgtacgactctggattttggacacataaagaagaagagggtggaggcaatcagaggtcaaatactttctaaactgcggttgactagtcctcccgagcccaccgtcatgacccatgtcccctaccaagtcctcgcactttacaactccactagagagctgctggaggaaatgcatggagaacgcgaggaaggttgcacccaggagaacactgaatcagaatactacgctaaggaaatccataagttcgatatgattcaaggactcgcagaacataacgagctcgccgtctgtccaaagggaattacctcaaaagtttttcggtttaacgtgagctccgtcgagaagaacagaaccaatctcttccgggccgagttcagggtccttagggtgcccaatccaagctccaaacgcaatgaacagaggattgagctttttcaaattcttcgacctgacgaacacatcgccaaacaacgttacattggaggtaagaaccttccgactcggggaaccgcggagtggctctcctttgacgtcaccgatactgtgagggaatggctgcttcggcgggaatcgaatcttggacttgagatttcaatccattgcccatgccacactttccaaccaaatggtgacatacttgaaaacatccatgaagtgatggagattaagttcaagggtgtcgacaacgaagatgatcacggacgcggagatctcggtagacttaagaagcagaaagatcatcataatccacacttgatcctgatgatgattccaccgcaccgattggataacccaggacagggaggccagaggaagaagagagcacttgacactaactactgttttcgcaaccttgaagaaaattgttgtgtgcgaccactctatattgactttcgccaagatctgggatggaaatgggtgcatgaaccgaaaggatactacgcaaacttttgttcggggccctgcccttaccttcggtcagcagataccacccatagtactgtgctgggactgtacaatacccttaatcccgaagcatcggcgtcgccttgttgtgtaccccaggatcttgagccactgactatcctctactacgtgggccgtacccccaaggtggagcaactgagcaacatggtcgtcaaatcgtgtaaatgttca

SEQ ID NO: 136594 - DNA, 1236 bp, Artificial Sequence
  derived and/or modified sequence
atgaagatgcacctgcagcgggcgctcgtcgtgcttgcgcttctgaattttgcaaccgtctccctttcgctttcgacttgtacgactctggattttggacacatcaagaaaaagagggtggaggcaattcgaggacaaattctcagcaagttgcggcttacctcgcctcctgagcctactgtgatgacccatgtgccttaccaggtgctcgcactttacaattccaccagagaactgctggaagaaatgcatggtgaacgggaagagggatgcacccaggagaacaccgaaagcgaatactacgccaaggaaattcacaagtttgatatgatccaagggctcgcagaacataacgagctggctgtgtgccctaagggtattaccagcaaggtttttcgttttaacgtgtcaagcgttgaaaagaaccgtaccaacctttttagagcagaattcagagtgttgagagtgcctaatccttcctcgaagcgaaacgaacaaaggatcgagctgtttcagattttgcggcctgatgaacatatcgcaaaacaacggtacataggtggaaagaacctgcctactcgcgggactgcagagtggcttagctttgatgtgaccgatactgttagagaatggttgctgcgcagagaatccaatctgggccttgaaatttccatacactgtccctgtcatacttttcaaccgaacggagatattcttgaaaacattcatgaggtgatggagatcaagttcaagggtgtggataatgaggacgaccacggacggggcgatctcggcagactcaagaaacaaaaggaccatcataaccctcatctgatcctcatgatgatccctccgcatagactggacaatcctggacaaggaggacagcgcaaaaagcgagcacttgacactaactactgttttcgcaaccttgaagaaaattgctgcgtccgtcccctctacatagatttcagacaggatcttgggtggaagtgggtgcacgagccaaaggggtattacgcaaacttctgttcagggccatgtccatacctgagatcggccgatactacccattccactgtcctgggtctgtacaatactctgaaccctgaggcgtccgcttcgccatgttgcgtcccccaagatctggaacctctcacgatcctgtactacgtcggtaggactccaaaggtggaacaactgtcgaatatggtcgtcaagagctgtaagtgttcc

SEQ ID NO: 136595 - DNA, 1236 bp, Artificial Sequence
  derived and/or modified sequence
atgaaaatgcacctccaacgagctcttgttgtcttggcccttctgaatttcgcaactgtttccttgtctctatcaacgtgtactaccctcgatttcggccacatcaagaagaaaagagttgaagcaatccgtgggcagattctttcgaagcttagacttacatctccaccagaaccgacagttatgacacacgtgccatatcaggtcctggctttgtataactctactcgtgaactccttgaagagatgcacggagagagggaagaaggttgcacgcaagaaaacacggaatctgagtattatgctaaagaaatccacaaattcgatatgatccagggattggcagaacacaatgagttagcggtctgtccgaaaggaattacaagcaaagtcttccggtttaatgtttcatcggtagaaaaaaatcgtacaaacctctttagagcagaatttcgtgtcctgagagtaccaaaccctagctcaaaaagaaatgaacaacggatagaactttttcaaatcttgagaccggatgagcatatagctaagcaaaggtatatcggaggcaaaaatcttccaacgcgtggaacagcagagtggctttcatttgatgttacggatactgtgagagaatggcttcttcgaagagaatccaacctgggtctggaaatatctattcattgcccctgccatacttttcaaccaaatggagatattctcgagaacattcatgaagtaatggaaattaaatttaagggagttgataacgaagacgatcacggaaggggagatctaggaagattgaagaagcagaaagatcatcataacccgcatctcatcctgatgatgattccaccacatcgcctcgataatccaggacaaggcggccagcggaagaaacgtgcattggatactaattactgcttccgtaatctggaagagaactgttgtgtccgaccactttatatcgatttcagacaagatttaggatggaagtgggttcatgaaccaaagggatactatgctaatttctgctcaggaccctgtccttacttgagatccgcagatacaactcattcaactgtgctaggactttacaacactctgaatcccgaagcctctgctagtccatgttgcgttccacaagacttggagccacttacaattttatattatgtaggacgtactccaaaggtcgaacagctgtctaatatggtggtcaaaagttgcaagtgttcg

SEQ ID NO: 136596 - DNA, 1236 bp, Artificial Sequence
  derived and/or modified sequence
atgaaaatgcacctccaacgcgccttggtggtgctggctctgcttaatttcgcgaccgtatcactcagtctgagtacttgcacgaccctcgatttcggccacataaaaaaaaagcgggtggaggctatccggggccaaatactgagtaaattaagactgacttcacctcccgaacctacagtcatgactcatgttccctaccaggttctggcgttgtacaattcgaccagggaactccttgaggaaatgcacggcgaaagggaggagggctgcacacaggagaacacagagagtgagtattacgccaaggaaattcacaaatttgacatgatccagggtctcgctgaacataacgaacttgctgtgtgcccaaagggcattacatccaaggtgtttcggttcaacgtgagctccgtggagaagaaccgcaccaacttattcagagctgagttccgagtgctgcgagtacccaacccgagcagcaagagaaacgaacagcgcatcgaacttttccagatcctgaggcctgatgagcacatcgccaagcaaaggtacatcgggggcaaaaacctcccaaccagggggacagccgagtggctcagctttgatgtgacagatactgtgcgggaatggctgcttcgcagagagagtaatctgggcctggagatttccatccattgtccctgtcacactttccagccaaatggggacatactggagaacatccacgaagtaatggagattaagtttaagggggtggacaatgaagacgatcacggacgcggagacctaggccggctaaagaagcagaaagaccatcacaatccgcatctgatactaatgatgatccctcctcacaggctggacaaccccggacaaggaggtcaacggaagaagagggccctggatacaaactactgttttcgtaacttggaggaaaactgttgcgtacgaccattatacattgatttcaggcaggacctcggatggaaatgggttcacgagcctaaggggtattatgccaacttctgttctggtccatgcccctatcttcgaagcgctgataccacacatagcacggtgcttgggctatataacacattgaatccggaggcctccgcctccccttgttgtgtgccgcaggacctggaaccattgacgatcctgtactacgtaggacgaacccccaaagttgaacagttgtctaacatggtagtgaaatcatgcaagtgttct

SEQ ID NO: 136597 - DNA, 1236 bp, Artificial Sequence
  derived and/or modified sequence
atgaagatgcaccttcaacgtgcactggttgtgcttgcattgctcaacttcgccaccgtgtcgcttagcctgtcaacctgtaccactcttgacttcggccacataaagaagaagcgagtcgaagcaatccgtggacaaatcctgtccaagctgaggctgacttcaccaccagaacccactgtgatgactcacgttccttaccaggtcctcgcactttacaactcgactcgtgaacttcttgaggaaatgcacggagagcgcgaggagggctgcactcaagaaaacactgaatctgagtattacgctaaagaaattcataagttcgacatgattcaaggtcttgctgagcataacgaacttgccgtgtgtcccaaaggcattacctcgaaggtttttagattcaacgtgtccagtgtcgaaaagaatcgaaccaacctgtttcgagccgaattcagagtccttcgggtgcccaaccctagctcgaagagaaacgaacagagaatcgaacttttccagatccttcgccccgatgaacacatcgccaagcaacggtatattggcggaaagaacctgccaacgcgcggtaccgccgagtggcttagcttcgatgtgaccgatactgtgcgcgagtggcttctgcggagagaaagcaacctgggtctggagattagcattcattgtccttgccatacctttcagcctaacggagatatcctggagaatattcacgaagtgatggagattaagtttaagggcgtggataatgaagatgatcacgggcgtggcgatcttggacgcctgaaaaagcaaaaggatcatcacaacccccatctcattctgatgatgattcctccacatagactggataaccctgggcagggagggcagaggaaaaaacgcgccctggacactaactattgttttcgcaatctcgaggaaaactgttgcgtcagacccctttacatcgattttcgccaagatttggggtggaagtgggtgcacgagccaaaaggttactacgcgaatttctgttcgggaccgtgtccatacctgcgatccgcggatactacccacagcactgtgctcggactgtacaatactcttaatccagaagcctccgcatccccttgctgcgtccctcaagatctcgaacctctcaccattctttactacgtggggagaactcctaaggtcgagcaactgtcaaatatggtggtgaaatcgtgcaagtgttcg

SEQ ID NO: 136598 - DNA, 1236 bp, Artificial Sequence
  derived and/or modified sequence
atgaaaatgcacctgcagcgtgctctcgtagtgctcgcgcttcttaactttgcaaccgtgagcctttccttgtcgacttgtactactcttgatttcggacacatcaaaaagaagagagtggaggcaatcagaggacagatcctctccaagctgcgactcacttcgcctccagaacctaccgtgatgacccatgtgccttaccaagtgctggccctgtacaactcaacccgtgaacttctggaagaaatgcatggagagcgggaggaaggttgtacccaagagaatactgagtcggaatactacgccaaggaaatccataagtttgatatgatacagggactcgcagaacataacgagctggcagtctgtccaaagggaatcacgtccaaggtctttcgctttaacgtctcgtcggtcgaaaagaatcggactaacctgttccgggcagaattcagggtgcttagggtccccaacccttcctcgaagcgcaacgaacaacggattgagcttttccaaattctgaggcccgacgaacacattgccaagcaacgctacattggcggcaagaaccttccgacccgaggtaccgccgaatggctgtccttcgacgtgaccgacactgttcgggaatggctgctgagaagagaaagcaacctgggactcgaaataagcatccactgcccatgccatacctttcaacctaatggagacatcctggaaaacattcacgaagtgatggaaatcaaattcaaaggagtcgacaacgaagatgatcatggtcgcggagatctgggacggctgaaaaagcagaaagatcaccataacccccatcttattctgatgatgattccccctcatagactggataaccccggtcagggtggtcagcggaagaagcgggcactcgataccaattactgttttagaaacttggaagaaaactgctgcgtgcgcccactttacatagactttcggcaagaccttggatggaagtgggtccacgaaccgaaggggtattacgcgaatttctgctccggtccttgtccgtatctcaggtccgctgacactacgcattccactgtgctggggctctacaacaccctgaaccccgaagcctcagcaagcccgtgctgtgtcccccaggaccttgagccgcttactatcctgtactacgtgggacggactcctaaggtggagcaactgtctaatatggtggtgaagtcctgtaagtgttcg

SEQ ID NO: 136599 - DNA, 1236 bp, Artificial Sequence
  derived and/or modified sequence
atgaagatgcacctgcagcgcgccctggtggtgctggctttactgaacttcgctactgtgtccctgagtctgtccacttgcactacgctcgactttggtcatattaaaaagaaacgggtcgaggcaattcgaggacaaattctgtcaaagctgcggctgacatctcctccagaacctactgttatgactcacgtgccttaccaggtgctggcgctgtacaatagcacacgggagctgctggaggagatgcatggtgaacgggaagagggctgcacacaggagaatactgaatccgaatactacgcaaaagagattcataaatttgatatgattcagggcctggctgagcacaacgaattagccgtttgtcctaaaggaatcaccagtaaagtttttcgcttcaatgtgagctccgtggagaaaaaccgtactaatctcttcagagcagagttcagggttctccgcgttccgaatccgtcttctaaacgcaacgagcagcggattgagctgttccagattcttcggcctgacgagcacatcgctaagcagaggtatatagggggaaaaaatctaccaaccagaggtaccgccgagtggctgtcattcgatgtgacagatactgtgcgcgaatggttgctccggagagaaagcaacctgggactggaaatcagtatccactgcccgtgtcacactttccaacccaatggagacatcttggagaacattcacgaagtcatggagatcaaattcaagggcgttgacaacgaggacgaccatggtagaggggatctgggccgcttaaagaagcagaaagatcatcataaccctcacctcattttaatgatgattccaccacacagactcgacaacccaggacaggggggccagcgcaaaaaaagggcactggatacgaactactgtttccggaacctggaagagaattgttgtgttagacccctgtatatagatttcagacaggatctgggatggaagtgggtacatgagcctaaaggctattatgccaatttctgcagtggaccatgtccgtacctgaggagcgctgatacaacccactccacggtacttgggctgtacaataccttgaacccagaggccagcgcttcaccttgctgcgttcctcaggacctggagcctctgacgatcctgtattatgtgggacggacacccaaggttgagcagctgtcaaatatggtagttaagagctgtaagtgctcg

SEQ ID NO: 136600 - DNA, 1236 bp, Artificial Sequence
  derived and/or modified sequence
atgaagatgcacttacagcgagctctagttgtgctcgcactcctaaatttcgccacagtgtcgttaagtctgtctacttgcacaaccttggacttcgggcatattaaaaaaaagcgagtggaagcaatcagaggacaaatcttgtccaagttgagactgacctcgcctccagagccgacggttatgacccacgtcccatatcaagtactggctctgtataactctacgagggaactcctcgaagaaatgcatggggaacgagaggaaggatgcacacaggagaacacagagtcagaatattacgccaaggagatccacaaatttgacatgatccagggcctggccgagcataacgagcttgccgtatgcccgaaagggattactagtaaggtcttcaggtttaacgtttcctcagtggaaaagaatcggactaatcttttccgcgccgagttccgggttctgcgagtccctaatcccagtagtaaaaggaatgagcagcgaatagagctgtttcaaatcttaaggccagatgagcatattgccaagcagcgatatatcggaggaaaaaatctacctactcgcgggaccgctgagtggttgtcattcgatgttaccgacacggtccgcgagtggctcctgagaagagaaagcaacctcggtctcgagatttcaatccattgtccttgtcatacgttccaacccaatggcgacatactcgaaaacatccacgaggtgatggagattaaattcaagggggtggataatgaggacgaccatggcagaggagatcttggaagactgaagaagcagaaggatcatcataacccccatctcatcctcatgatgattccaccacacagattggacaatccaggccaaggaggacaaaggaagaaaagagcacttgatacaaattattgtttcagaaatctggaggaaaattgttgcgtaaggcctttgtacattgatttccgacaagatctgggctggaagtgggtccacgagcctaagggctactacgcaaacttctgcagtgggccttgtccttatcttagatccgctgatactactcacagtaccgttcttggtctctacaacactcttaaccctgaggcttcagcctcaccatgctgtgtgcctcaggacttggagccattgaccatactctattatgtcgggaggacccctaaggttgagcagctttccaacatggtagttaaatcatgtaagtgctct

SEQ ID NO: 136601 - DNA, 1236 bp, Artificial Sequence
  derived and/or modified sequence
atgaaaatgcatttacaaagagcattagttgttttggcacttttaaattttgcaactgttagcttatcacttagtacatgtacaactcttgattttggtcatattaaaaaaaaaagagttgaagctattagaggacaaattctttctaaattaagattaacatcacctccagaaccaacagttatgactcatgttccttatcaagttttagcactttataattcaactagagaattattagaagaaatgcatggagaaagagaagaaggatgtactcaagaaaatacagaaagtgaatattatgctaaagaaattcacaagtttgatatgatacaaggattagctgaacataatgaacttgccgtatgcccaaaaggaattactagtaaagtatttagatttaatgtttcttccgttgaaaaaaatagaactaatttattcagagctgaatttcgagtattaagagttccaaacccatcatctaagagaaatgaacaaagaattgaactttttcaaattttaagacctgacgagcatattgcaaagcaaagatatattggagggaaaaatctaccaacacgaggaactgcagaatggctttcttttgatgttacagatactgtaagagaatggcttttaagaagagaaagtaatttaggattagaaatttctatacattgtccatgccatacatttcaaccaaatggagatattcttgaaaatattcatgaagttatggaaataaaatttaaaggtgttgataatgaagatgatcatggacgtggtgatttgggtagattaaaaaaacaaaaggaccatcataatcctcatttaatcttaatgatgattcctcctcatagacttgacaatccaggacaaggaggtcaaagaaaaaaaagagcattagatactaattattgtttcagaaatcttgaagaaaattgttgcgttagaccattatatatagactttagacaagatttaggatggaaatgggttcatgaaccaaagggatattatgctaatttctgttctggaccttgtccatatttacgtagtgctgatacgactcattctactgttcttggtttatataatactttaaacccagaagcaagtgcatcaccatgttgtgtcccacaagatttagaaccattaactattctttattatgtaggaagaactccaaaagttgaacaattatcaaatatggtagtaaaatcatgtaaatgtagt

SEQ ID NO: 136602 - DNA, 1236 bp, Artificial Sequence
  derived and/or modified sequence
atgaagatgcatctccagcgggcactggtggtgcttgccctgctcaatttcgccactgtgtctctcagcctctccacctgcactacactggactttggccatattaaaaaaaaacgggtcgaagcgattagggggcaaattctgtctaagctgagacttacaagcccccctgagccgactgtcatgacacatgttccgtaccaggtactcgccctgtacaacagcacccgcgaactcttggaggagatgcacggtgagcgcgaggagggctgcacacaggaaaatacggaatccgagtattacgcgaaagaaattcacaaatttgatatgatccaaggcctggccgagcataacgagttagccgtatgccccaagggaattacctccaaggttttcaggtttaacgtgtccagcgtagaaaagaacagaactaatctgtttcgggcagagtttcgggtcttaagagtgccaaacccgtcttcaaaaagaaatgagcagcgaatagagttgttccagatactgcgacccgatgaacatatcgccaaacaaagatacatcggggggaaaaatttgcccacccgaggtactgccgagtggctgagcttcgacgtgacggacacagtgagggaatggctccttaggagagagtccaatctgggcctcgagatttctatacattgtccttgtcacaccttccagcctaatggcgatattcttgagaatatccatgaagtaatggagatcaaattcaagggcgttgataatgaagacgaccacgggagaggagatctgggacggctgaaaaaacaaaaggatcatcacaaccctcatctgattctaatgatgattccccctcataggctggataacccgggtcagggcggccagaggaagaaacgagccctcgatacaaattactgcttccgcaacctcgaagagaattgttgcgtgcggcccttatatattgacttcaggcaagacctcggctggaaatgggtccatgagccgaaaggctattacgcaaatttctgttccggcccatgcccgtacctgcgctccgccgatactacccactctaccgtgttagggctttataataccctcaatcctgaggcatctgcgtctccctgttgtgtaccccaagatctggagcccctgaccatcctgtactatgtgggtagaacgcctaaggtcgagcaactgagtaatatggttgtgaaaagctgtaagtgttcc

SEQ ID NO: 136603 - DNA, 1236 bp, Artificial Sequence
  derived and/or modified sequence
atgaaaatgcatttgcagcgcgcactggttgtgctggccctgcttaattttgcgaccgtcagcctgtccctgtctacttgcactactcttgatttcggccacatcaagaaaaaacgagtcgaagctattcgggggcagattttgtcgaagttgcggctgaccagtccccctgagccgaccgtgatgacccatgtgccatatcaagtcttggcactgtacaactctactagggaattgctcgaagaaatgcatggagagagggaggagggctgcacccaggaaaacactgaaagtgaatattacgctaaagaaattcacaaattcgatatgattcaggggctggcggagcataatgaactagcagtgtgtcccaagggcatcacctctaaggttttccgctttaacgtatcctccgtggagaagaaccggaccaatctcttcagagcggagttcagggtgctaagagtgcctaatccaagcagcaaacgcaacgaacagcgtatcgaactgttccaaatacttcgaccagatgaacatatcgccaagcagcggtatatcgggggcaaaaatctgccgacccgcgggaccgcggagtggctctccttcgatgtgactgacactgttagggagtggctgctcaggcgtgaatctaacctcgggctcgagatcagtattcactgcccttgtcacacattccagcccaacggtgacatccttgagaatattcacgaagtcatggagatcaagttcaagggtgtggacaacgaggatgatcatggtcgcggcgatctcggtcgcctgaagaagcagaaggaccaccataacccccacctgatcctcatgatgattcctccacatcgcctagacaacccgggccagggaggccagagaaagaaaagggcactggatacaaactactgctttcggaaccttgaggagaattgttgtgtgcgtccattgtatatcgactttaggcaagacctaggctggaagtgggtccatgagcccaagggctactatgccaatttttgctccggtccatgcccttatctcaggtctgctgatactacccattccacagttctggggctctacaatacacttaacccagaggcgtccgcatccccttgctgcgtcccacaggatctggaaccactgacaatactgtactatgtgggccggactcccaaggtggagcagttgagcaacatggtggtgaaaagctgtaagtgctct

SEQ ID NO: 136604 - DNA, 1236 bp, Artificial Sequence
  derived and/or modified sequence
atgaaaatgcatctgcaaagggctttggtggttcttgcgctgctcaatttcgccaccgtctccctttcactgtcgacatgcaccaccctcgatttcgggcatataaagaaaaagagggtggaggccatccgcggacaaattctgagcaaactccgactgacgtcaccacccgagccaacggtgatgacacacgttccctaccaggtgctggcactgtacaactcaacccgggaacttttggaagagatgcacggagaaagagaagaaggttgtacccaggagaatacagaaagcgaatattatgctaaagagatacacaaatttgacatgattcaggggctggccgagcacaatgaactagccgtgtgccccaagggtatcacctctaaggtgtttaggttcaatgtgtctagcgtcgagaaaaaccgaaccaacctcttccgtgcagagtttagagtcctccgggtgccaaaccccagctcaaagaggaacgagcaaaggattgagcttttccagatccttagaccagacgaacatatcgcaaaacagcggtatataggtggaaagaatctgccaacacgaggaactgcggaatggctctcatttgacgtgactgataccgtgagggagtggttgctgcggcgtgaatcaaacctggggctggagatttccatccattgcccttgtcacactttccagccaaatggggatatattagaaaacattcacgaggtgatggagatcaagtttaagggcgtggacaacgaggatgaccacggccgcggcgacttgggaagattgaaaaaacagaaagatcaccacaaccctcacttgatcctgatgatgattccccctcacaggcttgacaatcctggccaggggggacagagaaagaagagagctttagacaccaattattgtttccgcaatttagaggagaattgctgcgtcaggcccctttacattgatttcagacaggatctcggctggaaatgggtccacgaacccaagggctattatgcaaacttctgtagtgggccctgcccctacttaaggagcgcggacactacacattccaccgtgttaggactgtacaatactctgaaccccgaagcgagcgcctccccatgttgcgtcccccaagacttggagccactgaccattctgtactatgtgggtaggacaccaaaggtggagcagctgtccaatatggtagtcaaatcttgcaaatgctct

SEQ ID NO: 136605 - DNA, 1236 bp, Artificial Sequence
  derived and/or modified sequence
atgaaaatgcatcttcagagagccctggtggtgctggcactgctgaacttcgctaccgtgtccctttccctttcaacctgtactaccctggatttcggacacattaagaagaagagagtggaagcaatccgtggacagattttgagcaagttgcggctcacgtcaccacctgagcctaccgtgatgacccacgtgccctaccaggtccttgccctctacaactcgactagggaactcttggaagaaatgcatggagaacgagaagaaggttgtacccaggagaataccgaaagcgaatactacgcaaaagaaatccataagtttgatatgatacagggcctcgcagaacataacgaactggcggtgtgcccgaaggggattacttcgaaggtctttagattcaatgtgtcgtcggtggagaagaacagaactaaccttttcagagcggaatttagagtgcttcgggtcccaaatcctagctccaagcgtaatgaacaacgcattgaactgttccaaattcttagaccggatgaacacattgcaaagcaacgttacattggagggaagaacctcccaacccggggaaccgcagagtggctttccttcgatgtgaccgataccgtgcgcgagtggctcctgagaagggaatccaatcttggacttgaaatttccatccattgtccgtgtcatacttttcaacctaatggtgacatactcgagaatattcacgaggtgatggagattaagtttaagggcgtggacaatgaagatgatcacggaagaggagatcttggccgacttaagaaacaaaaggaccaccacaatccccatctgattctgatgatgattcccccacatagactggacaacccgggacaaggaggtcaacgaaagaagcgggcacttgatactaactactgttttagaaaccttgaggaaaactgctgtgtgcggccactttacattgatttccggcaagacttgggttggaagtgggtgcacgaacctaaggggtactacgccaacttttgttccggaccttgtccctacctgcgttcagccgataccactcattccactgtgctgggactctacaacactctgaatcctgaagcatcggcctctccatgctgcgttcctcaggatctggagccccttactattctttactacgtgggaagaactccgaaggtcgaacagctttccaacatggtagtgaaatcgtgtaaatgttcg

SEQ ID NO: 136606 - DNA, 1236 bp, Artificial Sequence
  derived and/or modified sequence
atgaaaatgcaccttcaacgcgcactggtggtgcttgcactcctgaactttgcaactgtctctctcagcctctcgacttgtactacccttgactttggccatatcaagaaaaagagggtggaagcaattcggggacaaattctcagcaagctgcgcctgacttcgcctccagagccgacggtcatgactcacgtcccgtaccaagtgctcgcactttacaactcgactcgggaactcctggaggagatgcacggagaaagagaagagggctgtacccaggagaacactgagtccgaatactacgcaaaagagattcacaagttcgatatgatccaaggactggcagagcataacgaactggcagtgtgtcctaaaggaataacctccaaggtctttaggtttaatgtgtcctccgtggagaagaatagaactaatctgtttagagcagaatttcgcgtgcttcgtgtgcctaacccctcatccaaacgcaatgaacagcggattgaactgtttcagattcttagaccggatgaacatattgctaagcagcggtacattgggggtaagaacttgcctaccagaggaacggcagaatggctgagcttcgatgtcaccgacaccgtgcgcgaatggctgctgcggagagagtcaaacttgggtctggaaatttcgattcattgcccctgccataccttccaaccgaacggagacattctggaaaacattcacgaggtgatggaaatcaagttcaagggggtggataatgaggacgaccatggaagaggagatcttggacgcctcaagaaacagaaggatcatcataatcctcaccttattctgatgatgatcccaccccatcggctggataatcctggccaaggcggacaacgcaaaaaacgtgcactggacaccaactactgttttcgtaacttggaggaaaattgttgtgtgcgaccactgtacatagactttcgccaagatctgggttggaaatgggtccatgaacctaagggatactacgcgaatttctgctccgggccttgtccctacctccgctcagcggacaccactcattcaactgtgttgggactgtacaacaccctgaaccctgaggcctccgcatcaccttgctgtgtccctcaggacctggaaccactcactatattgtactacgtcgggagaactcccaaagtggaacaactttccaatatggtcgtcaagtcctgtaagtgctcc

SEQ ID NO: 136607 - DNA, 1236 bp, Artificial Sequence
  derived and/or modified sequence
atgaagatgcatctccaacgggctctggtggttttggccttgctgaattttgccacagtgagcttatcactaagcacttgtactacccttgatttcggacatatcaagaaaaagagagtcgaagcgataagaggtcaaatcctctccaagctaagactgacaagcccccccgaacctactgtaatgacccatgtaccctaccaagtcctagctttgtacaactccacaagggagctgcttgaagaaatgcacggtgaaagggaagagggatgtactcaggaaaacacagagagcgagtattatgccaaggagatacataagtttgatatgattcaaggcctggcagaacataacgaactcgccgtctgtcctaaagggatcacaagcaaagtcttccgttttaacgtgtctagcgtggagaagaacagaaccaatctgtttagggctgagtttagggtattgagggtgccaaacccctctagcaagagaaatgagcaaagaattgaattgtttcaaatcctgcgccctgacgagcatatcgccaaacagcggtacatcggaggaaagaacctgcccactcgagggaccgccgagtggctctcgttcgacgtgactgataccgtgcgcgaatggctattaaggagagaatctaatctcggtctggagatatctatacattgcccatgtcatacatttcagcccaatggagacatcctggaaaatatccatgaggtcatggagatcaagttcaaaggagttgacaacgaggatgaccacggcagaggagatctcggaagactcaaaaaacaaaaggaccatcataatcctcatctgattttgatgatgatcccaccccatagacttgataatccagggcaaggtggacagaggaagaagcgagctctcgataccaactattgctttaggaacctggaggaaaactgctgtgtccgaccactgtatattgattttagacaggacctcggctggaaatgggtacacgagccaaaaggctattacgccaacttctgcagcggcccttgtccttatctccgttccgctgataccactcacagcacagttctcggcctctataacacactgaaccccgaggcttcagcttcaccctgctgcgttccccaagacctcgagccattgactatcctgtattacgtgggcagaacccctaaggtggagcagttgagcaacatggtagtgaaaagctgcaaatgtagt

SEQ ID NO: 136608 - DNA, 1385 bp, Artificial Sequence
  derived and/or modified sequence
gggaaataagagagaaaagaagagtaagaagaaatataagagccaccatgaagatgcacttgcagcgcgccttggtcgtgttggcacttctcaacttcgcgacggtgtccctttcgcttagcacatgcactacgcttgacttcgggcacatcaagaagaagagggtagaggccattcgcggtcaaatcctctcgaaacttcgcctcacgtcgccgcctgagccgactgtaatgactcacgtcccctatcaagtactcgcgctctataactcaactagagagttgcttgaagaaatgcacggggagagggaggaaggttgtacacaagaaaataccgagagcgagtactatgccaaggaaatccacaagttcgacatgattcagggtttggcggagcataatgagttggctgtctgcccaaaaggtatcacatcgaaggtgtttaggttcaatgtctcgtccgtcgaaaagaatcgaaccaatctcttccgggcagaatttcgcgtgttgagagtgccgaatccttcgtcgaaacggaacgaacagagaatcgagctgtttcagatcctcagacccgatgagcacattgcgaaacagagatacatcggcgggaagaaccttccgacccggggaacggcggagtggctgagctttgatgtgacggatactgtgagagaatggctgcttcgccgcgagtcgaatctgggattggagatcagcattcactgcccctgccacacattccagcccaacggcgacatcttggagaatatccacgaggtcatggagatcaagttcaaaggggtagacaacgaagatgatcatggacgaggagacttgggacggctgaaaaagcagaaagaccatcacaacccacatctgattctcatgatgatccctccccatagactggacaatcccgggcagggaggtcagaggaagaagagagcattggacacgaactactgctttcggaatctcgaagaaaactgttgtgtcaggcccctgtacattgattttaggcaggatctcgggtggaagtgggtgcatgaaccgaaggggtactatgcaaacttctgcagcgggccatgtccttatctccggtcagccgatacaacccattccacagtgcttggactctacaatacgctgaacccagaagcgtccgcgtcaccgtgttgtgtccctcaagacttggagcccttgacgattctctactatgtgggacgaacaccgaaagtagagcagctgtccaacatggtcgtaaaatcatgcaaatgctcatgataataggctgccttctgcggggcttgccttctggccatgcccttcttctctcccttgcacctgtacctcttggtctttgaataaagcctgagtaggaag

SEQ ID NO: 136609 - DNA, 1239 bp, Artificial Sequence
  derived and/or modified sequence
atgaagatgcacctgcagagagccctggtggtgctggccctgctgaacttcgccaccgtgagcctgagcctgagcacctgcaccaccctggacttcggccacatcaagaagaagagagtggaggccatcagaggccagatcctgagcaagctgagactgaccagcccccccgagcccaccgtgatgacccacgtgccctaccaggtgctggccctgtacaacagcaccagagagctgctggaggagatgcacggcgagagagaggagggctgcacccaggagaacaccgagagcgagtactacgccaaggagatccacaagttcgacatgatccagggcctggccgagcacaacgagctggccgtgtgccccaagggcatcaccagcaaggtgttcagattcaacgtgagcagcgtggagaagaacagaaccaacctgttcagagccgagttcagagtgctgagagtgcccaaccccagcagcaagagaaacgagcagagaatcgagctgttccagatcctgagacccgacgagcacatcgccaagcagagatacatcggcggcaagaacctgcccaccagaggcaccgccgagtggctgagcttcgacgtgaccgacaccgtgagagagtggctgctgagaagagagagcaacctgggcctggagatcagcatccactgcccctgccacaccttccagcccaacggcgacatcctggagaacatccacgaggtgatggagatcaagttcaagggcgtggacaacgaggacgaccacggcagaggcgacctgggcagactgaagaagcagaaggaccaccacaacccccacctgatcctgatgatgatccccccccacagactggacaaccccggccagggcggccagagaaagaagagagccctggacaccaactactgcttcagaaacctggaggagaactgctgcgtgagacccctgtacatcgacttcagacaggacctgggctggaagtgggtgcacgagcccaagggctactacgccaacttctgcagcggcccctgcccctacctgagaagcgccgacaccacccacagcaccgtgctgggcctgtacaacaccctgaaccccgaggccagcgccagcccctgctgcgtgccccaggacctggagcccctgaccatcctgtactacgtgggcagaacccccaaggtggagcagctgagcaacatggtggtgaagagctgcaagtgcagctag

SEQ ID NO: 136610 - DNA, 930 bp, Artificial Sequence
  derived and/or modified sequence
atgaagatgcacctgcagagagccctggtggtgctggccctgctgaacttcgccaccgtgagcctgagcctgagcacctgcaccaccctggacttcggccacatcaagaagaagagagtggaggccatcagaggccagatcctgagcaagctgagactgaccagcccccccgagcccaccgtgatgacccacgtgccctaccaggtgctggccctgtacaacagcaccagagagctgctggaggagatgcacggcgagagagaggagggctgcacccaggagaacaccgagagcgagtactacgccaaggagatccacaagttcgacatgatccagggcctggccgagcacaacgagctggccgtgtgccccaagggcatcaccagcaaggtgttcagattcaacgtgagcagcgtggagaagaacagaaccaacctgttcagagccgagttcagagtgctgagagtgcccaaccccagcagcaagagaaacgagcagagaatcgagctgttccagatcctgagacccgacgagcacatcgccaagcagagatacatcggcggcaagaacctgcccaccagaggcaccgccgagtggctgagcttcgacgtgaccgacaccgtgagagagtggctgctgagaagagagagcaacctgggcctggagatcagcatccactgcccctgccacaccttccagcccaacggcgacatcctggagaacatccacgaggtgatggagatcaagttcaagggcgtggacaacgaggacgaccacggcagaggcgacctgggcagactgaagaagcagaaggaccaccacaacccccacctgatcctgatgatgatccccccccacagactggacaaccccggccagggcggccagagaaagaagagagccctggacaccaactactgcttcagatag

SEQ ID NO: 136611 - DNA, 1239 bp, Artificial Sequence
  derived and/or modified sequence
atgaaaatgcatttgcagcgagcactggtggtactggcgcttctcaacttcgcaactgtgagtctcagcttgagcacatgcacaactcttgacttcggacacattaaaaagaagcgggtggaggcgatccggggacagattctatcaaagctgcgactaactagtccccctgagcccacagtgatgacccacgttccctatcaggtgctagctctctacaacagcactagggagcttcttgaagaaatgcacggcgaaagagaggaagggtgcactcaagagaacactgagtccgagtactacgcgaaggaaatacacaaattcgatatgatccagggtctcgctgagcataacgagctggccgtgtgcccgaaggggattacatccaaagtcttccgatttaatgtgagtagcgttgagaagaatcggactaatctttttagggcagaattccgcgtgctccgtgtacccaacccatcttctaaacgaaatgaacagcgaatcgaactctttcagattttgcgccctgatgagcacatagctaaacaaaggtacatcggaggcaagaatctaccgaccagaggaactgccgaatggcttagcttcgacgttactgatacagtaagagagtggctgctccggagagaaagtaacctcggtcttgagatctcaattcattgcccatgccacacttttcagcccaacggtgatatacttgaaaatattcacgaggtcatggagattaaattcaaaggggtggataacgaggatgaccatggtcgcggggatctggggcgacttaagaagcagaaagatcatcacaatccacacctgatcctgatgatgatccccccccatcggctagataacccagggcaggggggacagagaaagaagcgggccctggacaccaattattgtttcagaaacttagaggaaaattgctgcgtacggccattgtatatcgatttcaggcaggacctggggtggaagtgggtacacgagcccaagggatactacgcgaacttctgctccggcccttgtccctatcttcgttccgccgatactactcacagcacagtgctggggctttataatacccttaaccccgaggcctccgcttcaccctgctgcgtgcctcaggacctggaaccgctgactatcttgtactatgtagggagaacacccaaggtggagcagttgtctaacatggttgtcaagagctgtaaatgctcttag

SEQ ID NO: 136612 - DNA, 930 bp, Artificial Sequence
  derived and/or modified sequence
atgaagatgcacctgcagcgtgcgttggtggtgctggcactgcttaattttgcaaccgtatctcttagcctctctacctgtacgaccttggattttggtcatataaagaagaagagagttgaagcgattagaggacagatcttaagtaagctgagattaacaagtccgcctgaaccgaccgtcatgacccatgttccgtatcaggttttggctttgtacaatagtaccagagagctgttagaagagatgcatggagagcgcgaggaaggttgcactcaggaaaacactgaaagcgaatattacgcaaaggagatacacaagtttgacatgatccaggggctggccgagcataacgagctcgcagtctgcccaaaaggcatcacatccaaggtatttcggtttaatgtctcctccgtcgaaaaaaaccgaactaacctgtttagagccgagttccgtgtactgcgcgttcctaatccctctagcaaaaggaacgaacagcgaattgaattgtttcagatactgcggccggatgaacatatagcgaaacagcggtatattggcgggaagaatcttcccacgcgaggcaccgccgagtggctgtcctttgacgttactgataccgttcgggaatggctcctgcgccgcgagagtaacctggggttagaaatctctatccactgcccgtgtcatactttccaacccaatggcgatattttagagaacattcatgaggtgatggagatcaagtttaagggagtcgataatgaggatgaccacgggcggggtgaccttggacgacttaaaaagcagaaagaccaccacaacccccatctgatattgatgatgattccgcctcaccggctggacaacccggggcaagggggacaacgcaagaagagggcactggacaccaattactgcttcagatag

SEQ ID NO: 136613 - DNA, 1239 bp, Artificial Sequence
  derived and/or modified sequence
atgaagatgcacctgcagagggccctggtggtgctggccctgctgaactttgccaccgtgtccctgagcctgagcacctgcaccaccctggactttggccacatcaagaagaagagggtggaggccatccggggccagatcctgagcaagctgcggctgaccagccccccagagcccaccgtgatgacccacgtgccctaccaggtgctggccctgtacaacagcacccgggagctgctggaggagatgcacggggagcgggaggagggctgcacccaggagaacacagagagcgagtactatgccaaggagatccacaagtttgacatgatccagggcctggccgagcacaatgagctggccgtgtgccccaagggcatcaccagcaaggtgttccgcttcaacgtgtcctctgtggagaagaacagaaccaacctcttccgggcagagttccgggtgctgcgggtgcccaaccccagcagcaagagaaatgagcagagaattgagctgttccagatcctgcggccagatgagcacatcgccaagcagcgctacatcggcggcaagaacctgcccacccggggcacagctgagtggctgagctttgatgtgacagacacagtgcgggagtggctgctgcggcgggagagcaacctgggcctggagatcagcatccactgcccctgccacaccttccagcccaatggagacatcctggagaacatccacgaggtgatggagatcaagttcaagggcgtggacaatgaagatgaccacggccgcggggacctgggccgcctgaagaagcagaaggaccaccacaacccccacctgatcctgatgatgatccccccccaccggctggacaaccctggccagggcggccagaggaagaagagggccctggacaccaactactgcttcaggaacctggaggagaactgctgcgtgcggcccctgtacatcgacttccggcaggacctgggctggaagtgggtgcatgagcccaagggctactatgccaacttctgcagcggcccctgcccctacctgcggtctgctgacaccacccacagcacagtgctgggcctgtacaacaccctgaaccctgaggccagcgccagcccctgctgcgtgccccaggacctggagcccctgaccatcctgtactacgtgggccgcacccccaaggtggagcagctgagcaacatggtggtgaagagctgcaagtgcagctag

SEQ ID NO: 136614 - DNA, 930 bp, Artificial Sequence
  derived and/or modified sequence
atgaagatgcacctgcagagggccctggtggtgctggccctgctgaactttgccaccgtgtccctgagcctgagcacctgcaccaccctggactttggccacatcaagaagaagagggtggaggccatccggggccagatcctgagcaagctgcggctgaccagccccccagagcccaccgtgatgacccacgtgccctaccaggtgctggccctgtacaacagcacccgggagctgctggaggagatgcacggggagcgggaggagggctgcacccaggagaacacagagagcgagtactatgccaaggagatccacaagtttgacatgatccagggcctggccgagcacaatgagctggccgtgtgccccaagggcatcaccagcaaggtgttccgcttcaacgtgtcctctgtggagaagaacagaaccaacctcttccgggcagagttccgggtgctgcgggtgcccaaccccagcagcaagagaaatgagcagagaattgagctgttccagatcctgcggccagatgagcacatcgccaagcagcgctacatcggcggcaagaacctgcccacccggggcacagctgagtggctgagctttgatgtgacagacacagtgcgggagtggctgctgcggcgggagagcaacctgggcctggagatcagcatccactgcccctgccacaccttccagcccaatggagacatcctggagaacatccacgaggtgatggagatcaagttcaagggcgtggacaatgaagatgaccacggccgcggggacctgggccgcctgaagaagcagaaggaccaccacaacccccacctgatcctgatgatgatccccccccaccggctggacaaccctggccagggcggccagaggaagaagagggccctggacaccaactactgcttcagatag

SEQ ID NO: 136615 - DNA, 1239 bp, Artificial Sequence
  derived and/or modified sequence
atgaagatgcacctgcagcgggccctggtggtgctggccctgctgaacttcgcaaccgtgtccttaagcctttcaacctgtacaaccctcgattttgggcatataaaaaagaaacgtgtcgaagccattcgcgggcagatccttagcaagctgaggctcactagcccacccgaacccaccgtcatgacacacgtgccctaccaggtgctagctctgtacaatagcactcgcgaactccttgaggaaatgcatggggagcgggaggaaggctgcacacaggagaacactgaatccgagtattacgctaaagaaatccacaaattcgatatgatccaggggctggccgagcataacgagctggccgtttgccctaagggcattacatccaaggtcttccgctttaatgtatcgtccgttgaaaagaacagaactaacctgttccgcgccgaattcagggtactgagagtgccgaatccttcttccaagcgaaatgagcagagaatcgaactgttccagatcctgcgacctgacgaacacatagctaaacagcgctatataggcgggaaaaatctgccgacccgtggcacggccgagtggctctcctttgatgttaccgacaccgtgcgtgaatggttgttgagaagggagtccaacttagggctggaaatttctattcactgcccgtgccacactttccagccaaacggggatattctggagaatatacacgaggtgatggaaatcaagttcaagggcgttgataatgaggacgatcacggtagaggcgaccttggtcggctcaaaaagcagaaggaccaccacaatccccacttgattttaatgatgattccaccacaccggctagacaacccaggccagggcgggcagcgcaaaaagcgggctttggacaccaattattgttttcgcaatctggaggagaattgttgtgtgcgaccattatatatagacttcaggcaggacctgggctggaagtgggtgcatgaacctaaaggatactacgcaaacttctgttctggaccctgtccatacctgcgttctgcggacaccacccattcaactgtcctggggttgtataacacactgaatcctgaggcctccgcgtcaccatgctgcgtcccccaggacttggaacctctcaccatactgtactacgtaggacgcactccaaaagtagagcagctatccaatatggtggtgaagagctgcaaatgctcttag

SEQ ID NO: 136616 - DNA, 930 bp, Artificial Sequence
  derived and/or modified sequence
atgaagatgcacctgcagcgggccctggtggtgctggccctgctgaacttcgctacagtttccctctcgctctccacatgtacaacattagattttgggcatattaagaagaaaagagtggaagcaatcaggggacagattttatccaagctgaggttaactagcccgccagagcccactgtaatgactcacgtgccttatcaagtgttagccctgtataattctacccgtgagctgctagaagaaatgcacggtgaacgggaggaaggttgcactcaggagaacaccgaatccgagtattatgcgaaagagatacacaaattcgacatgattcagggactggcagagcacaatgagctggctgtgtgtcctaaaggaataacttcgaaggtctttaggtttaatgtaagttctgtcgagaagaacaggacaaatttgttcagggcggagtttcgcgtcctgcgggttcccaacccatcttccaaaaggaacgagcagcgcattgaactgttccagattctgcgcccagatgagcacatcgctaagcaacgctacatcggcggcaaaaatctccccacacgaggcacagcagaatggcttagcttcgacgtcactgataccgtcagagaatggctccttcggagggagagtaacttagggctggaaatttctatccactgtccatgtcacacttttcaaccaaatggagatatcctcgagaacatccacgaagtgatggaaattaagtttaagggggtagacaatgaagatgatcacgggagaggcgacctcggacgcctaaagaagcaaaaggaccaccacaacccacacctgatcctcatgatgattcccccccacagactggacaatcccgggcaaggcgggcagcgtaaaaaaagagccttagacacaaactattgttttcggtag

SEQ ID NO: 136617 - DNA, 1239 bp, Artificial Sequence
  derived and/or modified sequence
atgaagatgcacctgcagcgcgctctcgtggtactggcgctgctgaacttcgcaacagtgagtctaagtctgtcgacctgtacaacccttgatttcgggcacatcaagaagaagagagtggaggctattaggggtcagattctcagcaaactccggttgacctctcctcctgagcctaccgtgatgacccacgtgccttatcaggtactcgctctgtacaactcgacgcgggagctgctagaggaaatgcacggagagcgggaggaaggctgtactcaagagaataccgagtcagagtactatgctaaggagatccacaagtttgatatgatccaagggctcgccgagcataatgaacttgctgtgtgtccgaaaggaattacctccaaagtttttcggttcaatgtgtcaagcgtcgaaaaaaaccggacgaaccttttcagagcggagttccgggtactgcgggtcccgaatccatccagcaaacgtaacgagcagagaattgaactgttccaaatacttagacccgacgagcatatagctaagcagaggtacattgggggaaaaaatctgcctacccgtggaaccgcagagtggctctctttcgacgtgacagatactgttcgagagtggttgctccggagggagtccaatctagggctggagatctccatacactgcccctgtcataccttccagcccaacggcgatatcctggaaaacatccacgaggttatggaaatcaagtttaaaggggtcgataatgaggacgatcacggcagaggagatcttggccgattaaaaaagcagaaagaccaccacaatcctcatcttattctcatgatgattcccccacacaggctcgacaatcccggacaagggggtcagcgaaaaaaaagagccttagacacaaactattgtttccgtaatctggaggagaactgttgtgtgcggccattatatatcgactttaggcaggacctgggctggaagtgggtccacgaaccaaaaggttactacgccaacttttgttctggcccttgcccctacctgagatcagctgataccacacattctaccgttttgggcttatacaacaccctgaaccctgaggcttcagccagcccctgctgcgtccctcaagatctcgagcccctgacaattctatactacgttgggcgtactccaaaagtagagcaactctcaaatatggtggtgaaatcctgtaaatgttcttag

SEQ ID NO: 136618 - DNA, 930 bp, Artificial Sequence
  derived and/or modified sequence
atgaagatgcacctgcaaagagcattggttgtgcttgccctgctaaatttcgctacagtgagtctctcgctgagtacttgcactactttggactttgggcacattaaaaagaaacgcgtggaggctattaggggtcagatcctgtctaaactgaggcttacctcgcctccagaacctacagtaatgacccacgtgccgtatcaggtgctggctttatataactctacacgggagctgctggaggaaatgcacggagagagagaggaaggatgcacccaggagaataccgagtctgaatattacgccaaggaaatccacaagtttgacatgatccagggtctggccgagcacaacgagcttgccgtttgcccgaaaggcattaccagtaaggtgttccggttcaatgtctccagcgtggaaaagaaccgcacaaatctgtttcgggcagaatttcgagtgttgcgggtgcccaatccttcatcgaaacgaaatgagcagagaattgagcttttccagatcctgcgcccagacgaacacattgccaaacagcgatacatcggtgggaaaaacctacctacacgtggaacagctgagtggctgagcttcgatgtcactgacaccgtaagggaatggcttcttagacgtgaatctaaccttggactggagatttccatccactgtccgtgtcatacattccagcccaacggggacattctcgagaatatccatgaggttatggaaatcaagttcaaaggagtggacaatgaagacgaccacggcaggggtgatttgggccgtttgaagaagcagaaggaccaccataatccccatctgatattgatgatgatcccaccgcaccgcctcgacaatcctggacaaggaggtcagcgtaagaagcgagctttggacacgaactattgtttcaggtag

SEQ ID NO: 136619 - DNA, 1239 bp, Artificial Sequence
  derived and/or modified sequence
atgaagatgcacctgcagagggccctagttgttttggccctgctcaattttgctactgtgagtcttagcctgagcacttgcaccacgctggactttggccatattaaaaaaaagagggtcgaggcaatccgaggccagatcctctctaaattgaggctaacctccccccctgaaccaacagtgatgacccacgtcccataccaggtgctggctctatacaatagcacgagggaactgctggaggaaatgcatggggagagagaagaaggctgcacccaggagaacaccgagagcgaatattacgctaaggagatacacaaatttgatatgatacagggtctcgctgagcacaatgaactcgccgtgtgccccaagggcattacttccaaagtcttcaggtttaatgttagctcagtggagaagaatagaaccaacctcttcagggccgagtttagggtactgcgcgtgcccaatccgtcctccaagcgcaatgagcagaggatagaactcttccaaattcttcgcccggatgaacatatcgccaagcagcgttatatcgggggtaagaatctcccaacgagaggcacagcagaatggctttcctttgatgtgaccgatactgtccgtgagtggttactaagacgcgagtctaatttgggactggaaatcagtatacattgtccctgccacacattccaacccaatggagatattctcgagaatattcacgaggtgatggagattaaatttaagggcgtcgacaacgaggatgaccacggaagaggcgaccttggccggctaaagaaacagaaagatcaccataatccacatttgattcttatgatgattcccccccatcgacttgataaccctggacaaggaggccaaaggaaaaagagagccttggatacaaactattgtttcagaaatcttgaagagaattgctgcgtgaggcccctttacattgattttaggcaggatttggggtggaagtgggtacatgagcctaaaggatattacgcgaatttctgcagcggcccttgtccctacctgcggagcgccgacacgacccacagcaccgtgctagggctttataataccctgaatcccgaggctagtgcatccccatgttgcgtgcctcaggacctggaacctctgaccatcctttattacgtaggcagaactcctaaggtggagcagcttagcaatatggttgtaaaaagttgtaaatgtagctag

SEQ ID NO: 136620 - DNA, 930 bp, Artificial Sequence
  derived and/or modified sequence
atgaaaatgcacttgcagcgggccttagttgtgcttgctctactgaactttgccacggtctcgctgagcctgtcaacctgcaccaccctggactttgggcacatcaaaaagaaacgcgtcgaggcgatccgagggcagatccttagcaagctccgtctgacatctcctccagaacccacagtcatgactcacgtgccttatcaagtgctagcactctacaactccaccagagaactactcgaggaaatgcacggcgaacgtgaagaagggtgcacccaagaaaatacggaatccgagtactatgcaaaagagatacataaatttgacatgattcagggactggccgagcacaacgagcttgcagtttgcccaaagggcataaccagtaaagtcttcagattcaacgtgagcagcgtggagaaaaaccggaccaatcttttcagggccgagtttagagtccttagagtcccaaacccatcatcaaagcggaacgagcagagaattgaactcttccagattctccggcccgatgaacacattgcaaagcaacgctacataggaggcaaaaacctgcccacaagaggaacagccgagtggctcagctttgacgtgacagatacagtgcgcgaatggcttctacgcagggaatcaaatttgggactggaaatctccatacattgcccttgtcatacatttcaacccaacggcgacatactcgaaaatatacacgaagtcatggagattaagttcaagggagtagataacgaggatgaccatggaagaggagacttgggacggttgaagaagcaaaaggatcaccacaacccccacctgatcttgatgatgattcccccccatagactcgataatcctggtcagggcggacagaggaagaaaagagctctggatactaactactgtttcaggtag

SEQ ID NO: 136621 - DNA, 1239 bp, Artificial Sequence
  derived and/or modified sequence
atgaagatgcatctacagagagccttagtcgtactcgcgctgctgaattttgccaccgtcagcctctccctaagcacctgtactacattagacttcgggcatattaaaaaaaagagggtagaagcgattagaggccagatcctgagcaaactaagactgactagtcctcctgagcctaccgtcatgactcatgtaccctatcaggttcttgcattgtataattcgaccagagagcttttggaggaaatgcatggggagcgggaagaaggatgtacgcaggaaaatacagagtcagaatattatgctaaagagattcacaaattcgacatgatccagggattggcggagcataatgaactcgctgtctgcccaaaaggcatcacaagcaaggtgtttcgtttcaacgtgtcttctgtagagaagaatagaaccaacctctttcgcgctgaatttagagtgctcagggtgcctaacccatcttccaaacgaaacgaacaaagaatagagttatttcagatcctcaggccggatgagcacatagctaaacagagatatataggcggcaagaacttaccaacacggggaactgccgagtggctttcattcgatgtcactgatacagtgcgagaatggctgttgcgcagggaaagtaacttgggactcgagatcagtattcattgtccctgccacacatttcagcctaacggggatatcctggagaacatccacgaagtgatggagatcaagttcaagggagttgacaatgaagatgatcatggacgtggcgacctcggtagacttaaaaagcagaaagaccatcataacccgcatttaatactcatgatgatccccccacaccggctggacaatcctggacagggcggacaaagaaaaaaaagagctctggacacaaactactgcttcagaaaccttgaggaaaattgctgcgtaaggccactgtacatcgactttagacaagacctcggttggaaatgggtgcatgaaccaaaaggctactatgcgaacttttgttcgggaccttgcccctatttgcgcagtgcagacaccactcactccaccgtgttagggctctacaatacgcttaaccccgaggcctctgccagcccttgctgcgtgccacaagacctcgagcctctaaccattctttactacgtaggccggacacccaaagtggagcagctctccaatatggtcgtgaagtcttgtaaatgcagctag

SEQ ID NO: 136622 - DNA, 930 bp, Artificial Sequence
  derived and/or modified sequence
atgaaaatgcatttacaaagagccctcgtcgtccttgctctgttgaatttcgcaaccgttagtctgtctttatcaacctgcactactttagattttgggcatatcaagaagaaacgtgtggaagcaatccgagggcagatcctgtctaaactgagactcacaagcccccctgaacctacagtgatgacccacgttccataccaggtgttggctctctacaacagtacccgggagttgcttgaggaaatgcacggtgagcgggaggagggctgtacccaggagaacactgagtccgaatactacgccaaagaaattcacaaattcgacatgatacagggtctcgccgagcacaacgagctggccgtgtgcccaaagggcatcacttccaaagttttccgtttcaatgtgtcatcagtggagaaaaaccgtaccaacctgttcagagctgaattccgagtactccgcgtgcccaatccctccagtaaacggaacgaacagaggatagagctattccagattctacgccccgacgagcatatagcaaaacagcggtatatcggaggaaaaaacttaccaaccagaggaacagctgagtggttgagctttgacgtgacagatacagtgcgcgaatggcttctacgcagggaatcaaatttgggactggaaatctccatacattgcccttgtcatacatttcaacccaacggcgacatactcgaaaatatacacgaagtcatggagattaagttcaagggagtagataacgaggatgaccatggaagaggagacttgggacggttgaagaagcaaaaggatcaccacaacccccacctgatcttgatgatgattcccccccatagactcgataatcctggtcagggcggacagaggaagaaaagagctctcgacacgaattactgctttagatag

SEQ ID NO: 136623 - DNA, 2522 bp, Artificial Sequence
  derived and/or modified sequence
tgcttgccctccacctggcctgctgggagtcagagcccagcaaaacctgtttagacacatggacaagaatcccagcgctacaaggcacacagtccgcttcttcgtcctcagggttgccagcgcttcctggaagtcctgaagctctcgcagtgcagtgagttcatgcaccttcttgccaagcctcagtctttgggatctggggaggccgcctggttttcctccctccttctgcacgtctgctggggtctcttcctctccaggccttgccgtccccctggcctctcttcccagctcacacatgaagatgcacttgcaaagggctctggtggtcctggccctgctgaactttgccacggtcagcctctctctgtccacttgcaccaccttggacttcggccacatcaagaagaagagggtggaagccattaggggacagatcttgagcaagctcaggctcaccagcccccctgagccaacggtgatgacccacgtcccctatcaggtcctggccctttacaacagcacccgggagctgctggaggagatgcatggggagagggaggaaggctgcacccaggaaaacaccgagtcggaatactatgccaaagaaatccataaattcgacatgatccaggggctggcggagcacaacgaactggctgtctgccctaaaggaattacctccaaggttttccgcttcaatgtgtcctcagtggagaaaaatagaaccaacctattccgagcagaattccgggtcttgcgggtgcccaaccccagctctaagcggaatgagcagaggatcgagctcttccagatccttcggccagatgagcacattgccaaacagcgctatatcggtggcaagaatctgcccacacggggcactgccgagtggctgtcctttgatgtcactgacactgtgcgtgagtggctgttgagaagagagtccaacttaggtctagaaatcagcattcactgtccatgtcacacctttcagcccaatggagatatcctggaaaacattcacgaggtgatggaaatcaaattcaaaggcgtggacaatgaggatgaccatggccgtggagatctggggcgcctcaagaagcagaaggatcaccacaaccctcatctaatcctcatgatgattcccccacaccggctcgacaacccgggccaggggggtcagaggaagaagcgggctttggacaccaattactgcttccgcaacttggaggagaactgctgtgtgcgccccctctacattgacttccgacaggatctgggctggaagtgggtccatgaacctaagggctactatgccaacttctgctcaggcccttgcccatacctccgcagtgcagacacaacccacagcacggtgctgggactgtacaacactctgaaccctgaagcatctgcctcgccttgctgcgtgccccaggacctggagcccctgaccatcctgtactatgttgggaggacccccaaagtggagcagctctccaacatggtggtgaagtcttgtaaatgtagctgagaccccacgtgcgacagagagaggggagagagaaccaccactgcctgactgcccgctcctcgggaaacacacaagcaacaaacctcactgagaggcctggagcccacaaccttcggctccgggcaaatggctgagatggaggtttccttttggaacatttctttcttgctggctctgagaatcacggtggtaaagaaagtgtgggtttggttagaggaaggctgaactcttcagaacacacagactttctgtgacgcagacagaggggatggggatagaggaaagggatggtaagttgagatgttgtgtggcaatgggatttgggctaccctaaagggagaaggaagggcagagaatggctgggtcagggccagactggaagacacttcagatctgaggttggatttgctcattgctgtaccacatctgctctagggaatctggattatgttatacaaggcaagcattttttttttttttttaaagacaggttacgaagacaaagtcccagaattgtatctcatactgtctgggattaagggcaaatctattacttttgcaaactgtcctctacatcaattaacatcgtgggtcactacagggagaaaatccaggtcatgcagttcctggcccatcaactgtattgggccttttggatatgctgaacgcagaagaaagggtggaaatcaaccctctcctgtctgccctctgggtccctcctctcacctctccctcgatcatatttccccttggacacttggttagacgccttccaggtcaggatgcacatttctggattgtggttccatgcagccttggggcattatgggttcttcccccacttcccctccaagaccctgtgttcatttggtgttcctggaagcaggtgctacaacatgtgaggcattcggggaagctgcacatgtgccacacagtgacttggccccagacgcatagactgaggtataaagacaagtatgaatat

SEQ ID NO: 136624 - DNA, 1280 bp, Artificial Sequence
  derived and/or modified sequence
ggggaggccgcctggttttcctccctccttctgcacgtctgctggggtctcttcctctccaggccttgccgtccccctggcctctcttcccagctcacacatgaagatgcacttgcaaagggctctggtggtcctggccctgctgaactttgccacggtcagcctctctctgtccacttgcaccaccttggacttcggccacatcaagaagaagagggtggaagccattaggggacagatcttgagcaagctcaggctcaccagcccccctgagccaacggtgatgacccacgtcccctatcaggtcctggccctttacaacagcacccgggagctgctggaggagatgcatggggagagggaggaaggctgcacccaggaaaacaccgagtcggaatactatgccaaagaaatccataaattcgacatgatccaggggctggcggagcacaacgaactggctgtctgccctaaaggaattacctccaaggttttccgcttcaatgtgtcctcagtggagaaaaatagaaccaacctattccgagcagaattccgggtcttgcgggtgcccaaccccagctctaagcggaatgagcagaggatcgagctcttccagatccttcggccagatgagcacattgccaaacagcgctatatcggtggcaagaatctgcccacacggggcactgccgagtggctgtcctttgatgtcactgacactgtgcgtgagtggctgttgagaagagagtccaacttaggtctagaaatcagcattcactgtccatgtcacacctttcagcccaatggagatatcctggaaaacattcacgaggtgatggaaatcaaattcaaaggcgtggacaatgaggatgaccatggccgtggagatctggggcgcctcaagaagcagaaggatcaccacaaccctcatctaatcctcatgatgattcccccacaccggctcgacaacccgggccaggggggtcagaggaagaagcgggctttggacaccaattactgcttccggtgagactgggcccacatgggaaccaacatctactgcctgcctactgcccaatggctaggtcaggccccagagccaagccacactcaacagagggtccctgatgctattcacaaacatctccaggaagaagactgaaaatctctcacagagattttctctgtgaaatctctttctgttttcctgggagtcccactgtttttccataggctaactctggaaggagctggctgaagtaaatgaggaaaactctgtg

SEQ ID NO: 136625 - DNA, 3183 bp, Artificial Sequence
  derived and/or modified sequence
gacagaagcaatggccgaggcagaagacaagccgaggtgctggtgaccctgggcgtctgagtggatgattggggctgctgcgctcagaggcctgcctccctgccttccaatgcatataaccccacaccccagccaatgaagacgagaggcagcgtgaacaaagtcatttagaaagcccccgaggaagtgtaaacaaaagagaaagcatgaatggagtgcctgagagacaagtgtgtcctgtactgcccccacctttagctgggccagcaactgcccggccctgcttctccccacctactcactggtgatctttttttttttacttttttttcccttttcttttccattctcttttcttattttctttcaaggcaaggcaaggattttgattttgggacccagccatggtccttctgcttcttctttaaaatacccactttctccccatcgccaagcggcgtttggcaatatcagatatccactctatttatttttacctaaggaaaaactccagctcccttcccactcccagctgccttgccacccctcccagccctctgcttgccctccacctggcctgctgggagtcagagcccagcaaaacctgtttagacacatggacaagaatcccagcgctacaaggcacacagtccgcttcttcgtcctcagggttgccagcgcttcctggaagtcctgaagctctcgcagtgcagtgagttcatgcaccttcttgccaagcctcagtctttgggatctggggaggccgcctggttttcctccctccttctgcacgtctgctggggtctcttcctctccaggccttgccgtccccctggcctctcttcccagctcacacatgaagatgcacttgcaaagggctctggtggtcctggccctgctgaactttgccacggtcagcctctctctgtccacttgcaccaccttggacttcggccacatcaagaagaagagggtggaagccattaggggacagatcttgagcaagctcaggctcaccagcccccctgagccaacggtgatgacccacgtcccctatcaggtcctggccctttacaacagcacccgggagctgctggaggagatgcatggggagagggaggaaggctgcacccaggaaaacaccgagtcggaatactatgccaaagaaatccataaattcgacatgatccaggggctggcggagcacaacgaactggctgtctgccctaaaggaattacctccaaggttttccgcttcaatgtgtcctcagtggagaaaaatagaaccaacctattccgagcagaattccgggtcttgcgggtgcccaaccccagctctaagcggaatgagcagaggatcgagctcttccagatccttcggccagatgagcacattgccaaacagcgctatatcggtggcaagaatctgcccacacggggcactgccgagtggctgtcctttgatgtcactgacactgtgcgtgagtggctgttgagaagagagtccaacttaggtctagaaatcagcattcactgtccatgtcacacctttcagcccaatggagatatcctggaaaacattcacgaggtgatggaaatcaaattcaaaggcgtggacaatgaggatgaccatggccgtggagatctggggcgcctcaagaagcagaaggatcaccacaaccctcatctaatcctcatgatgattcccccacaccggctcgacaacccgggccaggggggtcagaggaagaagcgggctttggacaccaattactgcttccgcaacttggaggagaactgctgtgtgcgccccctctacattgacttccgacaggatctgggctggaagtgggtccatgaacctaagggctactatgccaacttctgctcaggcccttgcccatacctccgcagtgcagacacaacccacagcacggtgctgggactgtacaacactctgaaccctgaagcatctgcctcgccttgctgcgtgccccaggacctggagcccctgaccatcctgtactatgttgggaggacccccaaagtggagcagctctccaacatggtggtgaagtcttgtaaatgtagctgagaccccacgtgcgacagagagaggggagagagaaccaccactgcctgactgcccgctcctcgggaaacacacaagcaacaaacctcactgagaggcctggagcccacaaccttcggctccgggcaaatggctgagatggaggtttccttttggaacatttctttcttgctggctctgagaatcacggtggtaaagaaagtgtgggtttggttagaggaaggctgaactcttcagaacacacagactttctgtgacgcagacagaggggatggggatagaggaaagggatggtaagttgagatgttgtgtggcaatgggatttgggctaccctaaagggagaaggaagggcagagaatggctgggtcagggccagactggaagacacttcagatctgaggttggatttgctcattgctgtaccacatctgctctagggaatctggattatgttatacaaggcaagcattttttttttttttttaaagacaggttacgaagacaaagtcccagaattgtatctcatactgtctgggattaagggcaaatctattacttttgcaaactgtcctctacatcaattaacatcgtgggtcactacagggagaaaatccaggtcatgcagttcctggcccatcaactgtattgggccttttggatatgctgaacgcagaagaaagggtggaaatcaaccctctcctgtctgccctctgggtccctcctctcacctctccctcgatcatatttccccttggacacttggttagacgccttccaggtcaggatgcacatttctggattgtggttccatgcagccttggggcattatgggttcttcccccacttcccctccaagaccctgtgttcatttggtgttcctggaagcaggtgctacaacatgtgaggcattcggggaagctgcacatgtgccacacagtgacttggccccagacgcatagactgaggtataaagacaagtatgaatattactctcaaaatctttgtataaataaatatttttggggcatcctggatgatttcatcttctggaatattgtttctagaacagtaaaagccttattctaaggtg

SEQ ID NO: 136626 - RNA, 1385 nt, Artificial Sequence
  derived and/or modified sequence
gggaaauaagagagaaaagaagaguaagaagaaauauaagagccaccaugaagaugcacuugcagcgcgccuuggucguguuggcacuucucaacuucgcgacggugucccuuucgcuuagcacaugcacuacgcuugacuucgggcacaucaagaagaagaggguagaggccauucgcggucaaauccucucgaaacuucgccucacgucgccgccugagccgacuguaaugacucacguccccuaucaaguacucgcgcucuauaacucaacuagagaguugcuugaagaaaugcacggggagagggaggaagguuguacacaagaaaauaccgagagcgaguacuaugccaaggaaauccacaaguucgacaugauucaggguuuggcggagcauaaugaguuggcugucugcccaaaagguaucacaucgaagguguuuagguucaaugucucguccgucgaaaagaaucgaaccaaucucuuccgggcagaauuucgcguguugagagugccgaauccuucgucgaaacggaacgaacagagaaucgagcuguuucagauccucagacccgaugagcacauugcgaaacagagauacaucggcgggaagaaccuuccgacccggggaacggcggaguggcugagcuuugaugugacggauacugugagagaauggcugcuucgccgcgagucgaaucugggauuggagaucagcauucacugccccugccacacauuccagcccaacggcgacaucuuggagaauauccacgaggucauggagaucaaguucaaagggguagacaacgaagaugaucauggacgaggagacuugggacggcugaaaaagcagaaagaccaucacaacccacaucugauucucaugaugaucccuccccauagacuggacaaucccgggcagggaggucagaggaagaagagagcauuggacacgaacuacugcuuucggaaucucgaagaaaacuguugugucaggccccuguacauugauuuuaggcaggaucucggguggaagugggugcaugaaccgaagggguacuaugcaaacuucugcagcgggccauguccuuaucuccggucagccgauacaacccauuccacagugcuuggacucuacaauacgcugaacccagaagcguccgcgucaccguguugugucccucaagacuuggagcccuugacgauucucuacuaugugggacgaacaccgaaaguagagcagcuguccaacauggucguaaaaucaugcaaaugcucaugauaauaggcugccuucugcggggcuugccuucuggccaugcccuucuucucucccuugcaccuguaccucuuggucuuugaauaaagccugaguaggaag

SEQ ID NO: 136627 - RNA, 1239 nt, Artificial Sequence
  derived and/or modified sequence
augaagaugcaccugcagagggcccuaguuguuuuggcccugcucaauuuugcuacugugagucuuagccugagcacuugcaccacgcuggacuuuggccauauuaaaaaaaagagggucgaggcaauccgaggccagauccucucuaaauugaggcuaaccucccccccugaaccaacagugaugacccacgucccauaccaggugcuggcucuauacaauagcacgagggaacugcuggaggaaaugcauggggagagagaagaaggcugcacccaggagaacaccgagagcgaauauuacgcuaaggagauacacaaauuugauaugauacagggucucgcugagcacaaugaacucgccgugugccccaagggcauuacuuccaaagucuucagguuuaauguuagcucaguggagaagaauagaaccaaccucuucagggccgaguuuaggguacugcgcgugcccaauccguccuccaagcgcaaugagcagaggauagaacucuuccaaauucuucgcccggaugaacauaucgccaagcagcguuauaucggggguaagaaucucccaacgagaggcacagcagaauggcuuuccuuugaugugaccgauacuguccgugagugguuacuaagacgcgagucuaauuugggacuggaaaucaguauacauugucccugccacacauuccaacccaauggagauauucucgagaauauucacgaggugauggagauuaaauuuaagggcgucgacaacgaggaugaccacggaagaggcgaccuuggccggcuaaagaaacagaaagaucaccauaauccacauuugauucuuaugaugauucccccccaucgacuugauaacccuggacaaggaggccaaaggaaaaagagagccuuggauacaaacuauuguuucagaaaucuugaagagaauugcugcgugaggccccuuuacauugauuuuaggcaggauuugggguggaaguggguacaugagccuaaaggauauuacgcgaauuucugcagcggcccuugucccuaccugcggagcgccgacacgacccacagcaccgugcuagggcuuuauaauacccugaaucccgaggcuagugcauccccauguugcgugccucaggaccuggaaccucugaccauccuuuauuacguaggcagaacuccuaagguggagcagcuuagcaauaugguuguaaaaaguuguaaauguagcuag

SEQ ID NO: 136628 - RNA, 930 nt, Artificial Sequence
  derived and/or modified sequence
augaaaaugcacuugcagcgggccuuaguugugcuugcucuacugaacuuugccacggucucgcugagccugucaaccugcaccacccuggacuuugggcacaucaaaaagaaacgcgucgaggcgauccgagggcagauccuuagcaagcuccgucugacaucuccuccagaacccacagucaugacucacgugccuuaucaagugcuagcacucuacaacuccaccagagaacuacucgaggaaaugcacggcgaacgugaagaagggugcacccaagaaaauacggaauccgaguacuaugcaaaagagauacauaaauuugacaugauucagggacuggccgagcacaacgagcuugcaguuugcccaaagggcauaaccaguaaagucuucagauucaacgugagcagcguggagaaaaaccggaccaaucuuuucagggccgaguuuagaguccuuagagucccaaacccaucaucaaagcggaacgagcagagaauugaacucuuccagauucuccggcccgaugaacacauugcaaagcaacgcuacauaggaggcaaaaaccugcccacaagaggaacagccgaguggcucagcuuugacgugacagauacagugcgcgaauggcuucuacgcagggaaucaaauuugggacuggaaaucuccauacauugcccuugucauacauuucaacccaacggcgacauacucgaaaauauacacgaagucauggagauuaaguucaagggaguagauaacgaggaugaccauggaagaggagacuugggacgguugaagaagcaaaaggaucaccacaacccccaccugaucuugaugaugauucccccccauagacucgauaauccuggucagggcggacagaggaagaaaagagcucuggauacuaacuacuguuucagguag

SEQ ID NO: 136629 - RNA, 1239 nt, Artificial Sequence
  derived and/or modified sequence
augaagaugcaucuacagagagccuuagucguacucgcgcugcugaauuuugccaccgucagccucucccuaagcaccuguacuacauuagacuucgggcauauuaaaaaaaagaggguagaagcgauuagaggccagauccugagcaaacuaagacugacuaguccuccugagccuaccgucaugacucauguacccuaucagguucuugcauuguauaauucgaccagagagcuuuuggaggaaaugcauggggagcgggaagaaggauguacgcaggaaaauacagagucagaauauuaugcuaaagagauucacaaauucgacaugauccagggauuggcggagcauaaugaacucgcugucugcccaaaaggcaucacaagcaagguguuucguuucaacgugucuucuguagagaagaauagaaccaaccucuuucgcgcugaauuuagagugcucagggugccuaacccaucuuccaaacgaaacgaacaaagaauagaguuauuucagauccucaggccggaugagcacauagcuaaacagagauauauaggcggcaagaacuuaccaacacggggaacugccgaguggcuuucauucgaugucacugauacagugcgagaauggcuguugcgcagggaaaguaacuugggacucgagaucaguauucauugucccugccacacauuucagccuaacggggauauccuggagaacauccacgaagugauggagaucaaguucaagggaguugacaaugaagaugaucauggacguggcgaccucgguagacuuaaaaagcagaaagaccaucauaacccgcauuuaauacucaugaugauccccccacaccggcuggacaauccuggacagggcggacaaagaaaaaaaagagcucuggacacaaacuacugcuucagaaaccuugaggaaaauugcugcguaaggccacuguacaucgacuuuagacaagaccucgguuggaaaugggugcaugaaccaaaaggcuacuaugcgaacuuuuguucgggaccuugccccuauuugcgcagugcagacaccacucacuccaccguguuagggcucuacaauacgcuuaaccccgaggccucugccagcccuugcugcgugccacaagaccucgagccucuaaccauucuuuacuacguaggccggacacccaaaguggagcagcucuccaauauggucgugaagucuuguaaaugcagcuag

SEQ ID NO: 136630 - RNA, 930 nt, Artificial Sequence
  derived and/or modified sequence
augaaaaugcauuuacaaagagcccucgucguccuugcucuguugaauuucgcaaccguuagucugucuuuaucaaccugcacuacuuuagauuuugggcauaucaagaagaaacguguggaagcaauccgagggcagauccugucuaaacugagacucacaagccccccugaaccuacagugaugacccacguuccauaccagguguuggcucucuacaacaguacccgggaguugcuugaggaaaugcacggugagcgggaggagggcuguacccaggagaacacugaguccgaauacuacgccaaagaaauucacaaauucgacaugauacagggucucgccgagcacaacgagcuggccgugugcccaaagggcaucacuuccaaaguuuuccguuucaaugugucaucaguggagaaaaaccguaccaaccuguucagagcugaauuccgaguacuccgcgugcccaaucccuccaguaaacggaacgaacagaggauagagcuauuccagauucuacgccccgacgagcauauagcaaaacagcgguauaucggaggaaaaaacuuaccaaccagaggaacagcugagugguugagcuuugacgugacagauacagugcgcgaauggcuucuacgcagggaaucaaauuugggacuggaaaucuccauacauugcccuugucauacauuucaacccaacggcgacauacucgaaaauauacacgaagucauggagauuaaguucaagggaguagauaacgaggaugaccauggaagaggagacuugggacgguugaagaagcaaaaggaucaccacaacccccaccugaucuugaugaugauucccccccauagacucgauaauccuggucagggcggacagaggaagaaaagagcucucgacacgaauuacugcuuuagauag

SEQ ID NO: 136631 - protein, 366 aa, Artificial Sequence
  derived and/or modified sequence
MWPLWLCWALWVLPLAGPGAALTEEQLLGSLLRQLQLSEVPVLDRADMEKLVIPAHVRAQYVVLLRRSHGDRSRGKRFSQSFREVAGRFLASEASTHLLVFGMEQRLPPNSELVQAVLRLFQEPVPKAALHRHGRLSPRSAQARVTVEWLRVRDDGSNRTSLIDSRLVSVHESGWKAFDVTEAVNFWQQLSRPRQPLLLQVSVQREHLGPLASGAHKLVRFASQGAPAGLGEPQLELHTLDLRDYGAQGDCDPEAPMTEGTRCCRQEMYIDLQGMKWAKNWVLEPPGFLAYECVGTCQQPPEALAFNWPFLGPRQCIASETASLPMIVSIKEGGRTRPQVVSLPNMRVQKCSCASDGALVPRRLQP

SEQ ID NO: 136632 - DNA, 1101 bp, Artificial Sequence
  derived and/or modified sequence
atgtggccactgtggctttgttgggccctgtgggtgctacctctggcgggaccaggggccgccctgacagaggaacaactgctcggcagtttgctgcgccagctgcaattatcagaggtcccggttctagaccgggccgacatggagaagctcgtaattcccgcacacgtgcgtgcgcagtatgtagttttactgaggcgcagccacggcgataggagtaggggaaagcgctttagtcagtccttccgcgaggttgccggaaggtttctcgcgtcagaggcttccacacacttgctggtgttcggcatggagcagagacttccgcctaactctgaactagtgcaggcggtactccggctttttcaggagcccgtaccaaaagcagctctgcacaggcacggccggctgagccctagatctgcccaggctcgggtgaccgtggaatggctccgagtgcgtgacgatggatccaaccgaacttccctgatcgacagccgccttgtgtccgttcacgaatcaggatggaaggctttcgacgtaacagaagccgtcaacttttggcagcaactctcccgtcctcgtcagccgttgttgcttcaggtgagcgtgcagcgagagcatctcggaccactggcttccggagctcataagctagtacggttcgctagtcagggcgcccctgcggggcttggcgagccccagctagaacttcacacactggaccttcgcgattacggggcccagggcgactgtgatcccgaagcgccaatgaccgagggcactcgatgttgcagacaggaaatgtacattgacctgcagggtatgaagtgggcgaagaattgggtcttggaacctcctgggtttctagcttatgaatgtgtcgggacctgccagcaacctccagaagcattagcattcaattggccctttctcggtcctaggcaatgtatcgctagtgaaacagcctccctcccgatgatcgtctccattaaggaggggggaagaactcgaccccaggtcgtctcgctaccaaacatgcgggtgcagaagtgcagttgcgccagcgatggcgcgctcgtgcctaggagacttcagccatag

SEQ ID NO: 136633 - DNA, 1101 bp, Artificial Sequence
  derived and/or modified sequence
atgtggcccctgtggctgtgctgggccctgtgggtgctgcccctggccggccctggggccgccctgacagaggagcagctgctgggcagcctgctgcggcagctgcagctgtctgaggtgcctgtgctggacagagctgacatggagaagctggtgatcccagcccacgtgcgggcccagtatgtggtgctgctgcggcgcagccatggagacaggagccggggcaagcgcttcagccagagcttccgggaggtggccggccgcttcctggccagcgaggccagcacccacctgctggtgtttggcatggagcagaggctgccccccaacagcgagctggtgcaggccgtgctgcggctcttccaggagcctgtgcccaaggccgccctgcacagacatggccgcctgagccccaggtctgcccaggcccgggtgacagtggagtggctgcgggtgagagatgatggcagcaacagaaccagcctgattgacagccggctggtgtctgtgcatgaaagtggctggaaggcctttgatgtgacagaagctgtgaacttctggcagcagctgagccggccccggcagcccctgctgctgcaggtgtctgtgcagcgggagcacctgggccccctggccagcggggcccacaagctggtgcgctttgccagccagggcgccccagctggcctgggggagccccagctggagctgcacaccctggacctgcgggactatggagcccagggcgactgtgaccctgaggcccccatgacagagggcacccgctgctgccggcaggagatgtacatcgacctgcagggcatgaagtgggccaagaactgggtgctggagcccccaggcttcctggcctatgaatgtgtgggcacctgccagcagcccccagaggccctggccttcaactggcccttcctgggcccccggcagtgcatcgccagcgagacagccagcctgcccatgattgtgtccatcaaggagggcggccgcacccggccccaggtggtgtccctgcccaacatgagggtgcagaagtgcagctgtgccagtgatggagccctggtgccccggcggctgcagccctag

SEQ ID NO: 136634 - DNA, 2287 bp, Artificial Sequence
  derived and/or modified sequence
cagggctggggtaaggccaggaaaattcaacaggcactaaaaatattgtcaagctgctgacagcacagccagaggccccaggcctgggtggcatccagacagccctgtcctttctagacagccccctcctccaggctcagggacctgtctggctgtgagctcccaggaggtcccaggggtgtgacctccctccctccctccctccctcttcccttcaccccaggccagcccagggccagctataaagctggcccagcctggctctcagcacacccagctgcctgagaccctccttcaacctccctagaggacagccccactctgcctcctgctcccccagggcagcaccatgtggcccctgtggctctgctgggcactctgggtgctgcccctggctggccccggggcggccctgaccgaggagcagctcctgggcagcctgctgcggcagctgcagctcagcgaggtgcccgtactggacagggccgacatggagaagctggtcatccccgcccacgtgagggcccagtatgtagtcctgctgcggcgcagccacggggaccgctcccgcggaaagaggttcagccagagcttccgagaggtggccggcaggttcctggcgtcggaggccagcacacacctgctggtgttcggcatggagcagcggctgccgcccaacagcgagctggtgcaggccgtgctgcggctcttccaggagccggtccccaaggccgcgctgcacaggcacgggcggctgtccccgcgcagcgcccaggcccgggtgaccgtcgagtggctgcgcgtccgcgacgacggctccaaccgcacctccctcatcgactccaggctggtgtccgtccacgagagcggctggaaggccttcgacgtgaccgaggccgtgaacttctggcagcagctgagccggccccggcagccgctgctgctacaggtgtcggtgcagagggagcatctgggcccgctggcgtccggcgcccacaagctggtccgctttgcctcgcagggggcgccagccgggcttggggagccccagctggagctgcacaccctggacctcagggactatggagctcagggcgactgtgaccctgaagcaccaatgaccgagggcacccgctgctgccgccaggagatgtacattgacctgcaggggatgaagtgggccaagaactgggtgctggagcccccgggcttcctggcttacgagtgtgtgggcacctgccagcagcccccggaggccctggccttcaattggccatttctggggccgcgacagtgtatcgcctcggagactgcctcgctgcccatgatcgtcagcatcaaggagggaggcaggaccaggccccaggtggtcagcctgcccaacatgagggtgcagaagtgcagctgtgcctcggatggggcgctcgtgccaaggaggctccagccataggcgcctggtgtatccattgagccctctaactgaacgtgtgcatagaggtggtcttaatgtaggtcttaactttatacttagcaagttactccatcccaatttagtgctcctgtgtgaccttcgccctgtgtccttccatttcctgtctttcccgtccatcacccatcctaagcacttacgtgagtaaataatgcagctcagatgctgagctctagtaggaaatgctggcatgctgattacaagatacagctgagcaatgcacacattttcagctgggagtttctgttctctggcaaattcttcactgagtctggaacaataataccctatgattagaactggggaaacagaactgaattgctgtgttatatgaggaattaaaaccttcaaatctctatttcccccaaatactgacccattctggacttttgtaaacatacctaggcccctgttcccctgagagggtgctaagaggaaggatgaagggcttcaggctgggggcagtggacagggaattgggatacctggattctggttctgacagggccacaagctaggatctctaacaaacgcagaaggctttggctcgtcatttcctcttaaaaaggaggagctgggcttcagctctaagaacttcattgccctggggatcagacagcccctacctacccctgcccactcctctggagactgagccttgcccgtgcatatttaggtcatttcccacactgtcttagagaacttgtcaccagaaaccacatgtatttgcatgttttttgttaatttagctaaagcaattgaatgtagatactcagaagaaataaaaaatgatgtttc

SEQ ID NO: 136635 - DNA, 1101 bp, Artificial Sequence
  derived and/or modified sequence
atgtggcccctgtggctgtgctgggccctgtgggtgctgcccctggccggccctggcgccgctctcactgaggaacagctcctggggtctttgctgcggcagctccagctgtccgaagtccccgtgctggacagggctgacatggagaaactagttattccagcccatgtccgcgcgcagtacgttgtcttgttgaggagaagccacggggatcgctcaaggggaaagagatttagccagagcttccgtgaagtcgccgggcgatttctcgcatccgaagcttctactcatttgttggttttcggcatggaacagagactgcccccaaattccgaacttgtgcaggctgtcttaagattgttccaggagcccgtccccaaagctgccctacaccgtcacggtagactcagcccccggtctgcccaagcaagggtgacagtcgagtggctcagagtgcgggatgacgggtccaatagaacatcactcatcgactcccgcttggtctctgtgcatgagtcaggctggaaggcttttgacgtaacagaggctgtgaatttctggcaacagctctcccgcccgcgccagcccctgctgctacaggtcagtgtgcagagggaacacttaggtccactcgcctctggggcccacaagctagtgaggttcgcaagtcagggagccccagccggcctcggagaaccccagctcgagctacataccctggatctcagggactatggggctcagggtgactgtgacccggaggcccccatgaccgagggcactcgatgctgcaggcaagagatgtacattgatctgcagggtatgaagtgggcaaaaaattgggtgcttgaaccacctggcttcctcgcatacgaatgtgtaggcacctgccagcagccccctgaagccctggcctttaattggcccttcctgggccccagacagtgtatagcgtctgagaccgctagcttgcctatgattgtgtctatcaaggagggcggccgcaccaggccgcaggtggtaagcctgccaaatatgcgggtgcagaaatgctcctgcgctagtgacggcgcactcgttccgagacgtcttcagccctag

SEQ ID NO: 136636 - DNA, 1101 bp, Artificial Sequence
  derived and/or modified sequence
atgtggccgctgtggctgtgctgggccttatgggtgctcccattggcaggcccaggcgctgcactgactgaagagcagctcctcggaagcctcttaagacagcttcagttgtccgaggtgccagtgttagacagggctgacatggaaaagcttgtcataccagcccacgtgagagcgcaatatgtggtgctcttgcgaagaagccatggcgatcggtcccgcggaaaacgcttcagccaaagctttcgagaagtggctggccgattcctcgctagtgaggcaagcactcacctgttggtctttgggatggagcaacgcttacccccaaactccgagttggtacaggcagtgctgcgactgttccaggagccagtgcccaaggcggctttgcaccgtcacggcagactcagccccaggtctgcccaggccagagtgactgtggagtggctgcgagttcgggatgatggttccaatcggacatctctgatcgatagtcgcctagtgtctgtccacgaatcagggtggaaggcgtttgatgttacagaggccgtcaacttttggcagcagctgtctcgacctagacagcccctcctcctacaggtgagcgttcagagggagcacctcggcccacttgcgagtggtgcccacaaactggttcgatttgcaagccagggagcgccagccggtctcggcgaacctcagcttgagctgcacacactggatttacgggactatggcgctcaaggggactgtgatccagaggccccaatgactgaaggaacaaggtgctgcaggcaggagatgtacatcgacctccaggggatgaagtgggccaagaattgggttctcgagccccctggattcctcgcatacgaatgtgtcggcacttgtcagcaacctccggaggcgctggcattcaattggccatttcttggcccacggcagtgcatcgcctcagagactgcttccctgcctatgatcgtgtccattaaagaagggggacggacaaggccacaggttgtgtcattgcccaacatgcgcgttcaaaaatgctcatgtgcctctgacggcgctctggtgccgaggaggcttcagccttag

SEQ ID NO: 136637 - DNA, 1101 bp, Artificial Sequence
  derived and/or modified sequence
atgtggcccctgtggctgtgctgggccctgtgggtgctgcccctggccggccccggcgccgccctgaccgaggagcagctgctgggcagcctgctgagacagctgcagctgagcgaggtgcccgtgctggacagagccgacatggagaagctggtgatccccgcccacgtgagagcccagtacgtggtgctgctgagaagaagccacggcgacagaagcagaggcaagagattcagccagagcttcagagaggtggccggcagattcctggccagcgaggccagcacccacctgctggtgttcggcatggagcagagactgccccccaacagcgagctggtgcaggccgtgctgagactgttccaggagcccgtgcccaaggccgccctgcacagacacggcagactgagccccagaagcgcccaggccagagtgaccgtggagtggctgagagtgagagacgacggcagcaacagaaccagcctgatcgacagcagactggtgagcgtgcacgagagcggctggaaggccttcgacgtgaccgaggccgtgaacttctggcagcagctgagcagacccagacagcccctgctgctgcaggtgagcgtgcagagagagcacctgggccccctggccagcggcgcccacaagctggtgagattcgccagccagggcgcccccgccggcctgggcgagccccagctggagctgcacaccctggacctgagagactacggcgcccagggcgactgcgaccccgaggcccccatgaccgagggcaccagatgctgcagacaggagatgtacatcgacctgcagggcatgaagtgggccaagaactgggtgctggagccccccggcttcctggcctacgagtgcgtgggcacctgccagcagccccccgaggccctggccttcaactggcccttcctgggccccagacagtgcatcgccagcgagaccgccagcctgcccatgatcgtgagcatcaaggagggcggcagaaccagaccccaggtggtgagcctgcccaacatgagagtgcagaagtgcagctgcgccagcgacggcgccctggtgcccagaagactgcagccctag

SEQ ID NO: 136638 - protein, 684 aa, Artificial Sequence
  derived and/or modified sequence
MMDASKELQVLHIDFLNQDNAVSHHTWEFQTSSPVFRRGQVFHLRLVLNQPLQSYHQLKLEFSTGPNPSIAKHTLVVLDPRTPSDHYNWQATLQNESGKEVTVAVTSSPNAILGKYQLNVKTGNHILKSEENILYLLFNPWCKEDMVFMPDEDERKEYILNDTGCHYVGAARSIKCKPWNFGQFEKNVLDCCISLLTESSLKPTDRRDPVLVCRAMCAMMSFEKGQGVLIGNWTGDYEGGTAPYKWTGSAPILQQYYNTKQAVCFGQCWVFAGILTTVLRALGIPARSVTGFDSAHDTERNLTVDTYVNENGEKITSMTHDSVWNFHVWTDAWMKRPDLPKGYDGWQAVDATPQERSQGVFCCGPSPLTAIRKGDIFIVYDTRFVFSEVNGDRLIWLVKMVNGQEELHVISMETTSIGKNISTKAVGQDRRRDITYEYKYPEGSSEERQVMDHAFLLLSSEREHRRPVKENFLHMSVQSDDVLLGNSVNFTVILKRKTAALQNVNILGSFELQLYTGKKMAKLCDLNKTSQIQGQVSEVTLTLDSKTYINSLAILDDEPVIRGFIIAEIVESKEIMASEVFTSFQYPEFSIELPNTGRIGQLLVCNCIFKNTLAIPLTDVKFSLESLGISSLQTSDHGTVQPGETIQSQIKCTPIKTGPKKFIVKLSSKQVKEINAQKIVLITK

SEQ ID NO: 136639 - DNA, 2055 bp, Artificial Sequence
  derived and/or modified sequence
atgatggacgccagcaaggagctgcaggtgctgcacatcgacttcctgaaccaggacaacgccgtgagccaccacacctgggagttccagaccagcagccccgtgttcagaagaggccaggtgttccacctgagactggtgctgaaccagcccctgcagagctaccaccagctgaagctggagttcagcaccggccccaaccccagcatcgccaagcacaccctggtggtgctggaccccagaacccccagcgaccactacaactggcaggccaccctgcagaacgagagcggcaaggaggtgaccgtggccgtgaccagcagccccaacgccatcctgggcaagtaccagctgaacgtgaagaccggcaaccacatcctgaagagcgaggagaacatcctgtacctgctgttcaacccctggtgcaaggaggacatggtgttcatgcccgacgaggacgagagaaaggagtacatcctgaacgacaccggctgccactacgtgggcgccgccagaagcatcaagtgcaagccctggaacttcggccagttcgagaagaacgtgctggactgctgcatcagcctgctgaccgagagcagcctgaagcccaccgacagaagagaccccgtgctggtgtgcagagccatgtgcgccatgatgagcttcgagaagggccagggcgtgctgatcggcaactggaccggcgactacgagggcggcaccgccccctacaagtggaccggcagcgcccccatcctgcagcagtactacaacaccaagcaggccgtgtgcttcggccagtgctgggtgttcgccggcatcctgaccaccgtgctgagagccctgggcatccccgccagaagcgtgaccggcttcgacagcgcccacgacaccgagagaaacctgaccgtggacacctacgtgaacgagaacggcgagaagatcaccagcatgacccacgacagcgtgtggaacttccacgtgtggaccgacgcctggatgaagagacccgacctgcccaagggctacgacggctggcaggccgtggacgccaccccccaggagagaagccagggcgtgttctgctgcggccccagccccctgaccgccatcagaaagggcgacatcttcatcgtgtacgacaccagattcgtgttcagcgaggtgaacggcgacagactgatctggctggtgaagatggtgaacggccaggaggagctgcacgtgatcagcatggagaccaccagcatcggcaagaacatcagcaccaaggccgtgggccaggacagaagaagagacatcacctacgagtacaagtaccccgagggcagcagcgaggagagacaggtgatggaccacgccttcctgctgctgagcagcgagagagagcacagaagacccgtgaaggagaacttcctgcacatgagcgtgcagagcgacgacgtgctgctgggcaacagcgtgaacttcaccgtgatcctgaagagaaagaccgccgccctgcagaacgtgaacatcctgggcagcttcgagctgcagctgtacaccggcaagaagatggccaagctgtgcgacctgaacaagaccagccagatccagggccaggtgagcgaggtgaccctgaccctggacagcaagacctacatcaacagcctggccatcctggacgacgagcccgtgatcagaggcttcatcatcgccgagatcgtggagagcaaggagatcatggccagcgaggtgttcaccagcttccagtaccccgagttcagcatcgagctgcccaacaccggcagaatcggccagctgctggtgtgcaactgcatcttcaagaacaccctggccatccccctgaccgacgtgaagttcagcctggagagcctgggcatcagcagcctgcagaccagcgaccacggcaccgtgcagcccggcgagaccatccagagccagatcaagtgcacccccatcaagaccggccccaagaagttcatcgtgaagctgagcagcaagcaggtgaaggagatcaacgcccagaagatcgtgctgatcaccaagtag

SEQ ID NO: 136640 - DNA, 2055 bp, Artificial Sequence
  derived and/or modified sequence
atgatggatgcatcaaaggaattacaggtattgcatattgactttctcaatcaggataatgctgtcagtcaccatacgtgggaatttcagacctcgagcccagtgttccgaagaggtcaggttttccacctgagattggtgctaaaccagccgctgcagagttatcatcaactaaaactggaattttcaactggcccaaacccgagcattgcgaagcacaccttggtagtactcgaccctaggacgccatctgatcattataactggcaggcaaccctccagaatgaatctggaaaagaggtgaccgttgccgtgaccagtagccctaatgccattcttggcaagtaccagctgaatgttaaaacaggaaaccacatcctgaagtctgaggagaacatactctacctgctctttaatccttggtgcaaggaggatatggtattcatgcccgacgaagatgaaaggaaagaatatatcctgaacgacaccgggtgccactacgtgggcgcggctagatcaatcaaatgtaagccctggaattttggacagttcgaaaagaacgtcctggactgctgtatttccttgcttaccgagtccagtttaaaaccaaccgatagaagagaccctgttttggtatgcagggccatgtgtgctatgatgtcgtttgagaaagggcagggcgttctcatcggcaactggacgggtgactatgaaggagggactgcaccctataaatggacagggagcgcaccaattcttcagcaatactataataccaagcaggccgtctgctttggccaatgttgggtctttgcaggcatactaaccacagtcctccgagccctggggatacccgcacggtctgtgacgggctttgattctgcccacgatacggaacgaaacctgaccgtggacacctatgtgaacgagaacggcgagaaaatcacgtctatgactcacgactctgtttggaatttccatgtgtggaccgatgcttggatgaagaggcctgaccttccaaagggttatgacgggtggcaagccgtggatgctaccccccaggagaggtcgcagggcgtgttctgctgtggccctagcccgctgaccgccatccgtaagggagacatatttattgtgtacgatacgcgttttgtattctcagaggtcaatggcgatcggctgatctggctagtgaagatggttaacggacaggaggagctccatgtaataagcatggagaccacatcaatcgggaaaaatatcagcaccaaggcagttgggcaggatcggcgccgtgacataacatatgagtacaaataccctgagggtagcagcgaggaacggcaggtcatggaccatgctttcctgctgctttcctctgaaagggaacacagaaggcccgtcaaggaaaattttctgcacatgagcgtgcagagtgacgatgtactgctgggcaacagcgttaactttaccgtaattctcaagcgcaaaaccgcggcgcttcagaacgtgaatatactgggaagcttcgagctgcaactgtacaccggtaaaaagatggccaaactgtgcgacttaaacaagaccagccagattcagggtcaggtctcagaagtgacgctgaccttggattctaagacatatatcaacagccttgcaatcctcgacgacgagcctgtcatcagagggtttattattgcagagattgtcgagtcaaaagaaattatggcctccgaggtttttaccagtttccaatatcccgagttttcaattgaactgcctaataccggacggatcgggcaattgctggtgtgcaattgtatattcaaaaataccctcgcgattcctttgactgatgttaaattctcactcgaatcattaggtattagtagccttcagaccagtgatcacggcacggtgcagcccggggagaccatacagtcacaaatcaaatgtacgcccatcaaaactggtcccaagaagtttatcgtgaagcttagtagcaagcaagttaaggagatcaatgcccagaagatagtactgattaccaaatag

SEQ ID NO: 136641 - DNA, 2055 bp, Artificial Sequence
  derived and/or modified sequence
atgatggatgccagcaaggagctgcaggtgctgcacatcgacttcctgaaccaggacaatgctgtgagccaccacacctgggagttccagaccagcagccctgtgttcagaagaggccaggtgttccacctgcggctggtgctgaaccagcccctgcagagctaccaccagctgaagctggagttcagcacaggccccaaccccagcatcgccaagcacaccctggtggtgctggaccccaggacccccagcgaccactacaactggcaggccaccctgcagaatgaaagtggcaaggaggtgacagtggccgtgaccagcagccccaatgccatcctgggcaagtaccagctgaatgtgaagacaggcaaccacatcctgaagtctgaggagaacatcctgtacctgctcttcaacccctggtgcaaggaggacatggtgttcatgccagatgaagatgagaggaaggagtacatcctgaatgacaccggctgccactacgtgggcgccgcccggagcatcaagtgcaagccctggaactttggccagtttgagaagaatgtgctggactgctgcatcagcctgctgacagagagcagcctgaagcccacagaccggcgggaccctgtgctggtgtgccgggccatgtgtgccatgatgagctttgagaagggccagggcgtgctgattggcaactggacaggagactatgaaggaggaacagccccctacaagtggacaggcagcgcccccatcctgcagcagtactacaacaccaagcaggccgtgtgcttcggccagtgctgggtgtttgctggcatcctgaccaccgtgctgcgggccctgggcatcccagcccggtctgtgacaggctttgacagcgcccatgacacagagaggaacctgactgtggacacctacgtgaatgaaaatggagagaagatcacctccatgacccatgacagcgtgtggaacttccacgtgtggacagatgcctggatgaagaggccagacctgcccaagggctatgatggctggcaggccgtggatgccaccccccaggagaggagccagggcgtcttctgctgcggccccagccccctgacagccatcagaaaaggagacatcttcatcgtgtatgacaccaggtttgtgttttctgaggtgaatggagacaggctcatctggctggtgaagatggtgaatggccaggaggagctgcacgtgatctccatggagaccaccagcatcggcaagaacatcagcaccaaggctgtgggccaggacagaagaagagacatcacctatgagtacaagtacccagagggcagcagcgaggagcggcaggtgatggaccacgccttcctgctgctgagcagcgagcgggagcacagaagacctgtgaaggagaacttcctgcacatgtctgtgcagagtgatgatgtgctgctgggcaacagcgtgaacttcaccgtcatcctgaagaggaagacagctgccctgcagaatgtgaacatcctgggcagctttgagctgcagctgtacaccgggaagaagatggccaagctgtgtgacctgaacaagaccagccagatccagggccaggtgtctgaggtgaccctgaccctggacagcaagacctacatcaacagcctggccatcctggatgatgagcctgtgatccggggcttcatcatcgccgagatcgtggagagcaaggagatcatggccagcgaggtgttcaccagcttccagtacccagagttcagcattgagctgcccaacacaggaagaattggccagctgctggtgtgcaactgcatcttcaagaacaccctggccatccccctgacagatgtgaagttcagcctggagagcctgggcatcagcagcctgcagaccagtgaccatggaacagtgcagcccggggagaccatccagagccagatcaagtgcacccccatcaagacaggccccaagaagttcatcgtgaagctgagcagcaagcaggtgaaggagatcaatgcccagaagatcgtgctgatcaccaagtag

SEQ ID NO: 136642 - DNA, 2055 bp, Artificial Sequence
  derived and/or modified sequence
atgatggacgccagcaaggagctgcaggtgctgcacatcgacttcctcaatcaggacaatgcagttagtcatcatacctgggagttccagacctcctcccctgttttccgacgggggcaagtgtttcacctgcgcctggtcttgaatcagccacttcagtcctaccatcagctgaagctggagttctcaaccggtcccaacccgagtatcgcaaaacacacccttgtggtacttgatccaaggacgccaagtgatcactataactggcaggcaacattacaaaatgaaagcgggaaggaagtgaccgttgcggtaacaagttcaccaaatgccatcctgggcaagtaccagctgaatgtgaaaacaggaaaccacattctgaaaagcgaagaaaacatcttatatcttctatttaacccgtggtgtaaagaggacatggtatttatgcctgatgaagacgagcgaaaagaatatatactgaacgatactggctgccattacgtgggagctgctcgtagcattaaatgcaaaccgtggaatttcggacagtttgagaaaaacgtgctggactgctgtattagcctcctcaccgagtccagcttaaagcccaccgaccgacgcgatccggtgctcgtgtgcagggctatgtgtgcaatgatgtcattcgaaaagggccagggtgtccttataggcaactggactggcgactatgaggggggaactgccccctacaagtggaccggatccgcgcccatcctgcagcagtactataataccaagcaggcagtctgttttggacagtgttgggtgtttgcgggtatactaaccactgtgttgcgcgccctgggcataccagcacgatccgtcaccggcttcgacagtgcacatgatactgaacgaaacttgactgtggacacttacgtaaatgagaacggtgagaagattacgtctatgacacatgactccgtgtggaattttcacgtgtggaccgatgcatggatgaaacggcccgatctgcctaaggggtatgacgggtggcaggctgtggacgccactccacaggaacgcagtcaaggcgttttctgttgtgggccttcccccctcaccgccataagaaagggggacatcttcatcgtttacgacacgcgcttcgtttttagtgaggtcaacggtgaccgtttgatctggctggtcaaaatggtgaacggccaagaggagctgcatgtgatctctatggaaacaactagtataggaaagaatataagcaccaaggcagtaggccaagacaggagaagggatatcacctatgagtacaagtaccccgaaggtagcagcgaagagagacaggtgatggaccatgcgtttctccttcttagctctgagcgggagcacagacgacctgtcaaggagaacttcctgcatatgtctgtgcagagcgatgacgtgctgctcggcaatagcgtgaacttcacagtaatcctgaaaaggaaaaccgctgctttacagaacgttaacattctcggatcctttgaactccagttgtacacgggaaaaaagatggccaagctttgcgatctgaataagacttcccagattcagggacaagtgtctgaggtgactttgaccctggactcaaagacctacattaattcacttgccattctggacgatgagcccgttattagaggctttatcatcgcagaaatagtggagagcaaagagattatggctagcgaagtttttaccagcttccagtaccccgaattctcaatcgagctgccgaatactggaagaataggccagctgctcgtttgcaattgtatttttaaaaataccctggcgattccattgaccgatgtgaagttcagcctggaatccctagggatcagtagccttcagactagcgaccacggtacagtgcagcctggcgagacgatccagagtcagataaaatgcacccccatcaagaccgggccaaaaaagttcatagtaaaactatcctcgaaacaggtaaaagaaataaacgcccaaaaaatcgttcttatcaccaagtag

SEQ ID NO: 136643 - DNA, 2055 bp, Artificial Sequence
  derived and/or modified sequence
atgatggacgcttctaaggagttacaggtgttgcacatagatttcctgaaccaggataacgccgtgtcacaccacacctgggagttccagacctccagtccagtgttcagaagaggccaggtgtttcacctaagactcgttctgaaccagcctctgcagtcctaccaccaattgaaattggaattctcaacaggccctaatcctagtatcgcgaaacatacgcttgtggtgttggaccctcgcactccatcagaccactacaattggcaggcgacgttacagaacgagtccgggaaggaggtgaccgtggccgtaacatcctctcccaatgcgatcttgggcaagtatcagcttaatgtcaaaacaggaaaccacattctgaaatccgaggaaaatattctctacctgctgtttaatccttggtgtaaggaagatatggtcttcatgcccgacgaagacgagagaaaagagtacatcctgaacgatacagggtgccattacgtaggagcagccagatcaattaaatgcaaaccttggaacttcgggcagtttgaaaaaaacgtgctggactgttgtattagtcttctgactgagtccagcctcaaacccactgacaggagagacccagtcctggtctgccgcgctatgtgcgccatgatgagcttcgagaagggacagggggtgctgattggcaattggacaggtgattacgagggcggtaccgcaccctacaagtggaccggatccgcccctattcttcagcagtactacaacacaaaacaggcggtgtgcttcggtcagtgctgggtgtttgccggaattcttacgacagtcttgcgggctttgggaattccagcacgttctgtgaccggttttgattcagctcacgacactgaacgcaatctgaccgtcgatacctatgttaacgaaaatggagagaaaataactagcatgactcacgacagtgtttggaatttccatgtctggacagacgcctggatgaaacgccctgacctcccgaaaggatacgacggctggcaggcggttgacgctaccccacaggaaagaagccagggagtgttctgctgtggaccaagtccactgactgctatcagaaagggagatattttcatcgtgtatgacacaagatttgtgttcagcgaagtcaatggcgaccggctgatttggctcgtgaaaatggttaacggacaggaagagctccatgtgatcagcatggagacaacctcaattggaaagaacatttccacaaaggctgtgggccaggacaggcgacgcgatattacatacgagtacaagtacccagagggctcgtcagaggagcggcaagtaatggaccacgcttttttgctgctctcctcagaaagagagcaccgcaggcctgttaaggaaaactttctccatatgtccgtgcagagcgacgatgtgctactgggcaacagcgtcaactttacagtgatactgaagaggaagaccgcggcattgcagaacgtcaacattctcggcagcttcgaattgcaattgtatactggtaagaagatggctaagctgtgcgatctgaataaaaccagccagattcaagggcaagtgtcagaggttacactaacacttgacagtaaaacttacatcaattcactggccattctggatgacgagcccgtgatccgagggtttattatagctgagattgttgaatctaaagaaatcatggcctcagaagtgttcaccagtttccagtatccagaattcagcatcgagttacctaacacaggaagaatagggcaactgctggtttgtaactgcatttttaaaaacaccctggccataccgctcacggatgtcaaattcagcctcgagtcactgggaatctcctcactgcagacttctgatcatgggactgtacagcccggagagacgatccagtcacagataaaatgcaccccaattaaaactggtcctaaaaagtttatagttaagctctcttcaaagcaggtcaaggagataaatgcgcagaagatagtgctaataaccaagtag

SEQ ID NO: 136644 - DNA, 3388 bp, Artificial Sequence
  derived and/or modified sequence
gactgtgtggaagcaccaggcatcagagatagagtcttccctggcattgcaggagagaatctgaagggatgatggatgcatcaaaagagctgcaagttctccacattgacttcttgaatcaggacaacgccgtttctcaccacacatgggagttccaaacgagcagtcctgtgttccggcgaggacaggtgtttcacctgcggctggtgctgaaccagcccctacaatcctaccaccaactgaaactggaattcagcacagggccgaatcctagcatcgccaaacacaccctggtggtgctcgacccgaggacgccctcagaccactacaactggcaggcaacccttcaaaatgagtctggcaaagaggtcacagtggctgtcaccagttcccccaatgccatcctgggcaagtaccaactaaacgtgaaaactggaaaccacatccttaagtctgaagaaaacatcctataccttctcttcaacccatggtgtaaagaggacatggttttcatgcctgatgaggacgagcgcaaagagtacatcctcaatgacacgggctgccattacgtgggggctgccagaagtatcaaatgcaaaccctggaactttggtcagtttgagaaaaatgtcctggactgctgcatttccctgctgactgagagctccctcaagcccacagataggagggaccccgtgctggtgtgcagggccatgtgtgctatgatgagctttgagaaaggccagggcgtgctcattgggaattggactggggactacgaaggtggcacagccccatacaagtggacaggcagtgccccgatcctgcagcagtactacaacacgaagcaggctgtgtgctttggccagtgctgggtgtttgctgggatcctgactacagtgctgagagcgttgggcatcccagcacgcagtgtgacaggcttcgattcagctcacgacacagaaaggaacctcacggtggacacctatgtgaatgagaatggcgagaaaatcaccagtatgacccacgactctgtctggaatttccatgtgtggacggatgcctggatgaagcgaccggatctgcccaagggctacgacggctggcaggctgtggacgcaacgccgcaggagcgaagccagggtgtcttctgctgtgggccatcaccactgaccgccatccgcaaaggtgacatctttattgtctatgacaccagattcgtcttctcagaagtgaatggtgacaggctcatctggttggtgaagatggtgaatgggcaggaggagttacacgtaatttcaatggagaccacaagcatcgggaaaaacatcagcaccaaggcagtgggccaagacaggcggagagatatcacctatgagtacaagtatccagaaggctcctctgaggagaggcaggtcatggatcatgccttcctccttctcagttctgagagggagcacagacgacctgtaaaagagaactttcttcacatgtcggtacaatcagatgatgtgctgctgggaaactctgttaatttcaccgtgattcttaaaaggaagaccgctgccctacagaatgtcaacatcttgggctcctttgaactacagttgtacactggcaagaagatggcaaaactgtgtgacctcaataagacctcgcagatccaaggtcaagtatcagaagtgactctgaccttggactccaagacctacatcaacagcctggctatattagatgatgagccagttatcagaggtttcatcattgcggaaattgtggagtctaaggaaatcatggcctctgaagtattcacgtctttccagtaccctgagttctctatagagttgcctaacacaggcagaattggccagctacttgtctgcaattgtatcttcaagaataccctggccatccctttgactgacgtcaagttctctttggaaagcctgggcatctcctcactacagacctctgaccatgggacggtgcagcctggtgagaccatccaatcccaaataaaatgcaccccaataaaaactggacccaagaaatttatcgtcaagttaagttccaaacaagtgaaagagattaatgctcagaagattgttctcatcaccaagtagccttgtctgatgctgtggagccttagttgagatttcagcatttcctaccttgtgcttagctttcagattatggatgattaaatttgatgacttatatgagggcagattcaagagccagcaggtcaaaaaggccaacacaaccataagcagccagacccacaaggccaggtcctgtgctatcacagggtcacctcttttacagttagaaacaccagccgaggccacagaatcccatccctttcctgagtcatggcctcaaaaatcagggccaccattgtctcaattcaaatccatagatttcgaagccacagagtctctccctggagcagcagactatgggcagcccagtgctgccacctgctgacgacccttgagaagctgccatatcttcaggccatgggttcaccagccctgaaggcacctgtcaactggagtgctctctcagcactgggatgggcctgatagaagtgcattctcctcctattgcctccattctcctctctctatccctgaaatccaggaagtccctctcctggtgctccaagcagtttgaagcccaatctgcaaggacatttctcaagggccatgtggttttgcagacaaccctgtcctcaggcctgaactcaccatagagacccatgtcagcaaacggtgaccagcaaatcctcttcccttattctaaagctgccccttgggagactccagggagaaggcattgcttcctccctggtgtgaactctttctttggtattccatccactatcctggcaactcaaggctgcttctgttaactgaagcctgctccttcttgttctgccctccagagatttgctcaaatgatcaataagctttaaattaaactctacttcaagaaaactctgtggtccctgagtccttttttctttatgccaataagcttcttaaatgtgctggcggtttatgcagtcacttggggagccatggaatcctttgatctccccaggcaaggtgctctgaggagttggcttctttattgtctgttcagtacatccaacccctctctcaaaggctgtcaccccaactggatacacaccctggcaaaggcacgtagcttgaatgagggttattttgtgtctaattcacaggagagtcatgggtgggatacctgtcatcctctgcctttccagctgtccaagtgaaaaaaacctcaatcctggtcacccttgcccaagttgcccacatccctggcatacagtaggtgttcaataaatgtttattgaaggaaa

SEQ ID NO: 136645 - protein, 567 aa, Artificial Sequence
  derived and/or modified sequence
MGRGLLRGLWPLHIVLWTRIASTIPPHVQKSVNNDMIVTDNNGAVKFPQLCKFCDVRFSTCDNQKSCMSNCSITSICEKPQEVCVAVWRKNDENITLETVCHDPKLPYHDFILEDAASPKCIMKEKKKPGETFFMCSCSSDECNDNIIFSEEYNTSNPDLLLVIFQVTGISLLPPLGVAISVIIIFYCYRVNRQQKLSSTWETGKTRKLMEFSEHCAIILEDDRSDISSTCANNINHNTELLPIELDTLVGKGRFAEVYKAKLKQNTSEQFETVAVKIFPYEEYASWKTEKDIFSDINLKHENILQFLTAEERKTELGKQYWLITAFHAKGNLQEYLTRHVISWEDLRKLGSSLARGIAHLHSDHTPCGRPKMPIVHRDLKSSNILVKNDLTCCLCDFGLSLRLDPTLSVDDLANSGQVGTARYMAPEVLESRMNLENVESFKQTDVYSMALVLWEMTSRCNAVGEVKDYEPPFGSKVREHPCVESMKDNVLRDRGRPEIPSFWLNHQGIQMVCETLTECWDHDPEARLTAQCVAERFSELEHLDRLSGRSCSEEKIPEDGSLNTTK

SEQ ID NO: 136646 - DNA, 1704 bp, Artificial Sequence
  derived and/or modified sequence
atgggcagaggcctgctgagaggcctgtggcccctgcacatcgtgctgtggaccagaatcgccagcaccatccccccccacgtgcagaagagcgtgaacaacgacatgatcgtgaccgacaacaacggcgccgtgaagttcccccagctgtgcaagttctgcgacgtgagattcagcacctgcgacaaccagaagagctgcatgagcaactgcagcatcaccagcatctgcgagaagccccaggaggtgtgcgtggccgtgtggagaaagaacgacgagaacatcaccctggagaccgtgtgccacgaccccaagctgccctaccacgacttcatcctggaggacgccgccagccccaagtgcatcatgaaggagaagaagaagcccggcgagaccttcttcatgtgcagctgcagcagcgacgagtgcaacgacaacatcatcttcagcgaggagtacaacaccagcaaccccgacctgctgctggtgatcttccaggtgaccggcatcagcctgctgccccccctgggcgtggccatcagcgtgatcatcatcttctactgctacagagtgaacagacagcagaagctgagcagcacctgggagaccggcaagaccagaaagctgatggagttcagcgagcactgcgccatcatcctggaggacgacagaagcgacatcagcagcacctgcgccaacaacatcaaccacaacaccgagctgctgcccatcgagctggacaccctggtgggcaagggcagattcgccgaggtgtacaaggccaagctgaagcagaacaccagcgagcagttcgagaccgtggccgtgaagatcttcccctacgaggagtacgccagctggaagaccgagaaggacatcttcagcgacatcaacctgaagcacgagaacatcctgcagttcctgaccgccgaggagagaaagaccgagctgggcaagcagtactggctgatcaccgccttccacgccaagggcaacctgcaggagtacctgaccagacacgtgatcagctgggaggacctgagaaagctgggcagcagcctggccagaggcatcgcccacctgcacagcgaccacaccccctgcggcagacccaagatgcccatcgtgcacagagacctgaagagcagcaacatcctggtgaagaacgacctgacctgctgcctgtgcgacttcggcctgagcctgagactggaccccaccctgagcgtggacgacctggccaacagcggccaggtgggcaccgccagatacatggcccccgaggtgctggagagcagaatgaacctggagaacgtggagagcttcaagcagaccgacgtgtacagcatggccctggtgctgtgggagatgaccagcagatgcaacgccgtgggcgaggtgaaggactacgagccccccttcggcagcaaggtgagagagcacccctgcgtggagagcatgaaggacaacgtgctgagagacagaggcagacccgagatccccagcttctggctgaaccaccagggcatccagatggtgtgcgagaccctgaccgagtgctgggaccacgaccccgaggccagactgaccgcccagtgcgtggccgagagattcagcgagctggagcacctggacagactgagcggcagaagctgcagcgaggagaagatccccgaggacggcagcctgaacaccaccaagtag

SEQ ID NO: 136647 - DNA, 1704 bp, Artificial Sequence
  derived and/or modified sequence
atgggcagaggactcctccgagggctctggcccctgcatattgtgctctggacacgtatagctagcaccatcccgcctcacgtacagaaatctgttaataatgatatgattgtcactgataataatggcgcggtaaaattcccgcagctttgtaaattctgcgatgtcaggttctcaacttgtgataaccagaaaagctgtatgtctaattgtagcataacttctatctgcgaaaaaccacaggaggtgtgtgtggccgtgtggcgaaaaaatgatgagaacattactctcgagacggtctgtcacgatccaaagctgccataccacgattttatcttggaagatgctgccagtccgaagtgcattatgaaggagaagaagaaacctggggaaacatttttcatgtgctcctgcagctcagatgagtgtaacgataatatcatcttcagtgaagaatacaatacctccaatcccgacctgctgctcgtgatctttcaggttactggcatatctctactgcctccactaggcgtagccattagcgtaatcatcatcttttactgctatagagttaaccgtcaacaaaagctgagctctacttgggagaccggcaaaacgcgcaagcttatggaattttcagagcattgtgctataattcttgaggatgacagaagtgatatctcatccacgtgtgccaacaatatcaaccacaatacagagttgcttcccattgagcttgacacattggtaggcaaggggcggttcgcggaggtctacaaggccaaactgaagcagaatacctcagagcagtttgagaccgtggccgtcaaaatcttcccctacgaagagtacgcatcttggaaaacagaaaaggacattttctctgacatcaaccttaagcacgaaaatatactgcaattcctgacagctgaggagagaaagacagagttgggtaagcagtactggctgatcacagccttccatgccaaaggcaacctgcaggaatacctgacccgacatgtgatttcatgggaggacctcaggaaactgggcagctccctcgcaagaggcatagcccatttgcacagtgaccatactccttgtggcaggccaaagatgcctatcgtccaccgcgatctgaagtcctccaacatcttggtcaaaaatgacctgacatgctgtctgtgtgacttcggcctctccctgcgcctggacccaactctcagcgtggacgacctggcaaattccggccaagtcgggacagcacgctacatggcaccggaagtgttggaatctaggatgaacctcgagaacgtcgaaagctttaagcaaaccgatgtgtattccatggcactggtgctctgggagatgacaagccgatgcaatgccgtcggggaggttaaagactatgaacctccgtttggtagtaaggtgcgtgagcacccctgtgtcgagagtatgaaggataacgtcttacgagatagaggtagacctgagatccccagcttctggttaaatcatcaaggtattcagatggtgtgcgagaccctgactgaatgctgggatcatgatcccgaagccagattgacagcgcaatgcgtcgcagagcgattctccgaattggagcacctggatcgcctgagcggacgaagctgttctgaagagaagattccagaagacgggagccttaatactaccaagtag

SEQ ID NO: 136648 - DNA, 1704 bp, Artificial Sequence
  derived and/or modified sequence
atgggccggggcctgctgcggggcctgtggcccctgcacatcgtgctgtggacccgcatcgccagcaccatcccccctcatgtgcagaagtctgtgaacaatgacatgattgtgacagacaacaacggggctgtgaagttcccccagctgtgcaagttctgtgatgtgcgcttcagcacctgtgacaaccagaagagctgcatgagcaactgcagcatcaccagcatctgtgagaagccccaggaggtgtgtgtggccgtgtggaggaagaatgatgagaacatcaccctggagaccgtgtgccacgaccccaagctgccctaccatgacttcatcctggaggatgctgccagccccaagtgcatcatgaaggagaagaagaagccaggagagaccttcttcatgtgcagctgcagcagtgatgagtgcaatgacaacatcatcttcagcgaggagtacaacaccagcaacccagacctgctgctggtgatcttccaggtgacaggcatcagcctgctgccccccctgggcgtggccatcagcgtcatcatcatcttctactgctacagagtgaaccggcagcagaagctgagcagcacctgggagaccgggaagaccaggaagctgatggagttcagcgagcactgtgccatcatcctggaggatgacagaagtgacatcagcagcacctgtgccaacaacatcaaccacaacacagagctgctgcccatcgagctggacaccctggtgggcaagggccgctttgctgaggtgtacaaggccaagctgaagcagaacaccagcgagcagtttgaaacagtggccgtgaagatcttcccctatgaggagtatgcctcctggaagacagagaaggacatcttcagtgacatcaacctgaagcatgagaacatcctgcagttcctgacagctgaggagaggaagacagagctgggcaagcagtactggctgatcacagccttccacgccaagggcaacctgcaggagtacctgaccaggcatgtgatctcctgggaggacctgaggaagctgggcagcagcctggcccggggcatcgcccacctgcacagcgaccacaccccctgtggccggcccaagatgcccatcgtgcaccgggacctgaagagcagcaacatcctggtgaagaatgacctgacctgctgcctgtgtgactttggcctgagcctgcggctggaccccaccctgtctgtggatgacctggccaacagcggccaggtgggcacagcccgctacatggcccctgaggtgctggagagcaggatgaacctggagaatgtggagagcttcaagcagacagatgtgtacagcatggccctggtgctgtgggagatgaccagccgctgcaatgctgtgggggaggtgaaggactatgagccccccttcggcagcaaggtgcgggagcacccctgtgtggagagcatgaaggacaacgtgctgcgggaccggggccggcctgagatccccagcttctggctgaaccaccagggcatccagatggtgtgtgagaccctgacagagtgctgggaccatgaccctgaggcccggctgacagcccagtgtgtggccgagcgcttcagcgagctggagcacctggaccggctgagcggccgcagctgcagcgaggagaagatcccagaagatggcagcctgaacaccaccaagtag

SEQ ID NO: 136649 - DNA, 1704 bp, Artificial Sequence
  derived and/or modified sequence
atgggccggggcctgctgcggggcctgtggcccctgcacatcgtgttgtggactaggatcgcttcaacaattcctccccatgtacagaagtccgtcaataacgatatgatagtgaccgataataacggagctgttaaatttccgcagctctgcaagttttgtgacgtgcgtttttccacttgcgacaatcaaaaatcttgcatgtcaaattgcagtattaccagtatttgtgaaaaaccacaggaggtgtgcgtagccgtctggcgaaaaaacgacgaaaacattacccttgaaaccgtgtgccacgacccaaagctaccataccacgacttcattctggaagacgccgcttcacctaaatgcataatgaaagagaagaaaaagcccggtgagacctttttcatgtgcagctgctctagcgacgagtgtaacgataatataatatttagcgaggaatataatacgagcaatccagacttgctgctggttatctttcaagtcactggaatctctctgttgccacctctcggggtggctattagcgtgatcattattttttattgctatcgggttaatcggcaacagaaactctcctccacttgggaaacgggcaagactcgtaagttgatggaattcagtgagcactgtgccatcattctggaggatgatcggagtgacatttcttcaacctgcgccaacaacatcaatcacaacacagagttgcttcctatagagctggacacacttgttggcaaaggacggttcgctgaggtgtacaaagctaaactgaaacagaacaccagtgagcaattcgagactgtggccgtaaaaatttttccatacgaggaatacgcctcatggaaaactgaaaaggacatcttttctgacatcaatctgaaacacgagaatattttgcagttcttgacggcagaagagcgaaagaccgaattggggaagcaatactggttgattactgcctttcacgccaaagggaatctgcaagaatacctgactcgacacgtcatcagctgggaagacctccgcaagctcggatcatcactggccagaggaattgcacatcttcacagtgatcatacaccttgcgggaggcccaagatgcccatcgtgcacagggatctgaagagttccaacatcctcgttaaaaatgatcttacttgttgtctgtgtgattttggactctctctgcggcttgatcccactctcagcgtcgacgatcttgccaactccggccaggtcggcactgcaaggtacatggcacctgaggttctggagagcagaatgaatctagaaaacgttgaatcgttcaaacaaaccgacgtgtattccatggccttagttctatgggagatgacttctagatgcaatgccgtcggagaagtgaaggattatgaacctccatttggcagcaaagtccgagaacacccctgtgtagagtctatgaaggataatgtcctgcgcgatcgcggacggccagaaatcccatctttctggctgaaccaccagggaatccagatggtctgtgagacactgaccgagtgttgggatcatgacccagaagcccgcttgaccgcccagtgtgttgccgagcggttcagcgagctagagcacctggaccgcctcagtggtcgaagctgtagcgaggagaaaatacctgaggatggcagcttgaataccactaagtag

SEQ ID NO: 136650 - DNA, 1704 bp, Artificial Sequence
  derived and/or modified sequence
atgggtcggggattactgagaggactgtggcctctccacatcgtgttgtggacgcggatcgccagcacaatcccccctcatgtccagaaatcggtgaataacgacatgattgtgactgacaataacggagctgtaaagttccctcagctgtgtaagttctgcgacgtgcgctttagcacctgcgacaaccaaaagtcttgcatgtccaactgctcaattactagcatctgcgagaaaccacaggaagtttgcgtggcagtatggcggaagaacgacgaaaacatcacactcgagaccgtgtgtcacgaccctaaactgccttatcatgactttatccttgaggacgcagcgtcccccaagtgcatcatgaaagagaaaaagaaaccaggggagacgttctttatgtgcagctgttcatctgacgaatgcaatgataatattatcttttcagaagagtataataccagcaatcccgacctactgttggtgatattccaggtcacaggcataagcctgttaccaccactcggggtagcaattagtgtaataattattttttactgctatcgggttaaccggcagcaaaagctctcttccacgtgggagacaggaaagacccgtaagctcatggaatttagcgaacattgcgcaatcattcttgaggacgatcgctctgacatcagttcgacatgcgccaacaacattaaccacaacaccgaactgctaccaatagaattagacactctcgtgggaaaaggacgattcgcagaggtgtacaaggcgaaactcaaacagaatacatccgagcagtttgaaaccgtggcagtgaaaatctttccttacgaagaatacgccagctggaaaaccgagaaggacattttcagcgatatcaatctgaagcacgaaaacattctccagtttctaacggcagaagaacgaaagacagagcttgggaagcaatattggttaataaccgctttccacgcgaagggaaacctacaggagtatttgactcggcatgtcattagctgggaggatctgcgtaagctgggctcatctttagccaggggaatcgcacatctgcattctgaccatacaccctgcggcaggcccaagatgcccatcgttcatcgggatttgaaaagctcaaatattctcgtaaaaaatgacttaacttgttgtctgtgtgatttcggcctgtctctgagactcgaccctaccctttcagtcgatgacctggctaactcgggacaggtaggcacagcgaggtacatggcccctgaggttctggagtctcgcatgaacctggagaacgtagagtcattcaaacaaaccgacgtgtacagcatggccctggtgctttgggagatgacctctcgctgcaatgccgtaggcgaggtgaaggattacgagccacctttcggttcaaaggtgagggaacacccatgcgttgaatcaatgaaggacaatgttttgcgagaccgcggaagaccagagatccccagcttttggctgaaccatcaggggatccagatggtatgtgaaactttaacagaatgttgggaccatgatccagaagcaaggctaaccgcccagtgtgtcgctgagcgattttctgagctggaacacctcgatcgcctctcgggacgctcttgcagcgaagagaaaatccctgaggacggcagcttgaacacgacaaaatag

SEQ ID NO: 136651 - DNA, 4621 bp, Artificial Sequence
  derived and/or modified sequence
ggagagggagaaggctctcgggcggagagaggtcctgcccagctgttggcgaggagtttcctgtttcccccgcagcgctgagttgaagttgagtgagtcactcgcgcgcacggagcgacgacacccccgcgcgtgcacccgctcgggacaggagccggactcctgtgcagcttccctcggccgccgggggcctccccgcgcctcgccggcctccaggccccctcctggctggcgagcgggcgccacatctggcccgcacatctgcgctgccggcccggcgcggggtccggagagggcgcggcgcggaggcgcagccaggggtccgggaaggcgccgtccgctgcgctgggggctcggtctatgacgagcagcggggtctgccatgggtcgggggctgctcaggggcctgtggccgctgcacatcgtcctgtggacgcgtatcgccagcacgatcccaccgcacgttcagaagtcggttaataacgacatgatagtcactgacaacaacggtgcagtcaagtttccacaactgtgtaaattttgtgatgtgagattttccacctgtgacaaccagaaatcctgcatgagcaactgcagcatcacctccatctgtgagaagccacaggaagtctgtgtggctgtatggagaaagaatgacgagaacataacactagagacagtttgccatgaccccaagctcccctaccatgactttattctggaagatgctgcttctccaaagtgcattatgaaggaaaaaaaaaagcctggtgagactttcttcatgtgttcctgtagctctgatgagtgcaatgacaacatcatcttctcagaagaatataacaccagcaatcctgacttgttgctagtcatatttcaagtgacaggcatcagcctcctgccaccactgggagttgccatatctgtcatcatcatcttctactgctaccgcgttaaccggcagcagaagctgagttcaacctgggaaaccggcaagacgcggaagctcatggagttcagcgagcactgtgccatcatcctggaagatgaccgctctgacatcagctccacgtgtgccaacaacatcaaccacaacacagagctgctgcccattgagctggacaccctggtggggaaaggtcgctttgctgaggtctataaggccaagctgaagcagaacacttcagagcagtttgagacagtggcagtcaagatctttccctatgaggagtatgcctcttggaagacagagaaggacatcttctcagacatcaatctgaagcatgagaacatactccagttcctgacggctgaggagcggaagacggagttggggaaacaatactggctgatcaccgccttccacgccaagggcaacctacaggagtacctgacgcggcatgtcatcagctgggaggacctgcgcaagctgggcagctccctcgcccgggggattgctcacctccacagtgatcacactccatgtgggaggcccaagatgcccatcgtgcacagggacctcaagagctccaatatcctcgtgaagaacgacctaacctgctgcctgtgtgactttgggctttccctgcgtctggaccctactctgtctgtggatgacctggctaacagtgggcaggtgggaactgcaagatacatggctccagaagtcctagaatccaggatgaatttggagaatgttgagtccttcaagcagaccgatgtctactccatggctctggtgctctgggaaatgacatctcgctgtaatgcagtgggagaagtaaaagattatgagcctccatttggttccaaggtgcgggagcacccctgtgtcgaaagcatgaaggacaacgtgttgagagatcgagggcgaccagaaattcccagcttctggctcaaccaccagggcatccagatggtgtgtgagacgttgactgagtgctgggaccacgacccagaggcccgtctcacagcccagtgtgtggcagaacgcttcagtgagctggagcatctggacaggctctcggggaggagctgctcggaggagaagattcctgaagacggctccctaaacactaccaaatagctcttctggggcaggctgggccatgtccaaagaggctgcccctctcaccaaagaacagaggcagcaggaagctgcccctgaactgatgcttcctggaaaaccaagggggtcactcccctccctgtaagctgtggggataagcagaaacaacagcagcagggagtgggtgacatagagcattctatgcctttgacattgtcataggataagctgtgttagcacttcctcaggaaatgagattgatttttacaatagccaataacatttgcactttattaatgcctgtatataaatatgaatagctatgttttatatatatatatatatatctatatatgtctatagctctatatatatagccataccttgaaaagagacaaggaaaaacatcaaatattcccaggaaattggttttattggagaactccagaaccaagcagagaaggaagggacccatgacagcattagcatttgacaatcacacatgcagtggttctctgactgtaaaacagtgaactttgcatgaggaaagaggctccatgtctcacagccagctatgaccacattgcacttgcttttgcaaaataatcattccctgcctagcacttctcttctggccatggaactaagtacagtggcactgtttgaggaccagtgttcccggggttcctgtgtgcccttatttctcctggacttttcatttaagctccaagccccaaatctggggggctagtttagaaactctccctcaacctagtttagaaactctaccccatctttaataccttgaatgttttgaaccccactttttaccttcatgggttgcagaaaaatcagaacagatgtccccatccatgcgattgccccaccatctactaatgaaaaattgttctttttttcatctttcccctgcacttatgttactattctctgctcccagccttcatccttttctaaaaaggagcaaattctcactctaggctttatcgtgtttactttttcattacacttgacttgattttctagttttctatacaaacaccaatgggttccatctttctgggctcctgattgctcaagcacagtttggcctgatgaagaggatttcaactacacaatactatcattgtcaggactatgacctcaggcactctaaacatatgttttgtttggtcagcacagcgtttcaaaaagtgaagccactttataaatatttggagattttgcaggaaaatctggatccccaggtaaggatagcagatggttttcagttatctccagtccacgttcacaaaatgtgaaggtgtggagacacttacaaagctgcctcacttctcactgtaaacattagctctttccactgcctacctggaccccagtctaggaattaaatctgcacctaaccaaggtcccttgtaagaaatgtccattcaagcagtcattctctgggtatataatatgattttgactaccttatctggtgttaagatttgaagttggccttttattggactaaaggggaactcctttaagggtctcagttagcccaagtttcttttgcttatatgttaatagttttaccctctgcattggagagaggagtgctttactccaagaagctttcctcatggttaccgttctctccatcatgccagccttctcaacctttgcagaaattactagagaggatttgaatgtgggacacaaaggtcccatttgcagttagaaaatttgtgtccacaaggacaagaacaaagtatgagctttaaaactccataggaaacttgttaatcaacaaagaagtgttaatgctgcaagtaatctcttttttaaaactttttgaagctacttattttcagccaaataggaatattagagagggactggtagtgagaatatcagctctgtttggatggtggaaggtctcattttattgagatttttaagatacatgcaaaggtttggaaatagaacctctaggcaccctcctcagtgtgggtgggctgagagttaaagacagtgtggctgcagtagcatagaggcgcctagaaattccacttgcaccgtagggcatgctgataccatcccaatagctgttgcccattgacctctagtggtgagtttctagaatactggtccattcatgagatattcaagattcaagagtattctcacttctgggttatcagcataaactggaatgtagtgtcagaggatactgtggcttgttttgtttatgtttttttttcttattcaagaaaaaagaccaaggaataacattctgtagttcctaaaaatactgacttttttcactactatacataaagggaaagttttattcttttatggaacacttcagctgtactcatgtattaaaataggaatgtgaatgctatatactctttttatatcaaaagtctcaagcacttatttttattctatgcattgtttgtcttttacataaataaaatgtttattagattgaataaagcaaaatactcaggtgagcatcctgcctcctgttcccattcctag

SEQ ID NO: 136652 - protein, 693 aa, Artificial Sequence
  derived and/or modified sequence
MAALGVQSINWQTAFNRQAHHTDKFSSQELILRRGQNFQVLMIMNKGLGSNERLEFIVSTGPYPSESAMTKAVFPLSNGSSGGWSAVLQASNGNTLTISISSPASAPIGRYTMALQIFSQGGISSVKLGTFILLFNPWLNVDSVFMGNHAEREEYVQEDAGIIFVGSTNRIGMIGWNFGQFEEDILSICLSILDRSLNFRRDAATDVASRNDPKYVGRVLSAMINSNDDNGVLAGNWSGTYTGGRDPRSWNGSVEILKNWKKSGFSPVRYGQCWVFAGTLNTALRSLGIPSRVITNFNSAHDTDRNLSVDVYYDPMGNPLDKGSDSVWNFHVWNEGWFVRSDLGPSYGGWQVLDATPQERSQGVFQCGPASVIGVREGDVQLNFDMPFIFAEVNADRITWLYDNTTGKQWKNSVNSHTIGRYISTKAVGSNARMDVTDKYKYPEGSDQERQVFQKALGKLKPNTPFAATSSMGLETEEQEPSIIGKLKVAGMLAVGKEVNLVLLLKNLSRDTKTVTVNMTAWTIIYNGTLVHEVWKDSATMSLDPEEEAEHPIKISYAQYEKYLKSDNMIRITAVCKVPDESEVVVERDIILDNPTLTLEVLNEARVRKPVNVQMLFSNPLDEPVRDCVLMVEGSGLLLGNLKIDVPTLGPKEGSRVRFDILPSRSGTKQLLADFSCNKFPAIKAMLSIDVAE

SEQ ID NO: 136653 - protein, 533 aa, Artificial Sequence
  derived and/or modified sequence
MAALGVQSINWQTAFNRQAHHTDKFSSQELILRRGQNFQVLMIMNKGLGSNERLEFIVSTGPYPSESAMTKAVFPLSNGSSGGWSAVLQASNGNTLTISISSPASAPIGRYTMALQIFSQGGISSVKLGTFILLFNPWLNVDSVFMGNHAEREEYVQEDAGIIFVGSTNRIGMIGWNFGQFEEDILSICLSILDRSLNFRRDAATDVASRNDPKYVGRVLSAMINSNDDNGVLAGNWSGTYTGGRDPRSWNGSVEILKNWKKSGFSPVRYGQCWVFAGTLNTALRSLGIPSRVITNFNSAHDTDRNLSVDVYYDPMGNPLDKGSDSVWNFHVWNEGWFVRSDLGPSYGGWQVLDATPQERSQGVFQCGPASVIGVREGDVQLNFDMPFIFAEVNADRITWLYDNTTGKQWKNSVNSHTIGRYISTKAVGSNARMDVTDKYKYPEGSDQERQVFQKALGKLKPNTPFAATSSMGLETEEQEPSIIGKLKVAGMLAVGKEVNLVLLLIPHALQCCRMDWPLTQGLSKRDTGEKLV

SEQ ID NO: 136654 - DNA, 2082 bp, Artificial Sequence
  derived and/or modified sequence
atggccgccctgggcgtgcagagcatcaactggcagaccgccttcaacagacaggcccaccacaccgacaagttcagcagccaggagctgatcctgagaagaggccagaacttccaggtgctgatgatcatgaacaagggcctgggcagcaacgagagactggagttcatcgtgagcaccggcccctaccccagcgagagcgccatgaccaaggccgtgttccccctgagcaacggcagcagcggcggctggagcgccgtgctgcaggccagcaacggcaacaccctgaccatcagcatcagcagccccgccagcgcccccatcggcagatacaccatggccctgcagatcttcagccagggcggcatcagcagcgtgaagctgggcaccttcatcctgctgttcaacccctggctgaacgtggacagcgtgttcatgggcaaccacgccgagagagaggagtacgtgcaggaggacgccggcatcatcttcgtgggcagcaccaacagaatcggcatgatcggctggaacttcggccagttcgaggaggacatcctgagcatctgcctgagcatcctggacagaagcctgaacttcagaagagacgccgccaccgacgtggccagcagaaacgaccccaagtacgtgggcagagtgctgagcgccatgatcaacagcaacgacgacaacggcgtgctggccggcaactggagcggcacctacaccggcggcagagaccccagaagctggaacggcagcgtggagatcctgaagaactggaagaagagcggcttcagccccgtgagatacggccagtgctgggtgttcgccggcaccctgaacaccgccctgagaagcctgggcatccccagcagagtgatcaccaacttcaacagcgcccacgacaccgacagaaacctgagcgtggacgtgtactacgaccccatgggcaaccccctggacaagggcagcgacagcgtgtggaacttccacgtgtggaacgagggctggttcgtgagaagcgacctgggccccagctacggcggctggcaggtgctggacgccaccccccaggagagaagccagggcgtgttccagtgcggccccgccagcgtgatcggcgtgagagagggcgacgtgcagctgaacttcgacatgcccttcatcttcgccgaggtgaacgccgacagaatcacctggctgtacgacaacaccaccggcaagcagtggaagaacagcgtgaacagccacaccatcggcagatacatcagcaccaaggccgtgggcagcaacgccagaatggacgtgaccgacaagtacaagtaccccgagggcagcgaccaggagagacaggtgttccagaaggccctgggcaagctgaagcccaacacccccttcgccgccaccagcagcatgggcctggagaccgaggagcaggagcccagcatcatcggcaagctgaaggtggccggcatgctggccgtgggcaaggaggtgaacctggtgctgctgctgaagaacctgagcagagacaccaagaccgtgaccgtgaacatgaccgcctggaccatcatctacaacggcaccctggtgcacgaggtgtggaaggacagcgccaccatgagcctggaccccgaggaggaggccgagcaccccatcaagatcagctacgcccagtacgagaagtacctgaagagcgacaacatgatcagaatcaccgccgtgtgcaaggtgcccgacgagagcgaggtggtggtggagagagacatcatcctggacaaccccaccctgaccctggaggtgctgaacgaggccagagtgagaaagcccgtgaacgtgcagatgctgttcagcaaccccctggacgagcccgtgagagactgcgtgctgatggtggagggcagcggcctgctgctgggcaacctgaagatcgacgtgcccaccctgggccccaaggagggcagcagagtgagattcgacatcctgcccagcagaagcggcaccaagcagctgctggccgacttcagctgcaacaagttccccgccatcaaggccatgctgagcatcgacgtggccgagtag

SEQ ID NO: 136655 - DNA, 1602 bp, Artificial Sequence
  derived and/or modified sequence
atggccgccctgggcgtgcagagcatcaactggcagaccgccttcaacagacaggcccaccacaccgacaagttcagcagccaggagctgatcctgagaagaggccagaacttccaggtgctgatgatcatgaacaagggcctgggcagcaacgagagactggagttcatcgtgagcaccggcccctaccccagcgagagcgccatgaccaaggccgtgttccccctgagcaacggcagcagcggcggctggagcgccgtgctgcaggccagcaacggcaacaccctgaccatcagcatcagcagccccgccagcgcccccatcggcagatacaccatggccctgcagatcttcagccagggcggcatcagcagcgtgaagctgggcaccttcatcctgctgttcaacccctggctgaacgtggacagcgtgttcatgggcaaccacgccgagagagaggagtacgtgcaggaggacgccggcatcatcttcgtgggcagcaccaacagaatcggcatgatcggctggaacttcggccagttcgaggaggacatcctgagcatctgcctgagcatcctggacagaagcctgaacttcagaagagacgccgccaccgacgtggccagcagaaacgaccccaagtacgtgggcagagtgctgagcgccatgatcaacagcaacgacgacaacggcgtgctggccggcaactggagcggcacctacaccggcggcagagaccccagaagctggaacggcagcgtggagatcctgaagaactggaagaagagcggcttcagccccgtgagatacggccagtgctgggtgttcgccggcaccctgaacaccgccctgagaagcctgggcatccccagcagagtgatcaccaacttcaacagcgcccacgacaccgacagaaacctgagcgtggacgtgtactacgaccccatgggcaaccccctggacaagggcagcgacagcgtgtggaacttccacgtgtggaacgagggctggttcgtgagaagcgacctgggccccagctacggcggctggcaggtgctggacgccaccccccaggagagaagccagggcgtgttccagtgcggccccgccagcgtgatcggcgtgagagagggcgacgtgcagctgaacttcgacatgcccttcatcttcgccgaggtgaacgccgacagaatcacctggctgtacgacaacaccaccggcaagcagtggaagaacagcgtgaacagccacaccatcggcagatacatcagcaccaaggccgtgggcagcaacgccagaatggacgtgaccgacaagtacaagtaccccgagggcagcgaccaggagagacaggtgttccagaaggccctgggcaagctgaagcccaacacccccttcgccgccaccagcagcatgggcctggagaccgaggagcaggagcccagcatcatcggcaagctgaaggtggccggcatgctggccgtgggcaaggaggtgaacctggtgctgctgctgatcccccacgccctgcagtgctgcagaatggactggcccctgacccagggcctgagcaagagagacaccggcgagaagctggtgtag

SEQ ID NO: 136656 - DNA, 2082 bp, Artificial Sequence
  derived and/or modified sequence
atggctgctctgggagtgcagtccattaactggcaaaccgcatttaataggcaggcccaccataccgataagttctcttcgcaggagctgatcctgagacgcgggcaaaattttcaggtgctgatgatcatgaacaagggcctgggttccaatgagcggctagagtttattgtcagcaccggcccgtacccctccgagagtgcaatgacgaaagctgtctttccgctgagcaatggctcttctggcgggtggagcgccgttctgcaagcctcaaacgggaataccctgaccatctctatatcatctcccgcgagtgcccccattggcaggtacacaatggcacttcagatcttctcgcaggggggaatcagctccgtaaaactgggtaccttcatactgctttttaacccctggctcaatgtggacagcgtgttcatggggaaccacgctgaacgcgaggagtatgtccaggaggacgctggaatcatcttcgtgggatctacaaatcggattgggatgattgggtggaacttcggacaattcgaggaggacattcttagcatctgtctgtcaatcttggaccgttcacttaacttccgtagagacgctgctaccgacgttgcatcgcgtaacgaccctaagtacgttgggcgggttttgtctgcaatgattaattcaaatgatgacaacggggtcctcgctggcaattggagcgggacgtacaccgggggacgcgatccacggtcctggaatggtagcgtggaaatactgaagaattggaaaaaatcagggttttcaccggtaagatatggccagtgctgggttttcgcaggaaccctaaacacagccctgcgctccctcggaatcccctcccgggtgatcactaactttaactctgctcacgacacagatagaaacttgtcagtggatgtctattatgacccgatgggtaaccccctggataaaggcagcgatagcgtgtggaacttccacgtttggaacgaggggtggtttgtgcggtccgatctgggaccgagttacggcggatggcaggtgctagacgcaaccccacaggaacgcagccaaggcgtgttccagtgcggccccgcctctgtcatcggtgttagggagggagacgtgcagttgaattttgacatgcctttcattttcgctgaggttaacgccgatcgcattacttggctctacgacaacactacaggcaaacagtggaaaaactctgtgaacagccatactataggacgctatatctccacaaaagctgtgggctccaatgcacgcatggacgtaaccgacaaatacaaatacccagaagggagcgaccaagagagacaggtattccagaaggcgctaggaaagcttaagccaaataccccatttgccgctacaagtagcatgggactcgaaacggaagaacaagagccaagcattattgggaagctgaaagtggccggcatgctggctgttgggaaggaagtcaacctggtactactgctgaagaacctctctagggacacaaagaccgtgactgtaaatatgaccgcgtggaccatcatctataacgggacactggtgcatgaggtgtggaaggattccgcgaccatgtctttggacccggaggaggaagccgaacacccaataaaaatcagctatgcccagtatgaaaaatacctcaagtcggataatatgatcaggattacagctgtgtgcaaagtccctgacgagtctgaggtggttgttgaaagagatattatactggacaatcccaccctgactcttgaggtgctgaacgaggctcgcgttagaaagccagtcaacgtacagatgttgttcagcaaccctctggacgagcctgtacgggactgtgtgctaatggtggaaggatcaggccttctcttgggcaatttaaagatcgatgttcccactctgggccccaaggagggctcgagagttcgtttcgatatcctcccctccagaagcggaacgaagcagctgcttgctgacttctcgtgtaataagtttcctgccataaaagccatgctgtccattgatgtcgctgaatag

SEQ ID NO: 136657 - DNA, 1602 bp, Artificial Sequence
  derived and/or modified sequence
atggctgctctcggcgtgcagagtattaactggcaaactgctttcaacaggcaagcacatcatactgacaagtttagttcacaggagttgattctgcgaagggggcagaattttcaagtgctgatgattatgaataaaggcctcggctctaacgagcgcctagaatttattgtctctaccggcccctacccttcagagagcgccatgacaaaggctgtgtttccactgtcgaacggcagctccggtggatggagtgccgttctgcaggcgagcaatggcaacacactgactatctctatcagcagccctgcctcggcaccgatcggacgttacaccatggctctgcagatcttttctcagggcggtatctcaagtgtaaagttgggcacatttatactgctttttaacccctggttgaatgtggatagtgttttcatgggcaaccacgctgagcgagaggagtacgtgcaggaagacgctggtatcatctttgtgggctcaaccaatcgaattggaatgattgggtggaactttggccagtttgaagaggacatcttgtcaatctgcctgtccattcttgacagatccctgaattttcggcgggatgctgccactgatgtcgccagtcggaatgatcccaagtatgtcggtcgtgtgctgtcagccatgatcaattctaatgacgataatggagtgctggctggaaattggagtggcacatatactggcggccgcgaccccagaagctggaacgggagcgtggaaatcctcaaaaattggaaaaagtccggctttagtcctgtgaggtatggtcagtgttgggtgttcgctggaactctgaacacagccctgcgatccctaggaatcccatcaagagtaataactaactttaattctgcacacgacactgaccgaaacctcagtgtggacgtgtactacgaccccatgggtaatcccttggacaaaggctccgatagcgtatggaatttccatgtgtggaatgaggggtggtttgtccgttccgatctgggaccctcctacggtgggtggcaggtccttgacgccacgcctcaggaacgcagccaaggggtgtttcaatgtggccctgcaagtgtgattggggtgagggaaggagacgtacagcttaatttcgatatgccatttatctttgccgaagttaacgcagacaggataacctggctttacgataatactaccggcaagcaatggaaaaactcggtgaactcacatactattgggcgctacatttcaacgaaagcagtggggagcaacgctagaatggacgtgacagacaagtacaagtatcccgaggggtcagaccaggaaagacaggtgtttcagaaggccctaggcaagttaaaacccaacactccctttgccgccactagctccatgggtctggaaacagaggagcaagagccatctatcatcgggaagttaaaagtggcaggcatgctggcggtcggaaaagaggtgaatctcgtcctcctgcttatcccgcacgcactccagtgctgtcggatggattggcctctcacgcaaggtctgagcaagcgtgatacaggggagaagttagtgtag

SEQ ID NO: 136658 - DNA, 2082 bp, Artificial Sequence
  derived and/or modified sequence
atggccgccctgggcgtgcagagcatcaactggcagacagccttcaaccggcaggcccaccacacagacaagttcagcagccaggagctgatcctgcggcggggccagaacttccaggtgctgatgatcatgaacaagggcctgggcagcaatgaaaggctggagttcatcgtgtccacaggcccctaccccagcgagagcgccatgaccaaggctgtgttccccctgagcaatggcagcagcggcggctggagcgctgtgctgcaggccagcaatggaaacaccctgaccatcagcatcagcagccctgccagcgcccccatcggccgctacaccatggccctgcagatcttcagccagggcggcatcagctctgtgaagctgggcaccttcatcctgctcttcaacccctggctgaatgtggacagcgtcttcatgggcaaccacgccgagcgggaggagtatgtgcaggaggatgctggcatcatctttgtgggcagcaccaacagaattggcatgattggctggaactttggccagtttgaggaggacatcctgagcatctgcctgagcatcctggacaggagcctgaacttcagaagagatgctgccacagatgtggccagcagaaatgaccccaagtatgtgggccgggtgctgagcgccatgatcaacagcaatgatgacaacggggtgctggccggcaactggagcggcacctacacaggaggccgggaccccaggtcctggaatggatctgtggagatcctgaagaactggaagaagagcggcttcagccctgtgcgctatggccagtgctgggtgtttgctggcaccctgaacacagccctgcggagcctgggcatccccagcagggtcatcaccaacttcaacagcgcccatgacacagacaggaacctgtctgtggatgtgtactatgaccccatgggcaaccccctggacaagggcagtgacagcgtgtggaacttccacgtgtggaatgaaggctggtttgtgcggagtgacctgggccccagctatggaggctggcaggtgctggatgccaccccccaggagaggagccagggcgtcttccagtgtggccctgcctctgtgattggagtgcgggagggagatgtgcagctgaactttgacatgcccttcatctttgctgaggtgaatgctgaccgcatcacctggctgtatgacaacaccaccgggaagcagtggaagaacagcgtgaacagccacaccatcggccgctacatcagcaccaaggctgtgggcagcaatgccaggatggatgtgacagacaagtacaagtacccagagggcagtgaccaggagcggcaggtgttccagaaggccctgggcaagctgaagcccaacaccccatttgctgccaccagctccatgggcctggagacagaggagcaggagcccagcatcatcggcaagctgaaggtggccggcatgctggccgtgggcaaggaggtgaacctggtgctgctgctgaagaacctgagccgggacaccaagacagtgacagtgaacatgacagcctggaccatcatctacaacggcaccctggtgcatgaggtgtggaaggacagcgccaccatgagcctggaccctgaggaggaggccgagcaccccatcaagatctcctatgcccagtatgagaagtacctgaagagtgacaacatgatccgcatcacagctgtgtgcaaggtgcctgatgagagcgaggtggtggtggagcgggacatcatcctggacaaccccaccctgaccctggaggtgctgaatgaggcccgggtgaggaagcctgtgaatgtgcagatgctgttcagcaaccccctggatgagcctgtgcgggactgtgtgctgatggtggagggcagcggcctgctgctgggcaacctgaagattgatgtgcccaccctgggccccaaggagggcagccgggtgcgctttgacatcctgcccagccgcagcggcaccaagcagctgctggccgacttcagctgcaacaagtttcctgccatcaaggccatgctgagcattgatgtggccgagtag

SEQ ID NO: 136659 - DNA, 1602 bp, Artificial Sequence
  derived and/or modified sequence
atggccgccctgggcgtgcagagcatcaactggcagacagccttcaaccggcaggcccaccacacagacaagttcagcagccaggagctgatcctgcggcggggccagaacttccaggtgctgatgatcatgaacaagggcctgggcagcaatgaaaggctggagttcatcgtgtccacaggcccctaccccagcgagagcgccatgaccaaggctgtgttccccctgagcaatggcagcagcggcggctggagcgctgtgctgcaggccagcaatggaaacaccctgaccatcagcatcagcagccctgccagcgcccccatcggccgctacaccatggccctgcagatcttcagccagggcggcatcagctctgtgaagctgggcaccttcatcctgctcttcaacccctggctgaatgtggacagcgtcttcatgggcaaccacgccgagcgggaggagtatgtgcaggaggatgctggcatcatctttgtgggcagcaccaacagaattggcatgattggctggaactttggccagtttgaggaggacatcctgagcatctgcctgagcatcctggacaggagcctgaacttcagaagagatgctgccacagatgtggccagcagaaatgaccccaagtatgtgggccgggtgctgagcgccatgatcaacagcaatgatgacaacggggtgctggccggcaactggagcggcacctacacaggaggccgggaccccaggtcctggaatggatctgtggagatcctgaagaactggaagaagagcggcttcagccctgtgcgctatggccagtgctgggtgtttgctggcaccctgaacacagccctgcggagcctgggcatccccagcagggtcatcaccaacttcaacagcgcccatgacacagacaggaacctgtctgtggatgtgtactatgaccccatgggcaaccccctggacaagggcagtgacagcgtgtggaacttccacgtgtggaatgaaggctggtttgtgcggagtgacctgggccccagctatggaggctggcaggtgctggatgccaccccccaggagaggagccagggcgtcttccagtgtggccctgcctctgtgattggagtgcgggagggagatgtgcagctgaactttgacatgcccttcatctttgctgaggtgaatgctgaccgcatcacctggctgtatgacaacaccaccgggaagcagtggaagaacagcgtgaacagccacaccatcggccgctacatcagcaccaaggctgtgggcagcaatgccaggatggatgtgacagacaagtacaagtacccagagggcagtgaccaggagcggcaggtgttccagaaggccctgggcaagctgaagcccaacaccccatttgctgccaccagctccatgggcctggagacagaggagcaggagcccagcatcatcggcaagctgaaggtggccggcatgctggccgtgggcaaggaggtgaacctggtgctgctgctgatcccccacgccctgcagtgctgcaggatggactggcccctgacccagggcctgagcaagagggacaccggggagaagctggtgtag

SEQ ID NO: 136660 - DNA, 2082 bp, Artificial Sequence
  derived and/or modified sequence
atggccgccctgggcgtgcagagcatcaactggcagaccgccttcaatcggcaagcccatcacaccgacaagttctctagccaggagcttattcttaggcgaggccaaaatttccaagtactgatgataatgaataaaggtttgggcagcaacgagcgtctggaatttattgtgtctacaggtccttatccctccgaatctgccatgacaaaggcggttttcccgctctctaatggctcttcgggcgggtggagcgcagtgctccaggctagcaacggaaatactctgaccatttccattagttccccagcctctgcccccatcggaagatataccatggcgctgcagattttcagtcaaggcgggattagctcggtcaagctaggcacctttattcttttgtttaacccgtggttaaatgtcgactccgtcttcatgggcaaccatgctgaacgagaggagtatgtccaggaagacgctggcataattttcgtaggtagcaccaatagaattggaatgatcgggtggaacttcggccagtttgaggaagatattctctcaatatgcctgtccatcttggacaggtccctgaatttccggcgcgacgctgcaacagacgtcgcctcccggaatgatccaaaatacgtcgggagagtgctgtctgccatgattaatagcaatgacgacaacggagtgcttgccggaaactggagcgggacctacaccgggggcagagatcccagatcatggaacggaagcgtggagatcctgaaaaactggaaaaaaagcggtttctctcctgtccggtacgggcagtgctgggtgttcgcggggaccctcaacactgcacttagatccttaggcattcctagtcgggtcattaccaactttaatagcgctcatgacaccgaccggaatctctccgtagacgtgtattacgatcctatggggaaccctctggacaaaggtagcgacagtgtgtggaactttcatgtgtggaatgagggttggttcgtacggagcgatctgggcccgagctatggagggtggcaggtgcttgatgccactccgcaggaacggtcccagggagtgttccagtgtgggccagcttctgttattggcgtgagagagggcgacgtgcagctgaattttgatatgccattcattttcgccgaggtcaacgctgatcggattacatggctttacgataacactaccggcaagcagtggaagaactccgtgaattcccacactatagggcggtacatatccaccaaagccgtaggctccaacgcacggatggatgtaacagacaagtacaaatatcctgaaggctccgaccaagaacgacaggtgtttcagaaggcacttggtaaactgaaacctaatacgccttttgctgccaccagtagcatgggcctggaaacagaagagcaggagccctctattatcgggaaactaaaagtggccgggatgctcgcagtgggtaaggaggtaaacttggtactcctgctcaagaatctatccagggacacaaagacggtgaccgtaaacatgactgcatggacaattatttacaacgggacactggtgcatgaagtctggaaggattccgctacaatgtcactggatccggaggaagaagccgagcaccccatcaagattagctatgcccagtacgagaaatacctgaaaagtgataacatgatcagaattaccgccgtatgcaaagtgcctgacgaatctgaagtcgttgtcgaacgagacattattttagataacccaacgctcaccctggaggtgctgaacgaggctcgcgtgcggaagcccgtgaatgtgcagatgttgttttccaacccactggacgaaccagttcgagactgcgtgctaatggtggaggggagcggcttgctcctggggaacctgaagatcgatgtgccaactctcggacccaaggagggcagtagggtccgcttcgatattcttccctctaggtctggcaccaaacagctgttagcagatttctcctgcaacaaattccctgcaattaaggccatgctatcaatcgacgtcgcagagtag

SEQ ID NO: 136661 - DNA, 1602 bp, Artificial Sequence
  derived and/or modified sequence
atggccgccctgggcgtgcagagcatcaactggcagaccgccttcaaccgccaggcgcaccatactgataaattttcttcccaggaactcatactcagacgtggccagaattttcaagtgctgatgatcatgaataaagggctgggctccaatgaacgcctcgaattcatcgtaagcacgggaccctatccctccgaatcagctatgacaaaagcagtgtttcctctgtccaatggttcttccgggggatggagcgccgtattgcaggccagtaacggtaataccctgacaatatcaatcagcagcccagcgtccgccccaattggccgctacactatggcattgcagatattctcacaaggagggatctcgtctgtgaaactgggcactttcatactgctttttaatccttggttaaacgtggacagtgtctttatggggaaccatgcagagagggaagagtatgttcaggaagatgcaggcatcatctttgtcggtagcaccaaccggattggcatgatagggtggaatttcgggcaattcgaagaggacattctgagtatttgtctctcaatcctcgataggtctctgaatttccgtcgcgacgccgccaccgacgtcgcctcaaggaacgatccaaaatacgtgggccgagtcctctccgctatgatcaatagcaacgacgataatggcgtgctggctggcaattggtccgggacctacacaggagggagagacccccgcagctggaatggctccgtcgagatactgaagaattggaaaaagagtggattttcacccgtaaggtacgggcagtgttgggtgttcgctggcacccttaataccgccttacgctccctcggcatccctagtcgagtcattactaactttaactctgcccatgacaccgaccgcaatcttagcgtggacgtgtactacgatccgatgggcaatcccctggataaagggagcgattctgtgtggaacttccatgtgtggaacgagggatggtttgtacgctcggatctggggcccagctacggcgggtggcaggtgttagacgctacccctcaggagagatcccagggcgtatttcagtgtggccctgcatccgtgattggagtaagagaaggggacgtccagctcaatttcgatatgcccttcatcttcgccgaggtgaacgcagatagaattacttggctgtacgataatacaaccggcaaacagtggaagaattccgtgaacagccataccatcgggagatatatttcgaccaaggcagttgggtctaacgcccgcatggatgttactgataagtataagtacccagaggggagcgaccaagagcggcaggtgtttcagaaggcactagggaaattgaagcctaatacccctttcgctgctacttcttccatggggctcgagaccgaagagcaagagccctctataatcggcaaactcaaggtcgccggaatgttggccgtcgggaaagaagtgaatttggtgctgctactgattccccatgccttgcagtgctgtcgaatggactggcccctcacacaagggctcagcaagcgggacactggggagaagctggtttag

SEQ ID NO: 136662 - DNA, 2082 bp, Artificial Sequence
  derived and/or modified sequence
atggcggctctgggagttcagagtatcaactggcagaccgccttcaaccgccaagcacaccatactgataaattcagctcccaagagttaatcttacgcagaggacagaacttccaggtgctcatgataatgaataagggcctcggaagcaacgagagacttgagttcatcgtctcaaccggaccatacccgtcggaaagcgcgatgactaaagcagtcttcccactgtccaatggctccagcggaggttggagcgctgtactgcaggcttccaatggaaatacactgaccatcagcatctcttcgcctgcctcagcacccatcggtcgctataccatggcgctacaaattttttctcagggtggtataagctccgtcaagctgggcacattcattcttctcttcaatccatggctgaacgttgacagtgtttttatgggcaatcacgctgagagggaagagtacgtgcaggaggatgccggtatcatttttgtgggcagcactaaccgtattgggatgattggatggaacttcggacaattcgaggaagatatattgtctatttgccttagcattttggacaggagcctcaacttccgcagggacgcagctacggacgtcgccagcagaaatgatcccaagtatgtcggaagagtgctgtccgctatgattaacagtaatgatgataatggcgtgctcgcaggcaactggagcggcacctacacaggtgggagggacccgaggtcttggaatggtagtgtggagatcttgaagaactggaagaaatcaggcttcagccctgtgaggtacggccagtgctgggtgtttgcgggaacgctgaatacggcactgcgcagcttagggatcccgagtagagtgatcacgaacttcaacagcgctcatgatacagaccgcaatttgtcggtagacgtgtactacgaccctatgggtaacccgctggacaagggtagcgactctgtgtggaacttccatgtctggaacgaaggctggtttgtgcgctccgacctgggcccatcttatgggggatggcaggtgcttgatgccacgccacaggagcgctcccaaggagtgttccaatgcggtcccgcttccgttattggtgtgcgcgagggtgatgttcagttaaacttcgatatgccattcatattcgccgaggtgaatgccgatcggataacatggctctacgataatactactgggaaacagtggaaaaactcagtgaacagccatactatcggcaggtacatttcaaccaaggccgtcgggagtaatgcacgcatggacgtgactgataaatataagtacccggagggctcggaccaggagagacaggtgtttcaaaaggctctgggtaagttgaagcctaatactccatttgctgccaccagttctatgggcctggagacggaggaacaggaaccctcaatcattggcaagttaaaggtggctggcatgctggcagtgggcaaagaggtgaacctagtattgctgctaaaaaacctgtcacgggacaccaagaccgtgacagttaacatgaccgcctggaccattatatacaacggcaccctggtgcacgaggtttggaaggactctgcaaccatgtcccttgaccccgaagaagaggcagaacacccaattaaaattagttatgctcagtacgagaaatacctcaaaagcgacaatatgatccgtattaccgccgtttgcaaagtgcccgatgagagtgaagtcgttgtggagagggatatcattctggacaatccaacactgacgctcgaggtgttgaacgaggctcgtgtacggaagcccgtgaatgtgcagatgctgttcagtaatcctttagacgagccagtccgcgactgcgtgctgatggtcgagggcagtgggctgctcctcggcaaccttaaaatcgacgtgccgactttaggtcccaaggagggatctcgggtgagatttgacatcctgccctcacgatccggaaccaagcagcttcttgcagatttcagctgtaacaagtttccggcaatcaaagccatgctctcgatcgatgtggcagaatag

SEQ ID NO: 136663 - DNA, 1602 bp, Artificial Sequence
  derived and/or modified sequence
atggcagcgcttggggtgcagtccataaactggcagactgcattcaataggcaggctcaccacacagacaagttcagcagccaggagctgatcctgcggagggggcagaattttcaggtgctgatgatcatgaacaaggggctgggctcaaacgagcggctagagtttatcgtaagcacaggcccttacccatccgagtctgccatgacaaaggccgtctttccattatctaacggatcttctggcggttggtctgccgtgctgcaggcaagcaatgggaatacactgaccatttctatatcgtcacccgcttcagcccctatcggccgttataccatggccctgcagatcttcagccagggagggatctctagcgtcaagctggggacctttatcctgctcttcaatccttggctgaatgtggattctgtattcatgggcaaccatgctgagagagaagagtatgtacaggaggatgccggaataattttcgtgggaagtaccaatcggatagggatgatcggatggaatttcgggcagttcgaagaggatatcttgtcaatatgcttgagcatactggaccgctcgctgaattttcggagagatgccgctaccgacgttgcttcccgtaacgaccctaaatacgtagggcgagtgctgtcggcaatgatcaactcaaacgatgacaacggcgtcctcgctggcaactggtcaggcacatatactggcggtcgcgacccaagatcttggaacgggagcgtggagattctgaaaaactggaaaaagtccggttttagcccagtgagatacggtcagtgctgggtattcgctgggactctgaataccgcattgcgctctctgggcatcccctcaagggtgatcactaatttcaactcagcgcatgacaccgaccggaatctctctgtggacgtgtactacgatcccatggggaatcccttggataagggaagcgatagtgtgtggaacttccacgtttggaacgagggatggtttgtgagatccgacctaggcccttcctacggaggatggcaggtgcttgatgccaccccccaggagcgaagccagggcgtatttcagtgtggccctgccagtgtgattggcgttagggaaggcgacgtacagctgaactttgacatgccttttattttcgctgaggttaatgccgaccgcatcacctggctgtacgataacactacaggaaagcagtggaagaactctgtcaattcccacaccatagggagatacataagcaccaaagccgttggatccaacgccaggatggacgtcacagacaagtataagtatccggaaggcagtgaccaggaaagacaggtgtttcagaaggctcttggtaaactgaagccaaacacacccttcgccgcaacctcatccatgggcctggagacagaagaacaggaaccctctatcattggaaagttgaaggtggccggaatgcttgccgtggggaaagaggtgaatctggtgctccttctgataccccacgccctccagtgttgtcgtatggactggcctctaacccagggactgtcgaagcgcgacacaggtgaaaaactggtctag

SEQ ID NO: 136664 - DNA, 2642 bp, Artificial Sequence
  derived and/or modified sequence
gtctgtcagcactgtccgtgccattcccagaggagcctgagaagaggcagaggaaggcgaaacatggctgctctaggagtccagagtatcaactggcagacggccttcaaccgacaagcgcatcacacagacaagttctccagccaggagctcatcttgcggagaggccaaaacttccaggtcttaatgatcatgaacaaaggccttggctctaacgaaagactggagttcattgtctccacagggccttacccctcagagtcggccatgacgaaggctgtgtttccactctccaatggcagtagtggtggctggagtgcggtgcttcaggccagcaatggcaatactctgactatcagcatctccagtcctgccagcgcacccataggacggtacacaatggccctccagatcttctcccagggcggcatctcctctgtgaaacttgggacgttcatactgctttttaacccctggctgaatgtggatagcgtctttatgggtaaccacgctgagagagaagagtatgttcaggaagatgccggcatcatctttgtgggaagcacaaaccgaattggcatgattggctggaactttggacagtttgaagaagacattctcagcatctgcctctcaatcttggataggagtctgaatttccgccgtgacgctgctactgatgtggccagcagaaatgaccccaaatacgttggccgggtgctgagtgccatgatcaatagcaatgatgacaatggtgtgcttgctgggaattggagcggcacttacaccggtggccgggacccaaggagctggaacggcagcgtggagatcctcaaaaattggaaaaaatctggcttcagcccagtccgatatggccagtgctgggtctttgctgggaccctcaacacagcgctgcggtctttggggattccttcccgggtgatcaccaacttcaactcagctcatgacacagaccgaaatctcagtgtggatgtgtactacgaccccatgggaaaccccctggacaagggtagtgatagcgtatggaatttccatgtctggaatgaaggctggtttgtgaggtctgacctgggcccctcgtacggtggatggcaggtgttggatgctaccccgcaggaaagaagccaaggggtgttccagtgcggccccgcttcggtcattggtgttcgagagggtgatgtgcagctgaacttcgacatgccctttatcttcgcggaggttaatgccgaccgcatcacctggctgtacgacaacaccactggcaaacagtggaagaattccgtgaacagtcacaccattggcaggtacatcagcaccaaggcggtgggcagcaatgctcgcatggacgtcacggacaagtacaagtacccagaaggctctgaccaggaaagacaagtgttccaaaaggctttggggaaacttaaacccaacacgccatttgccgcgacgtcttcaatgggtttggaaacagaggaacaggagcccagcatcatcgggaagctgaaggtcgctggcatgctggcagtaggcaaagaagtcaacctggtcctactgctcaaaaacctgagcagggatacgaagacagtgacagtgaacatgacagcctggaccatcatctacaacggcacgcttgtacatgaagtgtggaaggactctgccacaatgtccctggaccctgaggaagaggcagaacatcccataaagatctcgtacgctcagtatgagaagtacctgaagtcagacaacatgatccggatcacagcggtgtgcaaggtcccagatgagtctgaggtggtggtggagcgggacatcatcctggacaaccccaccttgaccctggaggtgctgaacgaggctcgtgtgcggaagcctgtgaacgtgcagatgctcttctccaatccactggatgagccggtgagggactgcgtgctgatggtggagggaagcggcctgctgttgggtaacctgaagatcgacgtgccgaccctagggcccaaggaggggtcccgggtccgttttgatatcctgccctcccggagtggcaccaagcaactgctcgccgacttctcctgcaacaagttccctgcaatcaaggccatgttgtccatcgatgtagccgaatgaagggcgctggtggcctcccgtacaaacttggacaacacggagcagggagagctcaccatggaatgaaccccccgcccatgctgtccggcctgggaaaccctctccatctcccaaggctgccagacatggacctccaggctccagcacatccccctctcctctcccccaggttggggctgggtccaccctgtcctatgacttgatcacttttgcacattccctggccgcttctccccagagctgcctgctctgtgagccccacagccctgctcattcctcacgcccttcaatgctgcaggatggactggcccctgacccagggactctccaaacgggatacaggagagaagctggtctagactgtttgctgatccccaacctgcacggggcattcctgcttctctctcaggccaccacagagggcaggggatggttagtcacctgccccagcactcacaccctaactcaaaataaatgttaaataagtgcgatcacac

SEQ ID NO: 136665 - DNA, 1796 bp, Artificial Sequence
  derived and/or modified sequence
gtctgtcagcactgtccgtgccattcccagaggagcctgagaagaggcagaggaaggcgaaacatggctgctctaggagtccagagtatcaactggcagacggccttcaaccgacaagcgcatcacacagacaagttctccagccaggagctcatcttgcggagaggccaaaacttccaggtcttaatgatcatgaacaaaggccttggctctaacgaaagactggagttcattgtctccacagggccttacccctcagagtcggccatgacgaaggctgtgtttccactctccaatggcagtagtggtggctggagtgcggtgcttcaggccagcaatggcaatactctgactatcagcatctccagtcctgccagcgcacccataggacggtacacaatggccctccagatcttctcccagggcggcatctcctctgtgaaacttgggacgttcatactgctttttaacccctggctgaatgtggatagcgtctttatgggtaaccacgctgagagagaagagtatgttcaggaagatgccggcatcatctttgtgggaagcacaaaccgaattggcatgattggctggaactttggacagtttgaagaagacattctcagcatctgcctctcaatcttggataggagtctgaatttccgccgtgacgctgctactgatgtggccagcagaaatgaccccaaatacgttggccgggtgctgagtgccatgatcaatagcaatgatgacaatggtgtgcttgctgggaattggagcggcacttacaccggtggccgggacccaaggagctggaacggcagcgtggagatcctcaaaaattggaaaaaatctggcttcagcccagtccgatatggccagtgctgggtctttgctgggaccctcaacacagcgctgcggtctttggggattccttcccgggtgatcaccaacttcaactcagctcatgacacagaccgaaatctcagtgtggatgtgtactacgaccccatgggaaaccccctggacaagggtagtgatagcgtatggaatttccatgtctggaatgaaggctggtttgtgaggtctgacctgggcccctcgtacggtggatggcaggtgttggatgctaccccgcaggaaagaagccaaggggtgttccagtgcggccccgcttcggtcattggtgttcgagagggtgatgtgcagctgaacttcgacatgccctttatcttcgcggaggttaatgccgaccgcatcacctggctgtacgacaacaccactggcaaacagtggaagaattccgtgaacagtcacaccattggcaggtacatcagcaccaaggcggtgggcagcaatgctcgcatggacgtcacggacaagtacaagtacccagaaggctctgaccaggaaagacaagtgttccaaaaggctttggggaaacttaaacccaacacgccatttgccgcgacgtcttcaatgggtttggaaacagaggaacaggagcccagcatcatcgggaagctgaaggtcgctggcatgctggcagtaggcaaagaagtcaacctggtcctactgctcattcctcacgcccttcaatgctgcaggatggactggcccctgacccagggactctccaaacgggatacaggagagaagctggtctagactgtttgctgatccccaacctgcacggggcattcctgcttctctctcaggccaccacagagggcaggggatggttagtcacctgccccagcactcacaccctaactcaaaataaatgttaaataagtgcg

SEQ ID NO: 136666 - protein, 1170 aa, Artificial Sequence
  derived and/or modified sequence
MGLAWGLGVLFLMHVCGTNRIPESGGDNSVFDIFELTGAARKGSGRRLVKGPDPSSPAFRIEDANLIPPVPDDKFQDLVDAVRAEKGFLLLASLRQMKKTRGTLLALERKDHSGQVFSVVSNGKAGTLDLSLTVQGKQHVVSVEEALLATGQWKSITLFVQEDRAQLYIDCEKMENAELDVPIQSVFTRDLASIARLRIAKGGVNDNFQGVLQNVRFVFGTTPEDILRNKGCSSSTSVLLTLDNNVVNGSSPAIRTNYIGHKTKDLQAICGISCDELSSMVLELRGLRTIVTTLQDSIRKVTEENKELANELRRPPLCYHNGVQYRNNEEWTVDSCTECHCQNSVTICKKVSCPIMPCSNATVPDGECCPRCWPSDSADDGWSPWSEWTSCSTSCGNGIQQRGRSCDSLNNRCEGSSVQTRTCHIQECDKRFKQDGGWSHWSPWSSCSVTCGDGVITRIRLCNSPSPQMNGKPCEGEARETKACKKDACPINGGWGPWSPWDICSVTCGGGVQKRSRLCNNPTPQFGGKDCVGDVTENQICNKQDCPIDGCLSNPCFAGVKCTSYPDGSWKCGACPPGYSGNGIQCTDVDECKEVPDACFNHNGEHRCENTDPGYNCLPCPPRFTGSQPFGQGVEHATANKQVCKPRNPCTDGTHDCNKNAKCNYLGHYSDPMYRCECKPGYAGNGIICGEDTDLDGWPNENLVCVANATYHCKKDNCPNLPNSGQEDYDKDGIGDACDDDDDNDKIPDDRDNCPFHYNPAQYDYDRDDVGDRCDNCPYNHNPDQADTDNNGEGDACAADIDGDGILNERDNCQYVYNVDQRDTDMDGVGDQCDNCPLEHNPDQLDSDSDRIGDTCDNNQDIDEDGHQNNLDNCPYVPNANQADHDKDGKGDACDHDDDNDGIPDDKDNCRLVPNPDQKDSDGDGRGDACKDDFDHDSVPDIDDICPENVDISETDFRRFQMIPLDPKGTSQNDPNWVVRHQGKELVQTVNCDPGLAVGYDEFNAVDFSGTFFINTERDDDYAGFVFGYQSSSRFYVVMWKQVTQSYWDTNPTRAQGYSGLSVKVVNSTTGPGEHLRNALWHTGNTPGQVRTLWHDPRHIGWKDFTAYRWRLSHRPKTGFIRVVMYEGKKIMADSGPIYDKTYAGGRLGLFVFSQEMVFFSDLKYECRDP

SEQ ID NO: 136667 - DNA, 3513 bp, Artificial Sequence
  derived and/or modified sequence
atgggcctggcctggggcctgggcgtgctgttcctgatgcacgtgtgcggcaccaacagaatccccgagagcggcggcgacaacagcgtgttcgacatcttcgagctgaccggcgccgccagaaagggcagcggcagaagactggtgaagggccccgaccccagcagccccgccttcagaatcgaggacgccaacctgatcccccccgtgcccgacgacaagttccaggacctggtggacgccgtgagagccgagaagggcttcctgctgctggccagcctgagacagatgaagaagaccagaggcaccctgctggccctggagagaaaggaccacagcggccaggtgttcagcgtggtgagcaacggcaaggccggcaccctggacctgagcctgaccgtgcagggcaagcagcacgtggtgagcgtggaggaggccctgctggccaccggccagtggaagagcatcaccctgttcgtgcaggaggacagagcccagctgtacatcgactgcgagaagatggagaacgccgagctggacgtgcccatccagagcgtgttcaccagagacctggccagcatcgccagactgagaatcgccaagggcggcgtgaacgacaacttccagggcgtgctgcagaacgtgagattcgtgttcggcaccacccccgaggacatcctgagaaacaagggctgcagcagcagcaccagcgtgctgctgaccctggacaacaacgtggtgaacggcagcagccccgccatcagaaccaactacatcggccacaagaccaaggacctgcaggccatctgcggcatcagctgcgacgagctgagcagcatggtgctggagctgagaggcctgagaaccatcgtgaccaccctgcaggacagcatcagaaaggtgaccgaggagaacaaggagctggccaacgagctgagaagaccccccctgtgctaccacaacggcgtgcagtacagaaacaacgaggagtggaccgtggacagctgcaccgagtgccactgccagaacagcgtgaccatctgcaagaaggtgagctgccccatcatgccctgcagcaacgccaccgtgcccgacggcgagtgctgccccagatgctggcccagcgacagcgccgacgacggctggagcccctggagcgagtggaccagctgcagcaccagctgcggcaacggcatccagcagagaggcagaagctgcgacagcctgaacaacagatgcgagggcagcagcgtgcagaccagaacctgccacatccaggagtgcgacaagagattcaagcaggacggcggctggagccactggagcccctggagcagctgcagcgtgacctgcggcgacggcgtgatcaccagaatcagactgtgcaacagccccagcccccagatgaacggcaagccctgcgagggcgaggccagagagaccaaggcctgcaagaaggacgcctgccccatcaacggcggctggggcccctggagcccctgggacatctgcagcgtgacctgcggcggcggcgtgcagaagagaagcagactgtgcaacaaccccaccccccagttcggcggcaaggactgcgtgggcgacgtgaccgagaaccagatctgcaacaagcaggactgccccatcgacggctgcctgagcaacccctgcttcgccggcgtgaagtgcaccagctaccccgacggcagctggaagtgcggcgcctgcccccccggctacagcggcaacggcatccagtgcaccgacgtggacgagtgcaaggaggtgcccgacgcctgcttcaaccacaacggcgagcacagatgcgagaacaccgaccccggctacaactgcctgccctgcccccccagattcaccggcagccagcccttcggccagggcgtggagcacgccaccgccaacaagcaggtgtgcaagcccagaaacccctgcaccgacggcacccacgactgcaacaagaacgccaagtgcaactacctgggccactacagcgaccccatgtacagatgcgagtgcaagcccggctacgccggcaacggcatcatctgcggcgaggacaccgacctggacggctggcccaacgagaacctggtgtgcgtggccaacgccacctaccactgcaagaaggacaactgccccaacctgcccaacagcggccaggaggactacgacaaggacggcatcggcgacgcctgcgacgacgacgacgacaacgacaagatccccgacgacagagacaactgccccttccactacaaccccgcccagtacgactacgacagagacgacgtgggcgacagatgcgacaactgcccctacaaccacaaccccgaccaggccgacaccgacaacaacggcgagggcgacgcctgcgccgccgacatcgacggcgacggcatcctgaacgagagagacaactgccagtacgtgtacaacgtggaccagagagacaccgacatggacggcgtgggcgaccagtgcgacaactgccccctggagcacaaccccgaccagctggacagcgacagcgacagaatcggcgacacctgcgacaacaaccaggacatcgacgaggacggccaccagaacaacctggacaactgcccctacgtgcccaacgccaaccaggccgaccacgacaaggacggcaagggcgacgcctgcgaccacgacgacgacaacgacggcatccccgacgacaaggacaactgcagactggtgcccaaccccgaccagaaggacagcgacggcgacggcagaggcgacgcctgcaaggacgacttcgaccacgacagcgtgcccgacatcgacgacatctgccccgagaacgtggacatcagcgagaccgacttcagaagattccagatgatccccctggaccccaagggcaccagccagaacgaccccaactgggtggtgagacaccagggcaaggagctggtgcagaccgtgaactgcgaccccggcctggccgtgggctacgacgagttcaacgccgtggacttcagcggcaccttcttcatcaacaccgagagagacgacgactacgccggcttcgtgttcggctaccagagcagcagcagattctacgtggtgatgtggaagcaggtgacccagagctactgggacaccaaccccaccagagcccagggctacagcggcctgagcgtgaaggtggtgaacagcaccaccggccccggcgagcacctgagaaacgccctgtggcacaccggcaacacccccggccaggtgagaaccctgtggcacgaccccagacacatcggctggaaggacttcaccgcctacagatggagactgagccacagacccaagaccggcttcatcagagtggtgatgtacgagggcaagaagatcatggccgacagcggccccatctacgacaagacctacgccggcggcagactgggcctgttcgtgttcagccaggagatggtgttcttcagcgacctgaagtacgagtgcagagacccctag

SEQ ID NO: 136668 - DNA, 3513 bp, Artificial Sequence
  derived and/or modified sequence
atgggcctggcatggggtctgggagtgctgtttttaatgcacgtttgtggaactaataggatccccgaatccggcggggacaacagcgtgtttgatatcttcgaattaacgggcgcagcgagaaaggggagtggaagacggctggtgaaagggcccgacccttcctctcccgcgttcagaatcgaagacgccaacctgatccccccagtgcctgacgacaaatttcaggacctcgttgatgctgtccgcgcggaaaaaggctttctcctgctcgctagtctgaggcagatgaaaaagacaaggggaacgctgctagcactggaaagaaaagaccactcaggccaggtattctccgtggtctcaaacgggaaggctgggacattggaccttagcctgacagtgcaggggaaacagcatgttgtttcagtcgaggaggctctgctagctacgggacagtggaagtcgatcactctgttcgtgcaggaagatagagcgcagctgtacatcgactgcgagaagatggaaaatgctgaacttgacgtgccaatccagagcgtgtttacacgggacctcgcgtctatcgctagattgcggattgctaaaggcggagttaacgataattttcagggagttttgcagaacgttagatttgtgttcggcacaacacccgaagatatccttaggaacaaaggttgctctagcagtaccagcgtgcttttaacactggataataacgtggtaaacgggtcttcccctgccattaggacgaattacataggccacaagacaaaagacctccaggccatttgtggcatctcttgtgacgagctctcgagcatggtcctggagttacgcgggttgcgtaccatcgtgacaaccttgcaagatagcataagaaaagtgactgaagaaaataaggaactcgcaaatgaactacgcagaccccctttatgctatcataacggagtccagtaccgcaataatgaagagtggaccgttgacagctgcacggagtgtcattgccagaactccgtcaccatatgcaagaaagtgagctgcccgatcatgccgtgctcaaatgctactgttcccgacggggaatgctgccctagatgttggccctccgacagcgcagatgacggctggtctccatggtccgagtggactagctgttcaacatcctgcggcaacggcatacagcagcgcggaagatcatgcgattctctgaataataggtgcgagggcagcagcgtccagacacgtacatgtcacattcaggagtgtgataaaagattcaagcaggacggtggatggtcacactggagcccgtggtcttcctgctccgtaacgtgcggagatggagtgatcacccgcattcgcctgtgtaacagcccctctccacagatgaacggaaagccttgtgagggggaagcacgggagactaaagcttgtaaaaaagacgcctgtcctattaacggggggtggggtccctggtccccctgggacatttgctccgttacctgcggcggcggcgtgcagaaacgctcaagactatgcaataacccaacgccccagtttggtgggaaagattgcgtgggtgacgtgacggaaaaccaaatctgtaataagcaggactgcccaatcgacggctgccttagcaatccctgcttcgcaggtgtgaagtgtacctcataccccgatgggagctggaaatgtggggcatgcccccctggatactcgggcaacgggatacaatgtaccgacgtcgacgaatgcaaagaagtgcctgacgcatgttttaatcacaacggagagcaccgttgcgaaaacaccgatccagggtataattgtttgccttgtcctccgcgcttcacgggatcacagccctttggacaaggcgtggaacatgctaccgctaacaaacaagtttgcaagccgcgaaacccgtgcaccgatggcacccacgactgcaataagaacgccaagtgcaactatcttggtcattactcagaccccatgtaccggtgcgaatgtaagccaggatatgccggtaatggcattatctgcggtgaagacacagacttggatggatggcctaatgaaaatctcgtctgtgtcgctaacgcgacgtaccactgtaagaaggataattgccctaacctacctaattccggccaggaggattatgataaggacggcatcggggacgcatgcgacgatgacgatgataatgataaaattcccgatgatagagacaattgccccttccactacaatcctgctcagtacgactatgaccgggacgatgtcggcgatcggtgtgataattgcccctataatcataatccagatcaggctgacacagataacaacggagaaggcgacgcctgcgccgcagatattgacggggacggtattctcaatgaaagagacaattgccagtacgtgtataatgtcgaccaacgcgataccgacatggacggcgtgggagaccagtgcgataactgccctctcgaacacaatcctgaccagctggattccgattcagatcgtatcggcgatacctgcgataacaatcaagacatagatgaagatgggcaccagaataatctggacaattgtccatatgtgcccaacgctaaccaggcagaccacgataaagacggcaaaggtgacgcttgcgaccacgatgatgacaatgacggaatccccgacgataaagacaactgtcgtttggtccccaatcccgatcagaaagactctgacggagatggaaggggcgatgcgtgtaaggacgattttgatcatgacagcgtgcccgatatcgacgacatttgtcctgagaacgtggatatcagtgaaacagatttccgccggtttcagatgattcccctcgacccaaaagggacatctcagaacgacccaaattgggtcgttaggcaccagggcaaggagcttgtgcagaccgttaactgtgaccccggactggcagtaggttacgacgaattcaacgccgtggatttttctggcacgttctttatcaataccgaacgcgatgatgactacgctggctttgtgtttggctaccagagcagtagccgattttacgtcgtgatgtggaagcaggtgactcagagctactgggacaccaatcctacaagggctcaaggctactcgggactttcagtgaaggtagttaattcaactacaggccctggcgaacacctaagaaatgcattgtggcacacaggcaatacaccaggtcaggtgagaactttgtggcatgacccccggcatattgggtggaaggattttaccgcctacagatggcggctgtcccaccgacccaagaccgggttcatcagagtggtgatgtatgagggaaagaagataatggcagattctggccccatctatgataaaacatatgccggtggcagactgggcctgttcgtgttctctcaggagatggtgttttttagcgacttgaagtacgagtgccgggatccctag

SEQ ID NO: 136669 - DNA, 3513 bp, Artificial Sequence
  derived and/or modified sequence
atgggcctggcctggggcctgggcgtgctcttcctgatgcacgtgtgtggcaccaaccgcatccctgagagcggcggggacaacagcgtgtttgacatctttgagctgactggagctgccaggaagggcagcggccggcggctggtgaagggccctgaccccagcagccctgccttcagaattgaagatgccaacctgatcccccctgtgcctgatgacaagttccaggacctggtggatgctgtgcgggcagagaagggcttcctgctgctggccagcctgcggcagatgaagaagacccggggcaccctgctggccctggagaggaaggaccacagcggccaggtgttttctgtggtgtccaatggcaaggccggcaccctggacctgagcctgactgtgcagggcaagcagcacgtggtgtctgtggaggaggccctgctggccaccggccagtggaagagcatcaccctgtttgtgcaggaggaccgggcccagctgtacatcgactgtgagaagatggagaatgctgagctggatgtgcccatccagagcgtcttcacccgggacctggccagcatcgcccggctgagaattgccaagggcggcgtgaatgacaacttccagggcgtgctgcagaatgtgcgctttgtgtttggcaccaccccagaggacatcctgaggaacaagggctgcagcagcagcacctctgtgctgctgaccctggacaacaacgtggtgaatggcagcagccctgccatccgcaccaactacatcggccacaagaccaaggacctgcaggccatctgtggcatcagctgtgatgagctgagctccatggtgctggagctgcggggcctgcggaccatcgtgaccaccctgcaggacagcatcaggaaggtgacagaggagaacaaggagctggccaatgagctgcggcggccccccctgtgctaccacaatggagtgcagtacagaaataatgaggagtggacagtggacagctgcacagagtgccactgccagaacagcgtgaccatctgcaagaaggtgtcctgccccatcatgccctgcagcaatgccaccgtgcctgatggagagtgctgcccccgctgctggcccagcgacagcgcagatgatggctggagcccctggagcgagtggaccagctgcagcaccagctgtggaaatggcatccagcagaggggccgcagctgtgacagcctgaacaacagatgtgagggcagctctgtgcagaccaggacctgccacatccaggagtgtgacaagcgcttcaagcaggacggcggctggagccactggagcccctggagcagctgcagcgtgacctgtggagatggagtcatcacccgcatccggctgtgcaacagccccagcccccagatgaatggcaagccctgtgagggggaggcccgggagaccaaggcctgcaagaaggatgcctgccccatcaatggaggctggggcccctggagcccctgggacatctgcagcgtgacctgtggcggcggcgtgcagaagaggagccggctgtgcaacaaccccaccccccagtttggaggcaaggactgtgtgggagatgtgacagagaaccagatctgcaacaagcaggactgccccattgatggctgcctgagcaacccctgctttgctggggtgaagtgcaccagctacccagatggctcctggaagtgtggggcctgccccccaggctacagcggaaatggcatccagtgcacagatgtggatgagtgcaaggaggtgcctgatgcctgcttcaaccacaatggagagcaccgctgtgaaaatacagatcctggctacaactgcctgccctgccccccacgcttcaccggcagccagcccttcggccagggcgtggagcacgccacagccaacaagcaggtgtgcaagcccaggaacccctgcacagatggcacccatgactgcaacaagaatgccaagtgcaactacctgggccactacagcgaccccatgtaccgctgtgagtgcaagccaggctatgctggaaatggcatcatctgtggggaggacacagacctggatggctggcccaatgaaaacctggtgtgtgtggccaatgccacctaccactgcaagaaggacaactgccccaacctgcccaacagcggccaggaggactatgacaaggatggcattggagatgcctgtgatgatgatgatgacaatgacaagatcccagatgaccgggacaactgccccttccactacaacccagcccagtatgactatgacagagatgatgtgggggacagatgtgacaactgcccctacaaccacaacccagaccaggccgacacagacaacaatggagaaggagatgcctgtgccgctgacattgatggagatggcatcctgaatgaaagagacaactgccagtatgtgtacaacgtggaccagagggacacagacatggatggagtgggggaccagtgtgacaactgccccctggagcacaacccagaccagctggacagcgacagcgaccgcatcggggacacctgtgacaacaaccaggacattgatgaagatggccaccagaacaacctggacaactgcccctacgtgcccaatgccaaccaggccgaccatgacaaggatggaaaaggagatgcctgtgaccatgatgatgacaatgatggcatcccagatgacaaggacaactgccgcctggtgcccaacccagaccagaaggacagtgatggagatggaagaggagatgcctgcaaggatgactttgaccatgacagcgtgcctgacattgatgacatctgcccagaaaatgtggacatcagcgagacagacttccgccgcttccagatgatccccctggaccccaagggcaccagccagaatgaccccaactgggtggtgcgccaccagggcaaggagctggtgcagacagtgaactgtgaccccggcctggccgtgggctatgatgagttcaatgctgtggacttcagcggcaccttcttcatcaacacagaaagagatgatgattatgccggctttgtgtttggctaccagagcagcagccgcttctacgtggtgatgtggaagcaggtgacccagagctactgggacaccaaccccacccgggcccagggctacagcggcctgtctgtgaaggtggtgaacagcaccaccggccctggagagcacctgagaaatgccctgtggcacactggaaacaccccaggccaggtgaggaccctgtggcatgaccccaggcacatcggctggaaggacttcaccgcctaccgctggaggctgagccaccggcccaagacaggcttcatccgggtggtgatgtatgagggcaagaagatcatggctgacagcggccccatctatgacaagacctacgccggcggccgcctgggcctgtttgtgttcagccaggagatggtgttcttcagtgacctgaagtatgagtgccgggacccctag

SEQ ID NO: 136670 - DNA, 3513 bp, Artificial Sequence
  derived and/or modified sequence
atgggcctggcctggggcctgggcgtgctgttcctgatgcacgtgtgtggaacaaatcggatccccgaatccggcggcgataactcggtgttcgatatcttcgaactgacaggagccgcgcgcaaggggtcgggcagaaggttagtcaaggggcccgacccatctagccccgcgtttcgtatcgaggacgcgaacttgatacctcccgtgcctgatgataaattccaggacctggtggatgcggtcagggcagagaagggcttcctgctattagcatctctgcgccagatgaagaagactcgggggaccttattggcactggaaaggaaggatcacagcgggcaagtgttctctgtggtaagtaacggtaaagctgggactctcgatctgtcactcaccgtccaggggaagcagcacgtcgtttcagtggaagaagcactcctggcaactgggcagtggaagtcaatcacactgttcgtgcaagaagaccgtgcacaattgtacatcgattgtgagaagatggaaaatgcagagctcgatgtgcccatccagtcggtttttactcgggacctggcatcaatcgcacggctccgcatcgccaagggtggagtgaacgataacttccagggggtccttcagaacgtgcggtttgtttttgggaccactcccgaggacatcctcaggaataagggctgctccagctctacctcagtcctgctgaccctggataacaatgttgtgaacggctcctctccagcaattcgtaccaactacatagggcataagaccaaagacctccaggccatatgtggaatttcctgcgacgaactgtctagtatggtgcttgaattgagaggcctcagaaccattgtaacaaccttacaggacagtattaggaaggtgaccgaggaaaacaaagagctagccaatgagctgcgtagaccccccctatgctaccataatggcgtgcagtatcggaacaacgaggaatggacagtggactcatgcacagagtgccattgtcaaaactccgtcaccatttgtaagaaagttagctgccccatcatgccctgctccaacgccacagttccagacggtgaatgctgtccccgatgctggcccagtgactcagcagatgatggatggtccccttggagcgagtggacaagttgctcaactagttgtgggaacgggatccaacagcgcggcaggagctgtgatagtcttaataacaggtgcgagggttcctcagtccagacgcgtacttgccatatacaggaatgcgataagaggttcaaacaagatggaggctggagtcattggtcgccatggtcaagttgcagcgtcacttgtggcgacggagtcatcaccagaatccgcctgtgcaattccccatccccacagatgaacggcaaaccttgcgagggcgaggcccgggagacaaaggcgtgtaagaaggacgcctgtccaatcaacggaggatgggggccctggagcccctgggatatctgttccgtgacatgcggcggaggcgtacaaaagagaagccgcttgtgtaataatcctaccccgcagttcggcggcaaagactgcgttggtgacgtgacagagaatcagatttgtaacaagcaggactgccccattgatggttgcctgtctaacccctgcttcgccggcgtgaaatgtactagttaccccgacggatcatggaaatgtggggcatgcccccccgggtactctggcaacggtatccagtgcactgacgttgacgagtgtaaagaggtcccggacgcctgtttcaaccacaacggggagcatagatgcgagaacacggatcccggctataactgcctgccatgcccaccaaggttcacaggctctcagccatttgggcagggagttgagcatgccacagccaacaaacaagtctgtaaacctagaaacccatgtactgatggaacccatgattgcaacaaaaacgcaaaatgtaactatttgggtcattatagtgatcctatgtaccggtgtgagtgtaaacccgggtatgcaggtaatggaattatttgtggcgaggacacagatctcgacggctggccgaatgagaacttggtttgcgtggccaatgctacgtaccactgtaaaaaagacaattgccccaacctccctaactccgggcaggaggattatgataaagatgggatcggcgacgcatgcgatgatgatgacgataacgacaagatccctgatgacagagataattgtccctttcattacaatccagctcagtacgattacgatcgcgatgatgtcggtgacaggtgtgacaattgtccttacaatcataatcccgatcaggccgacactgataacaatggggagggtgacgcctgcgcagcagatattgacggggacggtatactgaatgagcgcgataactgtcagtacgtctacaatgtggatcagagagacactgacatggacggcgtcggagaccagtgcgacaattgtcccctcgagcataatccagatcaactggacagcgactccgacagaattggggacacgtgtgataacaaccaagatatcgatgaggatgggcatcagaacaacctagacaattgcccttacgtaccaaatgctaaccaggctgaccatgataaagatggaaaaggcgacgcctgcgatcatgacgacgacaacgatggaatccccgacgacaaagataattgcaggctggttccaaacccagaccagaaggattcagacggcgacggcagaggagacgcgtgtaaggacgatttcgatcatgactccgttcctgacatcgacgatatctgtcccgaaaatgtggacatatctgaaacggacttccgccgcttccagatgatcccgctggacccaaaggggacctcccagaatgatcccaattgggtcgtcagacaccaaggtaaagaactggtccagacagtgaattgtgaccctggcctggccgtgggatacgacgagtttaacgctgtggactttagcggcacctttttcattaatacagaacgagatgatgactacgccggcttcgtttttggataccaaagcagtagccgcttttacgtggtgatgtggaagcaggtcacacagtcctactgggatactaacccaacacgggcccaaggatattccggtctgtccgtaaaagtggtgaattcgaccaccggaccaggcgagcacttgagaaatgccctctggcacaccggcaatactcccggtcaggtgcgcacgctgtggcacgatcctcggcacatagggtggaaggacttcacggcttaccggtggcggttatctcatcggcctaagacaggttttattagggttgtgatgtacgagggaaagaagattatggcagattcgggacctatctacgataagacctatgccggtgggcgactgggtctgtttgtcttcagtcaggaaatggtgttcttttcggatctcaaatacgagtgtcgcgacccctag

SEQ ID NO: 136671 - DNA, 3513 bp, Artificial Sequence
  derived and/or modified sequence
atgggcctggcgtgggggctcggtgtattgtttctcatgcacgtctgcggtaccaaccggattcccgagtccggcggagacaactctgtatttgacatatttgagctcaccggggctgcgaggaagggcagtggaaggcgactggtcaagggcccagatcccagttcccctgcgtttagaatcgaggacgctaacctgatcccccctgtccctgatgataaatttcaggacctggtggacgctgtgagagccgagaagggttttttgctgctcgccagcctacggcagatgaagaagaccagaggcacactgctagcgctggagagaaaagaccactctggacaggtgttttctgtggttagcaacgggaaggccggaacactggatctgagtctcaccgttcaaggaaaacagcacgtagttagcgtcgaggaagccctgctggccaccggacagtggaagtctatcacattatttgtgcaggaagaccgggcacagctctacatcgactgcgagaaaatggagaacgctgaactcgatgtcccaatccaatctgtattcacaagagacctggctagtatagccaggttaagaatagcaaagggtggagttaatgataactttcagggcgtactgcaaaacgtgcggttcgtgttcgggacgaccccagaagatattcttaggaataaagggtgcagctcatctacctcagtacttttgacactggataataacgtggtgaacggtagctcccctgctatacgcacaaactacattggtcataagactaaagatctgcaggccatatgtggcatttcttgcgatgagctatcctctatggtcctggagttgaggggactacgcaccattgttaccaccctacaggactccatccggaaagtgacagaggaaaataaagaactggccaatgagctacggaggcccccactgtgctaccacaacggggtccagtaccgcaacaatgaagaatggaccgtcgacagttgcacggagtgtcactgccagaatagtgtgacgatctgcaaaaaagtgagctgccctattatgccatgttccaacgctactgtgcctgacggtgagtgctgccctaggtgttggccgtcagacagcgccgatgacggttggtctccctggtccgagtggactagctgctcgacaagctgtggtaatggtatccagcagaggggccgtagctgtgatagccttaataataggtgcgaggggtcctctgtccagaccaggacatgtcacatccaggagtgcgataaacgatttaaacaggatgggggttggtcacattggtccccatggtcctcttgttctgtaacttgcggcgatggggtgatcaccagaatcagactatgtaactcaccgtccccccagatgaatgggaaaccctgcgagggcgaggcaagggaaacaaaagcctgcaaaaaggacgcctgtcctattaacggtggctggggtccctggagcccctgggatatctgcagtgtgacatgcggagggggtgtgcagaaacgaagccggctatgtaacaatccaacacctcagtttggcggtaaggactgtgtgggcgacgtcactgaaaaccagatctgtaacaagcaggactgtcccattgacggctgtctaagtaacccttgctttgccggtgtaaagtgcacaagttaccccgacggatcatggaagtgcggcgcttgcccgcctgggtatagtggaaatggaatccagtgtacggatgttgacgagtgtaaggaggtgccagacgcatgtttcaatcacaatggcgaacatcgctgtgagaatactgacccaggctacaattgtcttccctgtcctcccagatttaccgggtctcaaccctttgggcaaggcgttgagcacgccaccgccaacaaacaagtgtgcaaacccaggaatccctgcaccgatgggactcatgactgtaataaaaacgcaaaatgcaactacttggggcactacagtgatcctatgtaccgctgtgaatgcaaacccggatatgcaggcaatggaattatttgtggagaggatactgatctcgacggctggcctaacgaaaatttagtgtgcgtcgctaatgccacgtaccattgcaagaaagacaactgtcctaatctacctaactcgggacaggaagattacgataaagacggaatcggcgacgcgtgcgacgacgacgatgataacgacaaaattcccgacgatcgggacaattgtccttttcactacaacccagcacagtacgactacgacagagacgatgtaggagaccggtgtgataactgtccttataatcacaaccccgatcaggcggacaccgataataacggagaaggagatgcttgtgccgctgacattgacggggacggcatcctgaacgaaagggacaactgtcaatacgtctacaacgtggatcagagggacaccgatatggacggggtcggggatcagtgtgataactgcccattggagcacaatcctgatcagctggacagtgactctgaccgcattggcgatacgtgcgacaacaaccaggacattgacgaggacggtcatcagaacaacctagataactgtccttacgttccgaacgctaatcaagcagaccacgacaaggacggtaaaggggatgcctgtgatcatgatgatgataatgatggcatacccgatgacaaggataactgtagactggtgccgaaccccgaccaaaaggattcagatggcgacgggagaggggacgcatgtaaagacgatttcgatcatgacagcgttccagacattgatgacatctgtccggagaatgtcgatatctctgagactgacttccgtagattccagatgattccgctggatccaaaaggtaccagtcagaacgatcccaactgggttgtgagacatcagggcaaagagctggtacaaaccgtcaactgtgaccctgggctggcagtgggctacgatgaattcaatgcagtggatttcagcggcacattcttcatcaatactgagagagatgacgattacgcaggattcgtgtttggctaccagtcatcatccaggttttatgttgttatgtggaagcaggtcactcagtcctattgggacacaaatccgacacgggctcagggatacagcggactgtcagtgaaggtggtcaattctaccaccggcccaggcgagcacctgcggaacgcactgtggcacaccggtaacactcccggacaagttcgcaccctttggcacgatcctaggcatatcggttggaaggactttactgcttaccgctggagactcagccacagacctaagaccgggtttatccgcgttgtcatgtatgaggggaaaaagatcatggcggatagtggtcccatttacgacaaaacttatgcaggcggacgtttgggcttatttgtgttcagccaggaaatggtgtttttttctgacttgaaatatgaatgtcgagatccctag

SEQ ID NO: 136672 - DNA, 7775 bp, Artificial Sequence
  derived and/or modified sequence
agctggcctgcgagttcagggctcctgtcgctctccaggagcaacctctactccggacgcacaggcattccccgcgcccctccagccctcgccgccctcgccaccgctcccggccgccgcgctccggtacacacaggatccctgctgggcaccaacagctccaccatggggctggcctggggactaggcgtcctgttcctgatgcatgtgtgtggcaccaaccgcattccagagtctggcggagacaacagcgtgtttgacatctttgaactcaccggggccgcccgcaaggggtctgggcgccgactggtgaagggccccgacccttccagcccagctttccgcatcgaggatgccaacctgatcccccctgtgcctgatgacaagttccaagacctggtggatgctgtgcgggcagaaaagggtttcctccttctggcatccctgaggcagatgaagaagacccggggcacgctgctggccctggagcggaaagaccactctggccaggtcttcagcgtggtgtccaatggcaaggcgggcaccctggacctcagcctgaccgtccaaggaaagcagcacgtggtgtctgtggaagaagctctcctggcaaccggccagtggaagagcatcaccctgtttgtgcaggaagacagggcccagctgtacatcgactgtgaaaagatggagaatgctgagttggacgtccccatccaaagcgtcttcaccagagacctggccagcatcgccagactccgcatcgcaaaggggggcgtcaatgacaatttccagggggtgctgcagaatgtgaggtttgtctttggaaccacaccagaagacatcctcaggaacaaaggctgctccagctctaccagtgtcctcctcacccttgacaacaacgtggtgaatggttccagccctgccatccgcactaactacattggccacaagacaaaggacttgcaagccatctgcggcatctcctgtgatgagctgtccagcatggtcctggaactcaggggcctgcgcaccattgtgaccacgctgcaggacagcatccgcaaagtgactgaagagaacaaagagttggccaatgagctgaggcggcctcccctatgctatcacaacggagttcagtacagaaataacgaggaatggactgttgatagctgcactgagtgtcactgtcagaactcagttaccatctgcaaaaaggtgtcctgccccatcatgccctgctccaatgccacagttcctgatggagaatgctgtcctcgctgttggcccagcgactctgcggacgatggctggtctccatggtccgagtggacctcctgttctacgagctgtggcaatggaattcagcagcgcggccgctcctgcgatagcctcaacaaccgatgtgagggctcctcggtccagacacggacctgccacattcaggagtgtgacaagagatttaaacaggatggtggctggagccactggtccccgtggtcatcttgttctgtgacatgtggtgatggtgtgatcacaaggatccggctctgcaactctcccagcccccagatgaacgggaaaccctgtgaaggcgaagcgcgggagaccaaagcctgcaagaaagacgcctgccccatcaatggaggctggggtccttggtcaccatgggacatctgttctgtcacctgtggaggaggggtacagaaacgtagtcgtctctgcaacaaccccacaccccagtttggaggcaaggactgcgttggtgatgtaacagaaaaccagatctgcaacaagcaggactgtccaattgatggatgcctgtccaatccctgctttgccggcgtgaagtgtactagctaccctgatggcagctggaaatgtggtgcttgtccccctggttacagtggaaatggcatccagtgcacagatgttgatgagtgcaaagaagtgcctgatgcctgcttcaaccacaatggagagcaccggtgtgagaacacggaccccggctacaactgcctgccctgccccccacgcttcaccggctcacagcccttcggccagggtgtcgaacatgccacggccaacaaacaggtgtgcaagccccgtaacccctgcacggatgggacccacgactgcaacaagaacgccaagtgcaactacctgggccactatagcgaccccatgtaccgctgcgagtgcaagcctggctacgctggcaatggcatcatctgcggggaggacacagacctggatggctggcccaatgagaacctggtgtgcgtggccaatgcgacttaccactgcaaaaaggataattgccccaaccttcccaactcagggcaggaagactatgacaaggatggaattggtgatgcctgtgatgatgacgatgacaatgataaaattccagatgacagggacaactgtccattccattacaacccagctcagtatgactatgacagagatgatgtgggagaccgctgtgacaactgtccctacaaccacaacccagatcaggcagacacagacaacaatggggaaggagacgcctgtgctgcagacattgatggagacggtatcctcaatgaacgggacaactgccagtacgtctacaatgtggaccagagagacactgatatggatggggttggagatcagtgtgacaattgccccttggaacacaatccggatcagctggactctgactcagaccgcattggagatacctgtgacaacaatcaggatattgatgaagatggccaccagaacaatctggacaactgtccctatgtgcccaatgccaaccaggctgaccatgacaaagatggcaagggagatgcctgtgaccacgatgatgacaacgatggcattcctgatgacaaggacaactgcagactcgtgcccaatcccgaccagaaggactctgacggcgatggtcgaggtgatgcctgcaaagatgattttgaccatgacagtgtgccagacatcgatgacatctgtcctgagaatgttgacatcagtgagaccgatttccgccgattccagatgattcctctggaccccaaagggacatcccaaaatgaccctaactgggttgtacgccatcagggtaaagaactcgtccagactgtcaactgtgatcctggactcgctgtaggttatgatgagtttaatgctgtggacttcagtggcaccttcttcatcaacaccgaaagggacgatgactatgctggatttgtctttggctaccagtccagcagccgcttttatgttgtgatgtggaagcaagtcacccagtcctactgggacaccaaccccacgagggctcagggatactcgggcctttctgtgaaagttgtaaactccaccacagggcctggcgagcacctgcggaacgccctgtggcacacaggaaacacccctggccaggtgcgcaccctgtggcatgaccctcgtcacataggctggaaagatttcaccgcctacagatggcgtctcagccacaggccaaagacgggtttcattagagtggtgatgtatgaagggaagaaaatcatggctgactcaggacccatctatgataaaacctatgctggtggtagactagggttgtttgtcttctctcaagaaatggtgttcttctctgacctgaaatacgaatgtagagatccctaatcatcaaattgttgattgaaagactgatcataaaccaatgctggtattgcaccttctggaactatgggcttgagaaaacccccaggatcacttctccttggcttccttcttttctgtgcttgcatcagtgtggactcctagaacgtgcgacctgcctcaagaaaatgcagttttcaaaaacagactcagcattcagcctccaatgaataagacatcttccaagcatataaacaattgctttggtttccttttgaaaaagcatctacttgcttcagttgggaaggtgcccattccactctgcctttgtcacagagcagggtgctattgtgaggccatctctgagcagtggactcaaaagcattttcaggcatgtcagagaagggaggactcactagaattagcaaacaaaaccaccctgacatcctccttcaggaacacggggagcagaggccaaagcactaaggggagggcgcatacccgagacgattgtatgaagaaaatatggaggaactgttacatgttcggtactaagtcattttcaggggattgaaagactattgctggatttcatgatgctgactggcgttagctgattaacccatgtaaataggcacttaaatagaagcaggaaagggagacaaagactggcttctggacttcctccctgatccccacccttactcatcacctgcagtggccagaattagggaatcagaatcaaaccagtgtaaggcagtgctggctgccattgcctggtcacattgaaattggtggcttcattctagatgtagcttgtgcagatgtagcaggaaaataggaaaacctaccatctcagtgagcaccagctgcctcccaaaggaggggcagccgtgcttatatttttatggttacaatggcacaaaattattatcaacctaactaaaacattccttttctcttttttcctgaattatcatggagttttctaattctctcttttggaatgtagattttttttaaatgctttacgatgtaaaatatttattttttacttattctggaagatctggctgaaggattattcatggaacaggaagaagcgtaaagactatccatgtcatctttgttgagagtcttcgtgactgtaagattgtaaatacagattatttattaactctgttctgcctggaaatttaggcttcatacggaaagtgtttgagagcaagtagttgacatttatcagcaaatctcttgcaagaacagcacaaggaaaatcagtctaataagctgctctgccccttgtgctcagagtggatgttatgggattctttttttctctgttttatcttttcaagtggaattagttggttatccatttgcaaatgttttaaattgcaaagaaagccatgaggtcttcaatactgttttaccccatcccttgtgcatatttccagggagaaggaaagcatatacacttttttctttcatttttccaaaagagaaaaaaatgacaaaaggtgaaacttacatacaaatattacctcatttgttgtgtgactgagtaaagaatttttggatcaagcggaaagagtttaagtgtctaacaaacttaaagctactgtagtacctaaaaagtcagtgttgtacatagcataaaaactctgcagagaagtattcccaataaggaaatagcattgaaatgttaaatacaatttctgaaagttatgttttttttctatcatctggtataccattgctttatttttataaattattttctcattgccattggaatagatatctcagattgtgtagatatgctatttaaataatttatcaggaaatactgcctgtagagttagtatttctatttttatataatgtttgcacactgaattgaagaattgttggttttttcttttttttgttttgtttttttttttttttttttttgcttttgacctcccatttttactatttgccaatacctttttctaggaatgtgcttttttttgtacacatttttatccattttacattctaaagcagtgtaagttgtatattactgtttcttatgtacaaggaacaacaataaatcatatggaaatttatatttatacttactgtatccatgcttatttgttctctactggctttatgtcatgaagtatatgcgtaaataccattcataaatcaatatagcatatacaaaaataaattacagtaagtcatagcaacattcacagtttgtatgtgattgagaaagactgagttgctcaggcctaggcttagaatttgctgcgtttgtggaataaaagaacaaaatgatacattagcctgccatatcaaaaacatataaaagagaaattatccctaagtcaagggcccccataagaataaaatttcttattaaggtcattagatgtcattgaatccttttcaaagtgcagtatgaaaacaaagggaaaaacactgaagcacacgcaactctcacagcgacattttctgacccacgaatgatgccttgggtgggcaacacgattgcatgttgtggagacacttcggaagtaaatgtggatgagggaggagctgtccttgcaatgttgagccaagcattacagatacctcctcttgaagaaggaataataagtttaatcaaaaaagaagactaaaaaatgtaaaatttggaaggaatccataaatgcgtgtgtgtctaaatacaaattatcatgtgaagaaaaggcccaagtgtaccaataagcagaccttgatttttggatgggctaattatgaatgtggaatactgaccagttaatttccagttttaatgaaaacagatcaaagaagaaattttatgagtaggttaaaggtctggctttgaggtctattaaacactagaaaggactggctgggtgagataaaatcttccttgttgattttcactctcattctataaatactcatctttctgagtagccatgatcacatacaaatgtaaattgccaaatcattttatagtaccaaggtgaagaagcaggaactagaaagtgttgataatagctgtggagttaggaaaactgatgtgaaggaaataattctttgaaatggcaaagaattaaataccatcattcattatcagaagagttcaacgtttgaagtgctgggagataattctaattcattcttggatagtgaagcaaaactgattgaaaataccaagataagacagaaaaagtgactggaaagaggagcttttcttccaggcatgttccagtttcaccctaagactgaccttcaaataatcaggttgtactgaaataaaggacttgttaaaaattaaaattatgtcatcgagatgatagcttttttcctcctccaacagtttattgtcatgtgttgtgggagagctcgagtgaagagcaataaactccaggtcttataagaatgtacatacaataaaggtggtgccagcagtttttttttttctaaagagtcacatgtagaaaagcctccagtattaagctcctgaattcattccttaaataaattggctctctctctcttctataatttctttttctttttatttttgagatgaagtcttgctctgtcgcccaggctggagtgcagtgacacaatctcggctcactgcaacctctgcctccccggttcaagcaattctccctcctgcctcagcctcccaagtagctgggactacaagcgcccgccaccaagcctggctaattctgtatttttagtaaagacggggtttcaccttgttccggacaaacactaagccctaaagggaaatccaaaataaaaacatctatttttaataacactttctatctaaatcagggtgactttttaaaaaaaatccggaagctttttgttgaattacgttacagacttagttaccagtccttgttagagttaccttcagttgacatgctgtgaatggtcccacctcttttatggcagaattcattacttaaaataactctattttcttcccccttacctaaataacagaaaggctcactatgtcccaaatatcattggcagaagcaaactataaagtcataagccctttgcagtgcaagtctagaaataatttt

SEQ ID NO: 136673 - DNA, 1235 bp, Artificial Sequence
  derived and/or modified sequence
gaaaaccagatctgcaacaagcaggactgtccaattgatggatgcctgtccaatccctgctttgccggcgtgaagtgtactagctaccctgatggcagctggaaatgtggtgcttgtccccctggttacagtggaaatggcatccagtgcacagatgttgatgagtgcaaagaagtgcctgatgcctgcttcaaccacaatggagagcaccggtgtgagaacacggaccccggctacaactgcctgccctgccccccacgcttcaccggctcacagcccttcggccagggtgtcgaacatgccacggccaacaaacaggtgtgcaagccccattccactctgcctttgtcacagagcagggtgctattgtgaggccatctctgagcagtggactcaaaagcattttcaggcatgtcagagaagggaggactcactagaattagcaaacaaaaccaccctgacatcctccttcaggaacacggggagcagaggccaaagcactaaggggagggcgcatacccgagacgattgtatgaagaaaatatggaggaactgttacatgttcggtactaagtcattttcaggggattgaaagactattgctggatttcatgatgctgactggcgttagctgattaacccatgtaaataggcacttaaatagaagcaggaaagggagacaaagactggcttctggacttcctccctgatccccacccttactcatcacctgcagtggccagaattagggaatcagaatcaaaccagtgtaaggcagtgctggctgccattgcctggtcacattgaaattggtggcttcattctagatgtagcttgtgcagatgtagcaggaaaataggaaaacctaccatctcagtgagcaccagctgcctcccaaaggaggggcagccgtgcttatatttttatggttacaatggcacaaaattattatcaacctaactaaaacattccttttctcttttttcctgaattatcatggagttttctaattctctcttttggaatgtagattttttttaaatgctttacgatgtaaaatatttattttttacttattctggaagatctggctgaaggattattcatggaacaggaagaagcgtaaagactatccatgtcatctttgttgagagtcttcgtgactgtaagattgtaaatacagattatttattaactctgttctgcctggaaatttaggcttcatacggaaagtg

SEQ ID NO: 136674 - protein, 1172 aa, Artificial Sequence
  derived and/or modified sequence
MVWRLVLLALWVWPSTQAGHQDKDTTFDLFSISNINRKTIGAKQFRGPDPGVPAYRFVRFDYIPPVNADDLSKITKIMRQKEGFFLTAQLKQDGKSRGTLLALEGPGLSQRQFEIVSNGPADTLDLTYWIDGTRHVVSLEDVGLADSQWKNVTVQVAGETYSLHVGCDLIDSFALDEPFYEHLQAEKSRMYVAKGSARESHFRGLLQNVHLVFENSVEDILSKKGCQQGQGAEINAISENTETLRLGPHVTTEYVGPSSERRPEVCERSCEELGNMVQELSGLHVLVNQLSENLKRVSNDNQFLWELIGGPPKTRNMSACWQDGRFFAENETWVVDSCTTCTCKKFKTICHQITCPPATCASPSFVEGECCPSCLHSVDGEEGWSPWAEWTQCSVTCGSGTQQRGRSCDVTSNTCLGPSIQTRACSLSKCDTRIRQDGGWSHWSPWSSCSVTCGVGNITRIRLCNSPVPQMGGKNCKGSGRETKACQGAPCPIDGRWSPWSPWSACTVTCAGGIRERTRVCNSPEPQYGGKACVGDVQERQMCNKRSCPVDGCLSNPCFPGAQCSSFPDGSWSCGSCPVGFLGNGTHCEDLDECALVPDICFSTSKVPRCVNTQPGFHCLPCPPRYRGNQPVGVGLEAAKTEKQVCEPENPCKDKTHNCHKHAECIYLGHFSDPMYKCECQTGYAGDGLICGEDSDLDGWPNLNLVCATNATYHCIKDNCPHLPNSGQEDFDKDGIGDACDDDDDNDGVTDEKDNCQLLFNPRQADYDKDEVGDRCDNCPYVHNPAQIDTDNNGEGDACSVDIDGDDVFNERDNCPYVYNTDQRDTDGDGVGDHCDNCPLVHNPDQTDVDNDLVGDQCDNNEDIDDDGHQNNQDNCPYISNANQADHDRDGQGDACDPDDDNDGVPDDRDNCRLVFNPDQEDLDGDGRGDICKDDFDNDNIPDIDDVCPENNAISETDFRNFQMVPLDPKGTTQIDPNWVIRHQGKELVQTANSDPGIAVGFDEFGSVDFSGTFYVNTDRDDDYAGFVFGYQSSSRFYVVMWKQVTQTYWEDQPTRAYGYSGVSLKVVNSTTGTGEHLRNALWHTGNTPGQVRTLWHDPRNIGWKDYTAYRWHLTHRPKTGYIRVLVHEGKQVMADSGPIYDQTYAGGRLGLFVFSQEMVYFSDLKYECRDI

SEQ ID NO: 136675 - protein, 430 aa, Artificial Sequence
  derived and/or modified sequence
DDDNDGVTDEKDNCQLLFNPRQADYDKDEVGDRCDNCPYVHNPAQIDTDNNGEGDACSVDIDGDDVFNERDNCPYVYNTDQRDTDGDGVGDHCDNCPLVHNPDQTDVDNDLVGDQCDNNEDIDDDGHQNNQDNCPYISNANQADHDRDGQGDACDPDDDNDGVPDDRDNCRLVFNPDQEDLDGDGRGDICKDDFDNDNIPDIDDVCPENNAISETDFRNFQMVPLDPKGTTQIDPNWVIRHQGKELVQTANSDPGIAVGFDEFGSVDFSGTFYVNTDRDDDYAGFVFGYQSSSRFYVVMWKQVTQTYWEDQPTRAYGYSGVSLKVVNSTTGTGEHLRNALWHTGNTPGQVRTLWHDPRNIGWKDYTAYRWHLTHRPKTGYIRVLVHEGKQVMADSGPIYDQTYAGGRLGLFVFSQEMVYFSDLKYECRVI

SEQ ID NO: 136676 - protein, 83 aa, Artificial Sequence
  derived and/or modified sequence
MVWRLVLLALWVWPSTQAGHQDKDTTFDLFSISNINRKTIGAKQFRGPDPGVPAYRFVRFDYIPPVNADDLSKITKIMRQKEG

SEQ ID NO: 136677 - DNA, 3519 bp, Artificial Sequence
  derived and/or modified sequence
atggtgtggagactggtgctgctggccctgtgggtgtggcccagcacccaggccggccaccaggacaaggacaccaccttcgacctgttcagcatcagcaacatcaacagaaagaccatcggcgccaagcagttcagaggccccgaccccggcgtgcccgcctacagattcgtgagattcgactacatcccccccgtgaacgccgacgacctgagcaagatcaccaagatcatgagacagaaggagggcttcttcctgaccgcccagctgaagcaggacggcaagagcagaggcaccctgctggccctggagggccccggcctgagccagagacagttcgagatcgtgagcaacggccccgccgacaccctggacctgacctactggatcgacggcaccagacacgtggtgagcctggaggacgtgggcctggccgacagccagtggaagaacgtgaccgtgcaggtggccggcgagacctacagcctgcacgtgggctgcgacctgatcgacagcttcgccctggacgagcccttctacgagcacctgcaggccgagaagagcagaatgtacgtggccaagggcagcgccagagagagccacttcagaggcctgctgcagaacgtgcacctggtgttcgagaacagcgtggaggacatcctgagcaagaagggctgccagcagggccagggcgccgagatcaacgccatcagcgagaacaccgagaccctgagactgggcccccacgtgaccaccgagtacgtgggccccagcagcgagagaagacccgaggtgtgcgagagaagctgcgaggagctgggcaacatggtgcaggagctgagcggcctgcacgtgctggtgaaccagctgagcgagaacctgaagagagtgagcaacgacaaccagttcctgtgggagctgatcggcggcccccccaagaccagaaacatgagcgcctgctggcaggacggcagattcttcgccgagaacgagacctgggtggtggacagctgcaccacctgcacctgcaagaagttcaagaccatctgccaccagatcacctgcccccccgccacctgcgccagccccagcttcgtggagggcgagtgctgccccagctgcctgcacagcgtggacggcgaggagggctggagcccctgggccgagtggacccagtgcagcgtgacctgcggcagcggcacccagcagagaggcagaagctgcgacgtgaccagcaacacctgcctgggccccagcatccagaccagagcctgcagcctgagcaagtgcgacaccagaatcagacaggacggcggctggagccactggagcccctggagcagctgcagcgtgacctgcggcgtgggcaacatcaccagaatcagactgtgcaacagccccgtgccccagatgggcggcaagaactgcaagggcagcggcagagagaccaaggcctgccagggcgccccctgccccatcgacggcagatggagcccctggagcccctggagcgcctgcaccgtgacctgcgccggcggcatcagagagagaaccagagtgtgcaacagccccgagccccagtacggcggcaaggcctgcgtgggcgacgtgcaggagagacagatgtgcaacaagagaagctgccccgtggacggctgcctgagcaacccctgcttccccggcgcccagtgcagcagcttccccgacggcagctggagctgcggcagctgccccgtgggcttcctgggcaacggcacccactgcgaggacctggacgagtgcgccctggtgcccgacatctgcttcagcaccagcaaggtgcccagatgcgtgaacacccagcccggcttccactgcctgccctgcccccccagatacagaggcaaccagcccgtgggcgtgggcctggaggccgccaagaccgagaagcaggtgtgcgagcccgagaacccctgcaaggacaagacccacaactgccacaagcacgccgagtgcatctacctgggccacttcagcgaccccatgtacaagtgcgagtgccagaccggctacgccggcgacggcctgatctgcggcgaggacagcgacctggacggctggcccaacctgaacctggtgtgcgccaccaacgccacctaccactgcatcaaggacaactgcccccacctgcccaacagcggccaggaggacttcgacaaggacggcatcggcgacgcctgcgacgacgacgacgacaacgacggcgtgaccgacgagaaggacaactgccagctgctgttcaaccccagacaggccgactacgacaaggacgaggtgggcgacagatgcgacaactgcccctacgtgcacaaccccgcccagatcgacaccgacaacaacggcgagggcgacgcctgcagcgtggacatcgacggcgacgacgtgttcaacgagagagacaactgcccctacgtgtacaacaccgaccagagagacaccgacggcgacggcgtgggcgaccactgcgacaactgccccctggtgcacaaccccgaccagaccgacgtggacaacgacctggtgggcgaccagtgcgacaacaacgaggacatcgacgacgacggccaccagaacaaccaggacaactgcccctacatcagcaacgccaaccaggccgaccacgacagagacggccagggcgacgcctgcgaccccgacgacgacaacgacggcgtgcccgacgacagagacaactgcagactggtgttcaaccccgaccaggaggacctggacggcgacggcagaggcgacatctgcaaggacgacttcgacaacgacaacatccccgacatcgacgacgtgtgccccgagaacaacgccatcagcgagaccgacttcagaaacttccagatggtgcccctggaccccaagggcaccacccagatcgaccccaactgggtgatcagacaccagggcaaggagctggtgcagaccgccaacagcgaccccggcatcgccgtgggcttcgacgagttcggcagcgtggacttcagcggcaccttctacgtgaacaccgacagagacgacgactacgccggcttcgtgttcggctaccagagcagcagcagattctacgtggtgatgtggaagcaggtgacccagacctactgggaggaccagcccaccagagcctacggctacagcggcgtgagcctgaaggtggtgaacagcaccaccggcaccggcgagcacctgagaaacgccctgtggcacaccggcaacacccccggccaggtgagaaccctgtggcacgaccccagaaacatcggctggaaggactacaccgcctacagatggcacctgacccacagacccaagaccggctacatcagagtgctggtgcacgagggcaagcaggtgatggccgacagcggccccatctacgaccagacctacgccggcggcagactgggcctgttcgtgttcagccaggagatggtgtacttcagcgacctgaagtacgagtgcagagacatctag

SEQ ID NO: 136678 - DNA, 1293 bp, Artificial Sequence
  derived and/or modified sequence
gacgacgacaacgacggcgtgaccgacgagaaggacaactgccagctgctgttcaaccccagacaggccgactacgacaaggacgaggtgggcgacagatgcgacaactgcccctacgtgcacaaccccgcccagatcgacaccgacaacaacggcgagggcgacgcctgcagcgtggacatcgacggcgacgacgtgttcaacgagagagacaactgcccctacgtgtacaacaccgaccagagagacaccgacggcgacggcgtgggcgaccactgcgacaactgccccctggtgcacaaccccgaccagaccgacgtggacaacgacctggtgggcgaccagtgcgacaacaacgaggacatcgacgacgacggccaccagaacaaccaggacaactgcccctacatcagcaacgccaaccaggccgaccacgacagagacggccagggcgacgcctgcgaccccgacgacgacaacgacggcgtgcccgacgacagagacaactgcagactggtgttcaaccccgaccaggaggacctggacggcgacggcagaggcgacatctgcaaggacgacttcgacaacgacaacatccccgacatcgacgacgtgtgccccgagaacaacgccatcagcgagaccgacttcagaaacttccagatggtgcccctggaccccaagggcaccacccagatcgaccccaactgggtgatcagacaccagggcaaggagctggtgcagaccgccaacagcgaccccggcatcgccgtgggcttcgacgagttcggcagcgtggacttcagcggcaccttctacgtgaacaccgacagagacgacgactacgccggcttcgtgttcggctaccagagcagcagcagattctacgtggtgatgtggaagcaggtgacccagacctactgggaggaccagcccaccagagcctacggctacagcggcgtgagcctgaaggtggtgaacagcaccaccggcaccggcgagcacctgagaaacgccctgtggcacaccggcaacacccccggccaggtgagaaccctgtggcacgaccccagaaacatcggctggaaggactacaccgcctacagatggcacctgacccacagacccaagaccggctacatcagagtgctggtgcacgagggcaagcaggtgatggccgacagcggccccatctacgaccagacctacgccggcggcagactgggcctgttcgtgttcagccaggagatggtgtacttcagcgacctgaagtacgagtgcagagtgatctag

SEQ ID NO: 136679 - DNA, 252 bp, Artificial Sequence
  derived and/or modified sequence
atggtgtggagactggtgctgctggccctgtgggtgtggcccagcacccaggccggccaccaggacaaggacaccaccttcgacctgttcagcatcagcaacatcaacagaaagaccatcggcgccaagcagttcagaggccccgaccccggcgtgcccgcctacagattcgtgagattcgactacatcccccccgtgaacgccgacgacctgagcaagatcaccaagatcatgagacagaaggagggctag

SEQ ID NO: 136680 - DNA, 3519 bp, Artificial Sequence
  derived and/or modified sequence
atggtgtggcggctggtgctcctcgctctgtgggtttggccctctacacaagccggtcaccaggataaagacaccacgtttgatctattcagcatctccaatattaatcgaaaaaccattggtgcaaagcagttccgggggccggatccaggtgtccctgcctacaggttcgtacgcttcgactatatcccaccagtgaacgcagacgatttgtcaaagatcactaaaattatgagacagaaagaggggtttttcctcactgcccagctgaagcaggacggcaaaagcaggggcacgttattagcgcttgagggccccggcctcagccagcgacagtttgagattgtgtcaaatgggccagctgacaccctggatctgacgtactggattgatggcacacgccatgtggtgagtcttgaggacgtggggcttgccgacagccagtggaagaatgtgactgtacaggtggccggcgaaacctacagcctccacgtgggatgcgatctgatagattccttcgcactagacgagcctttctatgagcacttgcaggccgagaagagtcggatgtacgttgctaaaggctcagcccgcgagtctcacttcagagggttactgcagaatgtccaccttgtcttcgagaattctgtggaggatatcctgtccaaaaagggctgccagcagggacagggcgccgaaataaatgctatctccgaaaacacagaaacactcaggctgggtcctcatgtgacaacggaatatgtgggaccttcctcggagaggaggcctgaggtttgcgaacgttcctgcgaagagctgggcaatatggtgcaggagctctccgggcttcacgtgctcgtgaaccagttgtcagagaacctgaaacgagtcagcaatgataaccagtttctttgggagctcattgggggacctccgaaaacgcgcaacatgtctgcttgttggcaagatgggcggttcttcgcggaaaatgagacgtgggtggtagactcgtgcactacctgcacctgtaaaaaattcaagactatatgccaccaaattacgtgcccgcctgccacctgtgcaagcccatctttcgtggaaggcgagtgttgcccttcttgtctgcacagcgtcgacggtgaggagggctggagcccgtgggcggaatggacacagtgttccgtgacatgtggcagcggtacacagcagcgaggccgctcgtgtgatgttaccagcaacacatgtttgggtccttccatacagactcgggcctgctccttatccaaatgtgatacgcggattagacaggatggcggctggtcccattggagcccatggtccagctgtagcgtgacttgtggggtcggtaacatcacccgaataagactgtgcaactcccccgttccccagatgggcggaaagaactgcaaaggctctggtagggagactaaagcctgccagggcgccccatgccccatagatggcagatggagtccctggtctccatggagcgcctgtactgttacatgcgcaggaggtattcgagagaggacccgggtctgcaacagtcccgagccacaatatggcggaaaagcatgtgtgggagatgtacaggagcggcagatgtgtaataagcggagctgtccggtcgatgggtgtctgtccaacccttgttttcccggggctcagtgttcaagctttccagacgggtcttggtcatgtggctcatgtcctgtcggtttcctggggaacgggacccactgtgaagacctggatgaatgcgcactggtccctgacatttgcttctccacgtctaaagtgcctagatgcgtgaatacgcaacctggttttcattgcttaccttgtccgccaagataccgcggcaaccagcccgtgggcgtgggcctcgaggccgccaaaaccgaaaaacaggtttgtgagccagagaacccctgtaaagataagacacataactgccacaagcatgctgaatgcatatacttggggcattttagcgaccccatgtataagtgcgaatgccagactggctacgcgggtgatggtttaatctgtggcgaagactccgatctggacggctggcctaatctcaacctggtatgtgccaccaatgccacgtatcactgcataaaggataattgcccgcacctacccaactccggtcaggaggatttcgacaaggacggcatcggcgatgcctgcgacgatgatgacgacaacgacggtgtgaccgatgagaaagataactgtcagctcctttttaatcctagacaggcagactacgacaaggatgaggtaggtgacaggtgtgataattgcccctacgtccataaccctgcccagatagataccgacaacaacggcgaaggagatgcatgtagcgtggatatcgacggagatgatgtgttcaacgagagggacaactgcccctatgtctacaatactgatcaacgcgacacagacggtgatggcgtgggggatcactgcgacaattgcccccttgtccacaaccctgaccaaaccgacgtggataacgacttggtgggagatcagtgcgacaataacgaggacattgatgacgacgggcaccagaataaccaggacaattgtccctacatttccaacgccaatcaggctgatcatgatagagacggtcaaggagatgcctgcgatcctgatgatgacaacgacggcgtaccagacgaccgggataattgtcgcttagtatttaatccagatcaggaggatctggacggcgatgggcgaggagacatctgcaaggatgatttcgataacgacaatatcccggatatcgatgatgtgtgccccgagaataacgcaatctcagaaactgattttaggaacttccaaatggtgccactcgatccgaaaggcacgactcagatagatcctaattgggttatcagacatcagggcaaggaactcgttcagaccgctaatagcgacccaggcatcgccgtgggtttcgacgagtttggctcagtggacttcagtggcacattctacgtaaacaccgaccgcgatgatgactacgcaggtttcgtgttcgggtatcagagctcaagcaggttttatgtagtgatgtggaagcaggtgacccagacatattgggaagatcagcctacacgcgcatatggttactccggggtgtctctcaaggttgtgaactcgaccactggaaccggggagcaccttcgaaacgcactatggcacactggcaacacccccgggcaagtcaggaccttgtggcacgatcccagaaacatcgggtggaaagattataccgcgtatcgttggcacctgacacaccggcctaagaccggctatatccgagtgctagttcatgagggcaagcaggtgatggcagattctggtcccatttatgaccagacctacgccggggggcgcctgggcctgtttgtgttctcgcaggaaatggtgtatttctccgatcttaagtacgagtgtcgggatatatag

SEQ ID NO: 136681 - DNA, 1293 bp, Artificial Sequence
  derived and/or modified sequence
gacgatgataatgatggggtcaccgatgagaaagataactgccagctcttgttcaatcctcgtcaggctgattacgacaaggacgaggtgggtgacaggtgcgacaactgtccttacgttcataacccagcgcaaattgacaccgataataacggtgagggggacgcttgctccgtggacatcgacggcgacgacgtgtttaacgaaagagataattgtccttacgtgtacaacaccgatcagagggatacggacggtgacggagtaggagaccactgcgataactgccctctggtgcacaaccccgatcagacggacgtcgacaacgacctagtgggcgaccaatgcgacaataacgaggatatcgacgacgacggacaccaaaataaccaagacaattgcccgtacataagtaatgcaaatcaggcggaccatgatagagatggtcagggtgacgcctgcgacccagacgatgacaacgacggagtgcccgatgaccgtgacaattgtcgcctcgtgttcaatccagatcaggaggacctcgatggcgatggaagaggggacatatgtaaagatgactttgataacgataatattccagatatcgatgatgtttgtccagaaaataacgccattagcgagaccgattttcgaaactttcagatggtgccccttgacccaaaaggcactactcagatcgacccgaattgggtcataaggcatcaaggaaaagaactcgtccagaccgcaaattcggatcctggaatcgcagtcgggttcgatgaatttggtagtgtggatttcagcggcacattttacgttaacacggatcgtgatgatgattatgccggctttgttttcggttatcagtcaagttctcgcttctatgttgtgatgtggaaacaggtaacacagacgtactgggaggaccaacccacccgggcatatggctactctggggtttctcttaaggtcgtgaacagcaccaccggcacaggggagcatcttcgtaacgctctgtggcatactgggaacacccctggccaagtgcggacactatggcatgatccaagaaacattgggtggaaagactacactgcttacagatggcatcttacccaccgaccgaagaccggctatatccgggtgttggttcacgaagggaagcaggtcatggccgattccggtcctatctacgaccagacctacgcaggtggccgcctgggactgtttgttttttcacaggaaatggtgtacttcagcgacctgaaatatgaatgtcgggtaatctag

SEQ ID NO: 136682 - DNA, 252 bp, Artificial Sequence
  derived and/or modified sequence
atggtctggcggctggttcttctggcactatgggtgtggccgagcacccaagctggacaccaggacaaggatacgactttcgacttgttttcaatcagtaacataaataggaaaacaattggtgctaagcagtttcgagggcctgaccccggcgtaccagcttatcgttttgtcaggtttgactacatcccccctgtgaatgcagatgacctgagtaaaattacgaagattatgagacagaaggaggggtag

SEQ ID NO: 136683 - DNA, 3519 bp, Artificial Sequence
  derived and/or modified sequence
atggtgtggaggctggtgctgctggccctgtgggtgtggcccagcacccaggccggccaccaggacaaggacaccacctttgacctcttcagcatcagcaacatcaacaggaagaccatcggggccaagcagttccggggccctgaccccggggtgcctgcctacagatttgtgcgctttgactacatcccccctgtgaatgctgatgacctgagcaagatcaccaagatcatgaggcagaaggagggcttcttcctgacagcccagctgaagcaggacggcaagagccggggcaccctgctggccctggagggccctggcctgagccagaggcagtttgaaattgtgtccaatggacctgctgacaccctggacctgacctactggattgatggcaccaggcatgtggtgtccctggaggatgtgggcctggccgacagccagtggaagaatgtgacagtgcaggtggccggggagacctacagcctgcacgtgggctgtgacctgattgacagctttgccctggatgagcccttctatgagcacctgcaggccgagaagagcaggatgtatgtggccaagggcagcgcccgggagagccacttccggggcctgctgcagaatgtgcacctggtgtttgagaacagcgtggaggacatcctgagcaagaagggctgccagcagggccagggcgctgagatcaatgccatcagtgaaaatacagagaccctgcggctgggcccccacgtgaccacagaatatgtgggccccagcagcgagaggaggcctgaggtgtgtgagaggagctgtgaggagctgggcaacatggtgcaggagctgagcggcctgcacgtgctggtgaaccagctgtctgagaacctgaagagggtgtccaatgacaaccagttcctgtgggagctgattggaggcccccccaagaccaggaacatgtctgcctgctggcaggacggccgcttctttgctgaaaatgagacctgggtggtggacagctgcaccacctgcacctgcaagaagttcaagaccatctgccaccagatcacctgccccccagccacctgtgccagccccagctttgtggagggggagtgctgccccagctgcctgcacagcgtggatggagaggagggctggagcccctgggccgagtggacccagtgcagcgtgacctgtggcagcggcacccagcagaggggccgcagctgtgatgtgaccagcaacacctgcctgggccccagcatccagacccgggcctgcagcctgagcaaatgtgacacccgcatccggcaggacggcggctggagccactggagcccctggagcagctgcagcgtgacctgtggggtgggcaacatcacccgcatccggctgtgcaacagccctgtgccccagatgggcggcaagaactgcaagggcagcggccgggagaccaaggcctgccagggcgccccctgccccattgatggccgctggagcccctggagcccctggagcgcctgcaccgtgacctgtgccggcggcatccgggagaggaccagggtgtgcaacagccctgagccccagtatggaggcaaggcctgtgtgggagatgtgcaggagcggcagatgtgcaacaagaggagctgccctgtggatggctgcctgagcaacccctgcttccctggggcccagtgcagcagcttcccagatggctcctggagctgtggcagctgccctgtgggcttcctgggcaatggcacccactgtgaggacctggatgaatgtgccctggtgcctgacatctgcttcagcaccagcaaggtgccccgctgtgtgaacacccagcccggcttccactgcctgccctgccccccacgctaccggggcaaccagcctgtgggcgtgggcctggaggccgccaagacagagaagcaggtgtgtgagcctgagaacccctgcaaggacaagacccacaactgccacaagcatgctgagtgcatctacctgggccacttcagtgaccccatgtacaagtgtgagtgccagacaggctatgctggagatggcctcatctgtggagaagattctgacctggatggctggcccaacctgaacctggtgtgtgccaccaatgccacctaccactgcatcaaggacaactgcccccacctgcccaacagcggccaggaggactttgacaaggatggcattggagatgcctgtgatgatgatgatgacaatgatggagtgacagatgagaaggacaactgccagctgctcttcaacccccggcaggccgactatgacaaggatgaggtgggggacagatgtgacaactgcccctacgtgcacaacccagcccagattgacacagacaacaatggagaaggagatgcctgcagcgtggacattgatggagatgatgtgttcaatgaaagagacaactgcccctacgtgtacaacacagaccagagggacacagatggagatggagtgggggaccactgtgacaactgccccctggtgcacaacccagaccagacagatgtggacaatgacctggtgggggaccagtgtgacaacaatgaagatattgatgatgatggccaccagaacaaccaggacaactgcccctacatcagcaatgccaaccaggccgaccatgacagagatggccagggagatgcctgtgaccctgatgatgacaatgatggagtgcctgatgaccgggacaactgccgcctggtgttcaacccagaccaggaggacctggatggagatggccgcggggacatctgcaaggatgactttgacaatgacaacatcccagacattgatgatgtgtgcccagagaacaatgccatcagcgagacagacttcaggaacttccagatggtgcccctggaccccaagggcaccacccagattgaccccaactgggtgatccgccaccagggcaaggagctggtgcagacagccaacagcgaccccggcattgctgtgggctttgatgaatttggatctgtggacttcagcggcaccttctacgtgaacacagacagagatgatgattatgccggctttgtgtttggctaccagagcagcagccgcttctacgtggtgatgtggaagcaggtgacccagacctactgggaggaccagcccacccgggcctacggctacagcggcgtgtccctgaaggtggtgaacagcaccaccggcaccggggagcacctgagaaatgccctgtggcacactggaaacaccccaggccaggtgaggaccctgtggcatgaccccaggaacatcggctggaaggactacacagcctaccgctggcacctgacccaccggcccaagacaggctacatccgggtgctggtgcatgagggcaagcaggtgatggctgacagcggccccatctatgaccagacctacgccggcggccgcctgggcctgtttgtgttcagccaggagatggtgtacttcagtgacctgaagtatgagtgccgggacatctag

SEQ ID NO: 136684 - DNA, 1293 bp, Artificial Sequence
  derived and/or modified sequence
gatgatgacaatgatggagtgacagatgagaaggacaactgccagctgctcttcaacccccggcaggccgactatgacaaggatgaggtgggggacagatgtgacaactgcccctacgtgcacaacccagcccagattgacacagacaacaatggagaaggagatgcctgcagcgtggacattgatggagatgatgtgttcaatgaaagagacaactgcccctacgtgtacaacacagaccagagggacacagatggagatggagtgggggaccactgtgacaactgccccctggtgcacaacccagaccagacagatgtggacaatgacctggtgggggaccagtgtgacaacaatgaagatattgatgatgatggccaccagaacaaccaggacaactgcccctacatcagcaatgccaaccaggccgaccatgacagagatggccagggagatgcctgtgaccctgatgatgacaatgatggagtgcctgatgaccgggacaactgccgcctggtgttcaacccagaccaggaggacctggatggagatggccgcggggacatctgcaaggatgactttgacaatgacaacatcccagacattgatgatgtgtgcccagagaacaatgccatcagcgagacagacttcaggaacttccagatggtgcccctggaccccaagggcaccacccagattgaccccaactgggtgatccgccaccagggcaaggagctggtgcagacagccaacagcgaccccggcattgctgtgggctttgatgaatttggatctgtggacttcagcggcaccttctacgtgaacacagacagagatgatgattatgccggctttgtgtttggctaccagagcagcagccgcttctacgtggtgatgtggaagcaggtgacccagacctactgggaggaccagcccacccgggcctacggctacagcggcgtgtccctgaaggtggtgaacagcaccaccggcaccggggagcacctgagaaatgccctgtggcacactggaaacaccccaggccaggtgaggaccctgtggcatgaccccaggaacatcggctggaaggactacacagcctaccgctggcacctgacccaccggcccaagacaggctacatccgggtgctggtgcatgagggcaagcaggtgatggctgacagcggccccatctatgaccagacctacgccggcggccgcctgggcctgtttgtgttcagccaggagatggtgtacttcagtgacctgaagtatgagtgcagggtcatctag

SEQ ID NO: 136685 - DNA, 252 bp, Artificial Sequence
  derived and/or modified sequence
atggtgtggaggctggtgctgctggccctgtgggtgtggcccagcacccaggccggccaccaggacaaggacaccacctttgacctcttcagcatcagcaacatcaacaggaagaccatcggggccaagcagttccggggccctgaccccggggtgcctgcctacagatttgtgcgctttgactacatcccccctgtgaatgctgatgacctgagcaagatcaccaagatcatgaggcagaaggagggctag

SEQ ID NO: 136686 - DNA, 3519 bp, Artificial Sequence
  derived and/or modified sequence
atggtgtggcggctggtgctgctggccctgtgggtgtggcccagcactcaggctggacatcaggacaaggatacaaccttcgaccttttttcgatttccaacatcaatagaaagactattggagctaagcagttccgcggcccggaccccggtgtgcccgcctatagattcgtgagattcgactacatacctcccgtcaatgcagacgacctctcaaaaatcacaaagataatgaggcagaaagagggattttttctgactgcacagctgaagcaggatggaaagagtcgtgggacactgctcgctctcgagggcccaggactctctcagcgacagttcgaaattgtatccaacggacctgccgatactttggaccttacatattggatcgacggaaccagacacgtcgtttcgttggaagacgtcggactggcagatagccaatggaaaaacgttaccgtgcaggtggctggagaaacatatagtctccatgtgggttgcgacctaattgatagtttcgccttggacgagcccttctatgagcacctgcaagctgagaaatccagaatgtatgtcgccaagggatcagccagagagtcgcatttccgggggttactccagaacgtccacctggtgttcgaaaactctgtggaagatatcctctcaaagaaggggtgccagcaggggcaaggggccgagatcaacgctatttccgaaaatactgagactctgcgcttaggcccgcatgtcacgactgaatatgtgggacccagtagcgagcggcggcccgaagtctgcgaacggagttgcgaagaactgggcaatatggttcaggaactctccggactacatgtccttgtgaatcagctgtctgagaacctaaagcgggtcagcaatgacaatcagtttctgtgggagctgatcggtgggcctcctaagacacgcaacatgagcgcttgttggcaagatggccgatttttcgccgaaaacgagacctgggtagtggattcctgtaccacatgcacgtgcaagaaatttaagactatttgccaccagatcacttgtcccccagcaacatgtgcctcaccctctttcgtggagggagagtgctgtcctagttgcctgcactccgtcgacggtgaagaaggatggagtccatgggccgagtggacacagtgctccgtaacctgcgggagcggaactcagcagcgcggacgatcgtgtgatgtcactagtaacacttgtctcggcccatctattcagactcgggcgtgctcattgagcaagtgcgacacaagaatacgtcaggatggaggatggtcgcattggtctccctggtctagctgcagtgttacatgcggcgtggggaatattacacggatcaggctctgtaacagccccgttccacagatgggggggaagaactgcaaaggcagcggcagagaaacgaaggcatgccagggagccccatgcccgattgacgggcgttggtctccctggagcccttggagtgcgtgtacggtcacctgtgctggggggattcgcgagagaaccagagtgtgcaacagcccagagccgcagtacgggggcaaagcctgcgttggtgatgtgcaggaaaggcagatgtgcaataaaaggtcttgtcctgtggacggctgcctgtcaaacccctgtttccccggagcccagtgcagcagttttcccgatggcagctggtcatgtggaagctgccccgtggggtttcttggcaatggcactcactgcgaggaccttgacgaatgtgccctagtgcctgacatatgcttctccacctctaaggttccacgctgcgtgaacacccagcccgggtttcattgcttgccctgcccaccacggtaccgaggtaatcaacccgttggggtaggcctggaagctgctaagacagaaaagcaagtttgtgagccggagaatccttgtaaagataagactcataattgtcacaagcacgccgaatgtatctacctgggccacttctccgatcctatgtacaagtgcgagtgccagactgggtacgcaggggatggtctgatttgcggagaggacagtgacttggatggatggcctaatttgaatctagtctgtgccacgaatgccacataccattgtattaaggataactgtccccacctgcccaacagcggacaagaagatttcgataaggacggaatcggagacgcctgcgacgatgatgatgataacgatggggttacagatgaaaaggataattgccagctcctgtttaatccaaggcaagcagactacgataaagacgaggtcggcgacaggtgtgataactgcccatatgttcacaacccagctcagatcgatactgataacaacggtgagggcgatgcctgctctgtggacatcgacggagacgatgtctttaatgaaagggataactgtccctatgtctataacacggatcaacgagacacggacggtgatggcgtgggcgatcactgcgacaattgccccttggtccataatcctgaccagaccgacgtggacaatgatctggtgggggaccaatgcgacaacaatgaagacattgacgatgacggacaccagaacaaccaggataactgtccatacatctccaacgcaaatcaggctgaccacgaccgggacggccaaggcgacgcctgcgatccggatgacgataacgacggtgtgcccgatgaccgggacaactgcaggctggtcttcaaccccgaccaggaggacctggatggcgacgggcgtggcgatatctgtaaagacgattttgacaacgataacattcctgatattgacgacgtgtgtccggagaacaacgccatctcggagaccgattttagaaactttcaaatggtcccgctcgacccaaaaggcacaacccagattgaccctaattgggtgattcggcaccagggtaaggagctggtgcagaccgccaattctgaccctggaatcgctgtaggattcgacgagttcggaagcgttgacttttctggaaccttctacgtgaacaccgatagagacgacgactacgccggctttgtttttgggtaccagagctcctcccgcttctacgtcgttatgtggaagcaggtgacccagacctactgggaggaccagcccacgcgggcgtacggttactctggggttagtttaaaagttgtgaattcaactacgggcacgggcgagcacctgaggaatgccttgtggcatacgggaaacacccctggccaagtgcgaaccctctggcacgatcctagaaatattggatggaaggactacaccgcctaccgatggcatctgactcacaggcctaagacgggttatatacgggtgctagtgcacgaagggaaacaagtcatggctgacagcgggcccatctacgaccagacgtatgctgggggcaggctgggtctgttcgtgttcagtcaagaaatggtgtactttagcgaccttaagtacgagtgcagagatatttag

SEQ ID NO: 136687 - DNA, 1293 bp, Artificial Sequence
  derived and/or modified sequence
gacgacgacaacgacggcgtgaccgacgagaaggacaactgccagctgctcttcaacccccgccaagccgattatgataaggatgaggtgggagataggtgtgataattgcccttacgtgcacaatcccgcacagattgacactgataacaatggtgaaggcgacgcatgctcggtggacatcgacggtgatgacgtgtttaacgagagagacaattgtccatacgtttacaacactgatcagcgagacactgacggtgacggcgtcggcgatcattgcgataactgcccgttagtacacaatcctgatcagaccgatgttgataacgatcttgtaggagaccaatgcgacaataacgaggatatagatgacgatgggcatcagaacaaccaggataactgcccgtacatttcgaacgccaaccaggccgatcacgatcgggacgggcaaggggatgcctgtgatccagacgatgacaatgatggggtgcctgacgatcgcgacaattgcaggctggtgttcaatcctgaccaagaggaccttgacggggatgggcgcggagacatctgtaaagacgacttcgacaacgataatattccagatattgatgacgtgtgtcctgaaaataatgctatctcagagactgattttagaaacttccagatggtccctctagatcctaaagggaccacacagatcgatcctaattgggtaatccgtcaccaaggtaaagagctcgttcagacggccaacagcgacccagggatcgcagtgggcttcgacgagtttggctccgttgatttctctggcactttttacgtgaatacagatagggatgacgactacgccggatttgtgttcggctatcaatcttcaagccgattctacgttgtcatgtggaagcaagtgacccaaacctattgggaagatcagccaacaagagcttacggatatagtggcgtgtccctgaaagtggtaaattccactacgggcaccggagagcacctgcgcaatgccctgtggcacaccggcaatactccagggcaggttcgcaccctctggcacgaccctcgcaacattgggtggaaggattataccgcttaccgctggcatctcacccaccgccccaaaaccgggtatatccgcgtgctagtgcacgagggcaaacaggtgatggcagattctgggccgatatacgaccagacctatgcagggggtaggctgggcctcttcgtgttctcccaagagatggtctatttttccgatcttaagtatgaatgtcgagtgatctag

SEQ ID NO: 136688 - DNA, 252 bp, Artificial Sequence
  derived and/or modified sequence
atggtgtggcggctggtgctgctggccctgtgggtgtggcccagcactcaagccggccaccaagacaaagacacgacctttgacctgttctctataagcaacatcaataggaaaactattggtgcaaaacagttcagagggccggacccaggggttccagcttatcgttttgtcaggtttgattatataccacctgtaaatgccgatgacctaagtaaaattaccaagattatgcgccagaaagagggttag

SEQ ID NO: 136689 - DNA, 3519 bp, Artificial Sequence
  derived and/or modified sequence
atggtctggcgtctcgtcctcctggccctatgggtgtggcccagcacgcaagccggtcatcaggacaaggatacaacatttgatcttttctccatttctaacataaacaggaagacgattggagccaagcagtttcggggacccgatcctggagtccctgcttacaggttcgtgcggtttgactacatcccacccgtgaacgctgacgacctttcaaagatcactaagattatgagacagaaagaagggttctttcttacagcccagcttaagcaggatggaaaaagtagaggcaccctgctggcattggagggccctggcctgagtcagcggcaatttgaaattgtctctaatgggcctgctgacaccctcgaccttacctattggattgatgggacgcgccacgttgttagtttggaagatgtcgggttggctgactcgcagtggaaaaatgttacggtgcaggtggcaggcgaaacctactctttacatgtgggatgcgacctgattgattcctttgctctcgatgaacctttctacgaacacttgcaggctgaaaagtccaggatgtacgtggcaaaaggaagcgccagggagtctcacttccgcggtttgttacagaatgtgcatctggtatttgagaactcggtagaggacattcttagcaaaaaggggtgccagcaggggcagggggctgaaataaatgcaatctccgagaacactgagactctaagactgggcccacatgttaccacagaatatgtggggccatcaagcgagaggcggccagaggtgtgcgaacgatcgtgcgaagaactcggtaacatggtgcaagagctctctggactccacgtactcgtgaaccagctgagcgaaaatctgaagcgagtctccaacgacaatcagtttctgtgggaacttattggaggcccaccaaaaacgagaaacatgagcgcttgttggcaggatggtaggttcttcgcagaaaacgaaacatgggtggtggacagctgcacgacctgcacttgtaagaagttcaagaccatctgtcatcaaattacatgcccccctgccacatgcgcttcccccagctttgtcgaaggagagtgctgcccgtcttgcctgcactcggtagacggcgaagaaggatggtcaccatgggctgagtggacacagtgttctgtcacttgtgggtcgggtacccagcagcggggaagaagctgcgacgtcactagcaacacatgcttaggcccttctatacagactcgtgcctgtagtctgagtaaatgcgacaccaggatcagacaggacggaggttggtcccattggagcccatggtcctcctgtagcgtcacttgtggggtcgggaatatcacaaggatcagactgtgcaattcacccgtgcctcagatgggcggaaagaattgcaaaggaagcgggcgagagaccaaggcatgccagggcgctccctgtccaatcgatggtcggtggtctccatggagtccctggtcagcctgtactgttacttgtgctggcggaatcagagaacgtacccgagtctgcaatagccccgagccccagtatgggggaaaagcctgtgtgggggatgtgcaggagcggcagatgtgtaacaaaagaagctgcccggtggatggttgtctcagcaacccttgctttcccggagcccagtgctccagcttccccgatggctcttggagctgcggctcctgtccggtcggctttttgggcaatggcacccattgcgaggacttggacgagtgcgctctggttccagatatttgcttctcaacgtctaaggtccctcgatgtgttaacactcaacctggattccactgcctgccatgcccccctcgatataggggtaaccagcctgtgggcgtagggctcgaagctgccaagactgaaaagcaggtctgtgagcctgaaaacccttgtaaggacaaaacacacaactgtcacaaacacgccgaatgtatttacttgggacatttctcagacccaatgtataagtgtgaatgccaaactgggtacgccggagacggcttgatttgtggagaggattctgatctggacggctggcccaatctcaatctggtgtgtgcaacaaacgctacatatcactgcatcaaagataactgcccccacttgcctaactctggccaagaggatttcgataaagacggcatcggagatgcctgtgacgatgatgatgataacgatggagtcactgatgaaaaggataattgccaactgttattcaacccgaggcaggccgattacgacaaggacgaagtgggagataggtgcgataattgtccctacgtgcacaaccccgctcagattgacacagacaacaatggtgagggcgacgcgtgttctgtggatatcgacggcgacgatgtcttcaacgaaagggataactgtccgtatgtgtacaacaccgaccagagggatacagacggcgatggggtgggggatcattgtgataattgtcccctggtgcacaatcctgatcagacagatgtggataatgatctggtaggtgaccagtgtgacaacaatgaagatatagatgatgatggccatcagaataaccaggataattgtccttatatcagtaacgcaaaccaggcggaccacgaccgcgatggtcagggcgatgcgtgtgaccctgacgatgataacgatggagtaccagacgacagagacaattgccgcctcgtgtttaatcccgatcaggaggatttggacggagatggacggggagatatctgtaaggacgactttgacaatgataatatccctgatatcgacgatgtttgccccgagaacaacgccataagcgaaactgacttccgcaatttccaaatggttccactggatccaaaagggactactcagatcgatcccaattgggttatccggcaccaaggtaaggagctcgtccagactgccaatagcgaccctgggatcgccgtcgggttcgatgaattcgggtctgtagatttcagcggcacattctacgtcaatacagacagagatgacgactacgctgggtttgtctttggttatcagagctcgtcccgtttctacgtggtcatgtggaaacaggtgacgcagacatattgggaggaccagcccaccagagcctacggttactccggtgtcagtctcaaggtggtcaatagcaccacgggcaccggcgaacacctgaggaatgcgctgtggcacactggaaataccccgggacaggtacgtacactctggcacgatcctagaaacatcggttggaaagattatactgcataccgctggcacttgacccatagacctaaaaccgggtacatccgagttctcgttcacgaaggaaagcaggtaatggccgattcaggacctatatatgaccagacctatgccggtgggcgtttaggcctgttcgttttcagccaggagatggtgtacttttctgacttgaagtacgaatgcagagacatctag

SEQ ID NO: 136690 - DNA, 1293 bp, Artificial Sequence
  derived and/or modified sequence
gatgatgataacgacggcgttacggacgaaaaagataattgccagttgctgttcaatcccagacaagctgactacgacaaagatgaggtgggagacaggtgcgataactgtccatacgtgcacaacccagcccaaattgacacggacaacaacggagaaggggacgcctgtagcgttgatatcgatggcgatgacgttttcaacgaaagggacaattgcccgtacgtatacaatactgatcagagagataccgacggggatggggtcggcgatcactgtgacaactgcccactagtacataatcccgaccaaactgatgtggacaatgatttagttggcgatcaatgtgacaacaacgaggatatcgacgatgacggccatcagaacaatcaagacaactgcccgtatatttccaacgctaatcaggccgaccacgatcgggacggccaaggtgatgcttgtgatcccgacgacgacaacgatggggtgcctgacgatagggacaactgtagattggtgtttaaccctgaccaagaagatctggacggagatggcaggggtgacatttgtaaggatgattttgataatgataatatccctgatatcgatgatgtctgccctgagaacaatgctatctccgaaaccgatttccgaaacttccagatggtgcccttggaccctaaaggcaccactcagattgatcctaactgggtcattagacatcagggaaaggaactggtgcagaccgccaattctgatcctggaatagctgttggttttgatgagtttggctcggtggatttttccggcacattttatgttaatactgaccgtgatgacgactatgccggttttgttttcggctaccagtcctcatcacgattctatgtcgtgatgtggaaacaggttactcagacatactgggaggatcagcctactagagcctacgggtactcaggcgtaagcctcaaggtggttaactctacgactgggaccggggaacacttaagaaacgctctgtggcacactggcaacaccccgggacaggtcagaacactgtggcacgatccaaggaacatcggatggaaggactatacagcgtaccgatggcaccttactcacaggcctaagaccgggtatattcgggttctggtgcatgaaggcaagcaggtcatggccgattcaggtcccatctatgatcagacctacgctggaggcaggttggggttattcgtcttctcccaggagatggtatactttagcgacctgaaatatgaatgtcgggttatttag

SEQ ID NO: 136691 - DNA, 252 bp, Artificial Sequence
  derived and/or modified sequence
atggtgtggagattggtccttctggccctttgggtctggccctcgacccaagccggacaccaggacaaagataccacctttgacttgtttagtatcagtaatataaaccggaagaccatcggagcgaaacagtttaggggcccagaccctggcgtgcctgcttacagattcgtgaggttcgattacatacccccagtgaacgccgatgacttgtccaaaatcacaaagatcatgagacagaaggaaggatag

SEQ ID NO: 136692 - DNA, 5811 bp, Artificial Sequence
  derived and/or modified sequence
aggaggaggagacggcatccagtacagaggggctggacttggacccctgcagcagccctgcacaggagaagcggcatataaagccgcgctgcccgggagccgctcggccacgtccaccggagcatcctgcactgcagggccggtctctcgctccagcagagcctgcgcctttctgactcggtccggaacactgaaaccagtcatcactgcatctttttggcaaaccaggagctcagctgcaggaggcaggatggtctggaggctggtcctgctggctctgtgggtgtggcccagcacgcaagctggtcaccaggacaaagacacgaccttcgaccttttcagtatcagcaacatcaaccgcaagaccattggcgccaagcagttccgcgggcccgaccccggcgtgccggcttaccgcttcgtgcgctttgactacatcccaccggtgaacgcagatgacctcagcaagatcaccaagatcatgcggcagaaggagggcttcttcctcacggcccagctcaagcaggacggcaagtccaggggcacgctgttggctctggagggccccggtctctcccagaggcagttcgagatcgtctccaacggccccgcggacacgctggatctcacctactggattgacggcacccggcatgtggtctccctggaggacgtcggcctggctgactcgcagtggaagaacgtcaccgtgcaggtggctggcgagacctacagcttgcacgtgggctgcgacctcatagacagcttcgctctggacgagcccttctacgagcacctgcaggcggaaaagagccggatgtacgtggccaaaggctctgccagagagagtcacttcaggggtttgcttcagaacgtccacctagtgtttgaaaactctgtggaagatattctaagcaagaagggttgccagcaaggccagggagctgagatcaacgccatcagtgagaacacagagacgctgcgcctgggtccgcatgtcaccaccgagtacgtgggccccagctcggagaggaggcccgaggtgtgcgaacgctcgtgcgaggagctgggaaacatggtccaggagctctcggggctccacgtcctcgtgaaccagctcagcgagaacctcaagagagtgtcgaatgataaccagtttctctgggagctcattggtggccctcctaagacaaggaacatgtcagcttgctggcaggatggccggttctttgcggaaaatgaaacgtgggtggtggacagctgcaccacgtgtacctgcaagaaatttaaaaccatttgccaccaaatcacctgcccgcctgcaacctgcgccagtccatcctttgtggaaggcgaatgctgcccttcctgcctccactcggtggacggtgaggagggctggtctccgtgggcagagtggacccagtgctccgtgacgtgtggctctgggacccagcagagaggccggtcctgtgacgtcaccagcaacacctgcttggggccctccatccagacacgggcttgcagtctgagcaagtgtgacacccgcatccggcaggacggcggctggagccactggtcaccttggtcttcatgctctgtgacctgtggagttggcaatatcacacgcatccgtctctgcaactccccagtgccccagatggggggcaagaattgcaaagggagtggccgggagaccaaagcctgccagggcgccccatgcccaatcgatggccgctggagcccctggtccccgtggtcggcctgcactgtcacctgtgccggtgggatccgggagcgcacccgggtctgcaacagccctgagcctcagtacggagggaaggcctgcgtgggggatgtgcaggagcgtcagatgtgcaacaagaggagctgccccgtggatggctgtttatccaacccctgcttcccgggagcccagtgcagcagcttccccgatgggtcctggtcatgcggctcctgccctgtgggcttcttgggcaatggcacccactgtgaggacctggacgagtgtgccctggtccccgacatctgcttctccaccagcaaggtgcctcgctgtgtcaacactcagcctggcttccactgcctgccctgcccgccccgatacagagggaaccagcccgtcggggtcggcctggaagcagccaagacggaaaagcaagtgtgtgagcccgaaaacccatgcaaggacaagacacacaactgccacaagcacgcggagtgcatctacctgggccacttcagcgaccccatgtacaagtgcgagtgccagacaggctacgcgggcgacgggctcatctgcggggaggactcggacctggacggctggcccaacctcaatctggtctgcgccaccaacgccacctaccactgcatcaaggataactgcccccatctgccaaattctgggcaggaagactttgacaaggacgggattggcgatgcctgtgatgatgacgatgacaatgacggtgtgaccgatgagaaggacaactgccagctcctcttcaatccccgccaggctgactatgacaaggatgaggttggggaccgctgtgacaactgcccttacgtgcacaaccctgcccagatcgacacagacaacaatggagagggtgacgcctgctccgtggacattgatggggacgatgtcttcaatgaacgagacaattgtccctacgtctacaacactgaccagagggacacggatggtgacggtgtgggggatcactgtgacaactgccccctggtgcacaaccctgaccagaccgacgtggacaatgaccttgttggggaccagtgtgacaacaacgaggacatagatgacgacggccaccagaacaaccaggacaactgcccctacatctccaacgccaaccaggctgaccatgacagagacggccagggcgacgcctgtgaccctgatgatgacaacgatggcgtccccgatgacagggacaactgccggcttgtgttcaacccagaccaggaggacttggacggtgatggacggggtgatatttgtaaagatgattttgacaatgacaacatcccagatattgatgatgtgtgtcctgaaaacaatgccatcagtgagacagacttcaggaacttccagatggtccccttggatcccaaagggaccacccaaattgatcccaactgggtcattcgccatcaaggcaaggagctggttcagacagccaactcggaccccggcatcgctgtaggttttgacgagtttgggtctgtggacttcagtggcacattctacgtaaacactgaccgggacgacgactatgccggcttcgtctttggttaccagtcaagcagccgcttctatgtggtgatgtggaagcaggtgacgcagacctactgggaggaccagcccacgcgggcctatggctactccggcgtgtccctcaaggtggtgaactccaccacggggacgggcgagcacctgaggaacgcgctgtggcacacggggaacacgccggggcaggtgcgaaccttatggcacgaccccaggaacattggctggaaggactacacggcctataggtggcacctgactcacaggcccaagactggctacatcagagtcttagtgcatgaaggaaaacaggtcatggcagactcaggacctatctatgaccaaacctacgctggcgggcggctgggtctatttgtcttctctcaagaaatggtctatttctcagacctcaagtacgaatgcagagatatttaaacaagatttgctgcatttccggcaatgccctgtgcatgccatggtccctagacacctcagttcattgtggtccttgtggcttctctctctagcagcacctcctgtcccttgaccttaactctgatggttcttcacctcctgccagcaaccccaaacccaagtgccttcagaggataaatatcaatggaactcagagatgaacatctaacccactagaggaaaccagtttggtgatatatgagactttatgtggagtgaaaattgggcatgccattacattgctttttcttgtttgtttaaaaagaatgacgtttacatataaaatgtaattacttattgtatttatgtgtatatggagttgaagggaatactgtgcataagccattatgataaattaagcatgaaaaatattgctgaactacttttggtgcttaaagttgtcactattcttgaattagagttgctctacaatgacacacaaatcccattaaataaattataaacaagggtcaattcaaatttgaagtaatgttttagtaaggagagattagaagacaacaggcatagcaaatgacataagctaccgattaactaatcggaacatgtaaaacagttacaaaaataaacgaactctcctcttgtcctacaatgaaagccctcatgtgcagtagagatgcagtttcatcaaagaacaaacatccttgcaaatgggtgtgacgcggttccagatgtggatttggcaaaacctcatttaagtaaaaggttagcagagcaaagtgcggtgctttagctgctgcttgtgccgctgtggcgtcggggaggctcctgcctgagcttccttccccagctttgctgcctgagaggaaccagagcagacgcacaggccggaaaaggcgcatctaacgcgtatctaggctttggtaactgcggacaagttgcttttacctgatttgatgatacatttcattaaggttccagttataaatattttgttaatatttattaagtgactatagaatgcaactccatttaccagtaacttattttaaatatgcctagtaacacatatgtagtataatttctagaaacaaacatctaataagtatataatcctgtgaaaatatgaggcttgataatattaggttgtcacgatgaagcatgctagaagctgtaacagaatacatagagaataatgaggagtttatgatggaaccttaaatatataatgttgccagcgattttagttcaatatttgttactgttatctatctgctgtatatggaattcttttaattcaaacgctgaaaagaatcagcatttagtcttgccaggcacacccaataatcagtcatgtgtaatatgcacaagtttgtttttgtttttgttttttttgttggttggtttgtttttttgctttaagttgcatgatctttctgcaggaaatagtcactcatcccactccacataaggggtttagtaagagaagtctgtctgtctgatgatggatagggggcaaatctttttcccctttctgttaatagtcatcacatttctatgccaaacaggaacaatccataactttagtcttaatgtacacattgcattttgataaaattaattttgttgtttcctttgaggttgatcgttgtgttgttgttttgctgcactttttacttttttgcgtgtggagctgtattcccgagaccaacgaagcgttgggatacttcattaaatgtagcgactgtcaacagcgtgcaggttttctgtttctgtgttgtggggtcaaccgtacaatggtgtgggagtgacgatgatgtgagtatttagaatgtaccatattttttgtaaattatttatgtttttctaaacaaatttatcgtataggttgatgaaacgtcatgtgttttgccaaagactgtaaatatttatttatgtgttcacatggtcaaaatttcaccactgaaaccctgcacttagctagaacctcatttttaaagattaacaacaggaaataaattgtaaaaaaggttttctatacatga

SEQ ID NO: 136693 - DNA, 1291 bp, Artificial Sequence
  derived and/or modified sequence
tgacgatgacaatgacggtgtgaccgatgagaaggacaactgccagctcctcttcaatccccgccaggctgactatgacaaggatgaggttggggaccgctgtgacaactgcccttacgtgcacaaccctgcccagatcgacacagacaacaatggagagggtgacgcctgctccgtggacattgatggggacgatgtcttcaatgaacgagacaattgtccctacgtctacaacactgaccagagggacacggatggtgacggtgtgggggatcactgtgacaactgccccctggtgcacaaccctgaccagaccgacgtggacaatgaccttgttggggaccagtgtgacaacaacgaggacatagatgacgacggccaccagaacaaccaggacaactgcccctacatctccaacgccaaccaggctgaccatgacagagacggccagggcgacgcctgtgaccctgatgatgacaacgatggcgtccccgatgacagggacaactgccggcttgtgttcaacccagaccaggaggacttggacggtgatggacggggtgatatttgtaaagatgattttgacaatgacaacatcccagatattgatgatgtgtgtcctgaaaacaatgccatcagtgagacagacttcaggaacttccagatggtccccttggatcccaaagggaccacccaaattgatcccaactgggtcattcgccatcaaggcaaggagctggttcagacagccaactcggaccccggcatcgctgtaggttttgacgagtttgggtctgtggacttcagtggcacattctacgtaaacactgaccgggacgacgactatgccggcttcgtctttggttaccagtcaagcagccgcttctatgtggtgatgtggaagcaggtgacgcagacctactgggaggaccagcccacgcgggcctatggctactccggcgtgtccctcaaggtggtgaactccaccacggggacgggcgagcacctgaggaacgcgctgtggcacacggggaacacgccggggcaggtgcgaaccttatggcacgaccccaggaacattggctggaaggactacacggcctataggtggcacctgactcacaggcccaagactggctacatcagagtcttagtgcatgaaggaaaacaggtcatggcagactcaggacctatctatgaccaaacctacgctggcgggcggctgggtctatttgtcttctctcaagaaatggtctatttctcagacctcaagtacgaatgcagagttatc

SEQ ID NO: 136694 - DNA, 437 bp, Artificial Sequence
  derived and/or modified sequence
acattctgctccggtaacccatgcctgtggctcgctgggctaagtcagcccctggtgaagtttcatttgccgaattcatctctcatgacaacccgatgaggtgggcattttacatgacgctacgtttcattctacggatgaggaaactgagacagagaagttaagagctcagctgcaggaggcaggatggtctggaggctggtcctgctggctctgtgggtgtggcccagcacgcaagctggtcaccaggacaaagacacgaccttcgaccttttcagtatcagcaacatcaaccgcaagaccattggcgccaagcagttccgcgggcccgaccccggcgtgccggcttaccgcttcgtgcgctttgactacatcccaccggtgaacgcagatgacctcagcaagatcaccaagatcatgcggcagaaggagggctt

SEQ ID NO: 136695 - protein, 961 aa, Artificial Sequence
  derived and/or modified sequence
MLAPRGAAVLLLHLVLQRWLAAGAQATPQVFDLLPSSSQRLNPGALLPVLTDPALNDLYVISTFKLQTKSSATIFGLYSSTDNSKYFEFTVMGRLNKAILRYLKNDGKVHLVVFNNLQLADGRRHRILLRLSNLQRGAGSLELYLDCIQVDSVHNLPRAFAGPSQKPETIELRTFQRKPQDFLEELKLVVRGSLFQVASLQDCFLQQSEPLAATGTGDFNRQFLGQMTQLNQLLGEVKDLLRQQVKETSFLRNTIAECQACGPLKFQSPTPSTVVPPAPPAPPTRPPRRCDSNPCFRGVQCTDSRDGFQCGPCPEGYTGNGITCIDVDECKYHPCYPGVHCINLSPGFRCDACPVGFTGPMVQGVGISFAKSNKQVCTDIDECRNGACVPNSICVNTLGSYRCGPCKPGYTGDQIRGCKAERNCRNPELNPCSVNAQCIEERQGDVTCVCGVGWAGDGYICGKDVDIDSYPDEELPCSARNCKKDNCKYVPNSGQEDADRDGIGDACDEDADGDGILNEQDNCVLIHNVDQRNSDKDIFGDACDNCLSVLNNDQKDTDGDGRGDACDDDMDGDGIKNILDNCPKFPNRDQRDKDGDGVGDACDSCPDVSNPNQSDVDNDLVGDSCDTNQDSDGDGHQDSTDNCPTVINSAQLDTDKDGIGDECDDDDDNDGIPDLVPPGPDNCRLVPNPAQEDSNSDGVGDICESDFDQDQVIDRIDVCPENAEVTLTDFRAYQTVVLDPEGDAQIDPNWVVLNQGMEIVQTMNSDPGLAVGYTAFNGVDFEGTFHVNTQTDDDYAGFIFGYQDSSSFYVVMWKQTEQTYWQATPFRAVAEPGIQLKAVKSKTGPGEHLRNSLWHTGDTSDQVRLLWKDSRNVGWKDKVSYRWFLQHRPQVGYIRVRFYEGSELVADSGVTIDTTMRGGRLGVFCFSQENIIWSNLKYRCNDTIPEDFQEFQTQNFDRFDN

SEQ ID NO: 136696 - DNA, 2886 bp, Artificial Sequence
  derived and/or modified sequence
atgcttgccccaagaggagccgctgtccttttgctgcacctggtcctccaaagatggttggctgccggtgcccaggccaccccccaagtatttgacttgttaccatcaagcagtcagcgcttaaatccaggagccctgcttcccgtgctgactgatcctgctctgaatgacctgtacgtgatcagcacgttcaagttgcagaccaagagtagtgcgactatttttgggctgtatagctcaacggacaattctaaatactttgagttcaccgttatggggagactgaataaagccattttacggtaccttaagaacgatgggaaagtgcatctagtagtcttcaacaacctgcagttagctgacgggagacggcaccgcatccttctcagactatcaaatctccagcgaggcgctgggtcactggagctatatttggattgcatacaggtcgattccgtgcacaatctgcctcgcgctttcgctggaccatctcagaaaccagagacaatcgaattgcgcacattccagagaaaacctcaggatttcctggaggagctgaagctggtggtacgcggtagcctgtttcaagtggcttccctgcaggactgctttctccagcagagcgaaccactggctgcgacagggaccggcgacttcaacagacagttcttgggtcagatgacacagctcaaccaacttcttggagaagtgaaagacctgctcagacagcaggtaaaagagacctcgtttctgcggaacactattgccgaatgccaggcctgcggcccactgaagttccaaagtccaacgcccagtaccgttgtgcctcccgctcctccggcacccccaactaggccccctaggcgctgtgacagcaacccttgcttcaggggagtgcagtgtaccgacagtcgggatgggttccaatgtggtccttgtcctgagggatacactggcaatgggataacatgtatcgatgtcgatgaatgcaaatatcacccctgctaccctggggttcactgcataaacctgtctcctggctttcgttgtgacgcctgtccggtgggctttactggacccatggtgcagggagtggggatttcgtttgcgaagagcaataagcaagtgtgcacggatattgacgaatgtcgcaacggcgcttgtgtgccaaactccatatgtgtaaacacattgggttcatacaggtgcggaccctgtaaacctgggtatacaggagatcagattcgcggatgcaaagccgaaagaaattgtaggaatccggaactgaatccatgcagcgtcaacgcccaatgcatagaagaacgccagggagatgtaacctgtgtgtgcggggtggggtgggcaggtgacggctacatttgcggcaaggacgtggacatagattcatatccagacgaggagctaccatgcagcgctagaaactgcaagaaagacaattgcaagtatgtgcctaactccggacaggaggatgccgaccgggacggcattggggatgcctgcgatgaagacgccgacggtgacgggattcttaacgaacaggataattgcgttctgatccataatgtggatcaacgcaatagcgataaggacatcttcggggacgcctgtgataactgtctgtctgtcctgaataatgatcagaaagacaccgacggtgacgggcgaggggatgcctgcgatgacgatatggacggcgatgggattaagaacatactagacaactgtcccaagtttccgaaccgtgaccagagagacaaagatggcgacggcgtgggcgacgcctgcgattcatgtcctgatgtaagcaatcctaaccagtccgatgtggataatgacttggtcggggacagttgcgacacaaaccaggactctgatggcgatggacatcaagattccacagacaattgcccgacagttatcaattctgctcaacttgatacagacaaagacgggatcggcgatgagtgtgatgacgacgatgataacgatggcatccctgacctagttccaccaggaccagataactgccggctggtacccaatcccgctcaggaggactctaattctgatggcgtgggggatatctgtgagtccgattttgatcaggaccaggttatagatcgcatagatgtttgccctgagaatgccgaagtcaccttgactgacttcagagcatatcagaccgtcgtgttggaccccgagggcgacgctcaaatcgaccctaattgggtggtgctaaatcagggcatggagattgtccagaccatgaattccgatcctggtctggcggtgggatacaccgcattcaacggagtcgactttgagggaaccttccacgttaacacgcagaccgacgacgactacgccggttttattttcggataccaagacagtagctctttctacgttgtcatgtggaaacagactgagcaaacctactggcaggctactcctttcagagccgttgctgagccaggtattcagctcaaggccgtcaaatcaaaaactggcccaggcgagcatctacgaaactccctgtggcacacaggtgacactagcgaccaagtgcggttattatggaaggattcccgcaatgtgggctggaaagacaaggtgtcctataggtggttccttcagcaccggcctcaagtgggatacatccgggtccgcttctacgaaggatccgagctggttgcagactcaggggtgacaatagatactacaatgcgtggcggacggttaggggtcttctgtttttctcaggaaaatatcatctggtctaatctaaaatacaggtgtaatgatacgattcccgaggactttcaggagtttcagacccaaaattttgatcgcttcgataactag

SEQ ID NO: 136697 - DNA, 2886 bp, Artificial Sequence
  derived and/or modified sequence
atgcttgctccccgaggggctgccgtacttttacttcacctggtcctgcaaagatggctggccgctggtgcgcaggccaccccccaggtattcgacttgttaccctcatcctctcagcgactgaaccccggagcccttctgcccgtccttactgatcctgcactcaatgatctgtacgtcatctctaccttcaaactgcagaccaaaagcagcgcaaccatttttggcttatacagcagcactgataactcgaagtactttgagtttactgtgatgggcagacttaataaagcgatcctgcgctatctcaaaaatgacggtaaagtccaccttgtcgtcttcaataacctgcagcttgccgatgggcgcaggcaccgcattctcctgcgtctcagcaacctacaacgaggggctggatccctggaactctacttggattgcattcaggtggactcggttcacaacttacctagagcattcgccgggcccagccagaagcccgagactatcgaactacggacatttcaacgtaaaccacaggatttcctggaggagctgaaactggtggtccgaggctccctgttccaagtcgctagtctacaagattgttttcttcagcagtctgaaccactcgctgcaaccgggacaggtgatttcaaccgccaattcctcggtcagatgactcagttaaaccaactacttggcgaagtcaaggacttattgcgtcaacaggtaaaggagacttctttcctgagaaacaccattgccgagtgccaggcttgcggcccacttaaattccaaagccccaccccaagcactgtggtcccgccggcgcctcccgcaccccccaccaggcctccgcgtcgctgcgactctaatccgtgtttccgcggagttcaatgcaccgattccagagatgggttccaatgtggcccatgtcctgagggctacaccggaaatggcattacttgtatcgatgtcgacgagtgcaagtatcatccgtgttatcccggggttcattgtattaatcttagccccgggtttcgttgtgacgcatgcccagtgggtttcacgggccccatggtccaaggcgttggtatctccttcgccaaatccaataaacaggtttgcacagacatagatgaatgcagaaatggagcttgcgtgcctaacagtatctgcgtcaacacactggggagttaccgctgtgggccttgtaagcctggatatacaggggaccagattcgagggtgcaaagctgaacgaaactgtcgcaatcctgagctgaatccctgctcggtgaatgcacagtgcattgaagagcggcagggagatgtcacctgcgtttgcggcgtgggatgggcaggagacggctacatctgcgggaaggatgtcgacattgactcttatccagacgaagagttgccatgctcagcccgcaattgcaaaaaagataattgtaagtatgtgcctaattccggacaggaagacgctgatcgagatggaatcggggacgcctgcgacgaagacgctgatggtgacggcatactcaacgagcaggacaattgcgtgcttattcataatgtggatcagcggaactcagataaagacattttcggagacgcttgcgataactgcctgtctgtgctcaataatgatcagaaggacaccgacggagatggccgcggcgatgcttgtgacgacgatatggatggcgatggcatcaagaatattctagacaattgtccaaagttccctaacagagatcagagagacaaagatggagatggggttggcgacgcatgcgactcttgccccgatgtgtcaaatccaaaccagtccgacgtagacaacgacttagtgggcgatagttgcgacaccaatcaggatagtgatggcgatggccaccaggactcaaccgacaattgtcccacagtgattaactccgctcaactagacaccgacaaggatgggatcggggacgaatgtgacgatgatgatgataacgacggcattcctgatcttgttcctccaggcccagacaattgcagactggtgcctaatcctgcacaagaggacagcaatagcgatggggtgggggacatttgtgagagtgacttcgatcaggatcaggttattgacaggatagacgtgtgtcccgagaatgcagaagtgaccctcactgactttagggcttatcaaaccgttgtcctagatcctgaaggggatgcacagatagatcctaactgggtggtgctcaaccagggtatggagattgtgcaaactatgaattcagatcccggcctcgccgtcggatacacggctttcaacggggtggactttgaaggaacatttcatgtcaatacgcaaacagacgacgactacgcaggctttatatttggttatcaggattccagctccttttacgtagttatgtggaagcagactgagcagacctactggcaggcgaccccttttagagccgtggcagagcccggcatccaactcaaagctgtaaaatccaagacaggacctggggaacatttacggaactcattgtggcacacaggcgatacctccgatcaagtcaggctactgtggaaggatagtcgtaatgtcggctggaaagataaggtctcataccgatggttcctccaacacaggccacaggtcggttacattcgagtaagattctatgagggctccgaactagtggctgactctggtgttacaatcgatacaacaatgcggggcggaagactcggggtgttttgtttctcccaggaaaacataatttggtccaacctgaagtatcggtgcaatgataccatacctgaagattttcaggaatttcagacacagaatttcgatagattcgataactag

SEQ ID NO: 136698 - DNA, 2886 bp, Artificial Sequence
  derived and/or modified sequence
atgcttgctccccgtggtgctgcggtgctactactccatcttgtcctgcagagatggctggccgccggtgcccaagcgactccacaggtgttcgacctcttaccatctagctcccagagactaaatcctggggctctcctccccgtcctcaccgatccagcactaaacgacctgtatgttattagtacttttaaacttcagaccaagtcttccgctaccatttttggtctctattcatctacagacaacagtaaatactttgagtttacagtcatgggccggcttaataaggctatattgcggtatctaaaaaacgatgggaaggtgcatctcgtcgtatttaacaatctgcagctggctgacggacgcaggcatcgaatccttttgcgactctctaatctgcagcgcggcgcgggttccttagagctttatctcgattgcatccaggtcgactccgtgcataacttaccacgagcctttgctggaccctcacagaagccagagacaattgagttacgtactttccagaggaaaccccaagattttctggaggagctgaaactggtggtcagaggcagcctgttccaagtggcttctttacaggattgtttcctccagcagtccgagccattggccgccacaggaacaggtgacttcaatagacagttcctagggcagatgacacagcttaatcaacttctgggagaagtgaaagacctattgagacagcaggtgaaggagaccagttttctgcgcaatacaatcgccgagtgtcaggcttgtggcccactgaaatttcaatctccaactccttccacagttgtaccccccgcccctcctgctcccccgactaggccccccaggcgttgcgattcaaatccctgctttagaggcgtgcagtgcaccgattctcgagacggctttcaatgcggtccctgtcccgaaggctataccggcaatggcataacctgcattgacgtcgacgaatgtaaataccatccatgttacccaggagtgcattgcattaatttatcaccgggatttcgctgcgacgcatgtcctgtcggttttactggacccatggtgcagggcgtcggaatctcatttgctaaatccaacaagcaggtatgtactgacatagatgaatgccgcaacggtgcctgtgtgccaaactcgatttgcgtcaacactctcggatcctaccgttgcggcccgtgtaaaccaggatatactggcgatcaaattaggggttgtaaagcagaaaggaactgtcgcaacccggaactaaatccctgctctgtaaatgcccagtgcatagaggaaaggcagggagacgtgacttgtgtgtgtggcgtgggatgggcgggtgatggatacatttgtggaaaggacgttgatatcgatagctaccctgacgaagaactgccttgtagcgctagaaactgtaagaaagacaactgcaaatatgtgcccaatagcggtcaggaggatgcagacagggacggaatcggagatgcatgtgacgaagacgctgatggcgatggcatcctcaatgagcaggacaactgtgttctcatccataatgtggatcagaggaactccgacaaggacatctttggcgacgcttgcgacaactgcctctcggtattgaataacgaccagaaagataccgatggtgatggacggggcgatgcttgtgatgatgatatggatggcgacggaattaaaaatatacttgacaactgccctaagttccctaacagagaccagcgggataaggatggcgacggagttggagacgcatgtgactcctgtcctgatgtctccaaccctaatcaatccgacgtggataacgacctggtgggggactcctgtgacaccaaccaggactctgacggagacgggcaccaagactccaccgataattgccccaccgtcatcaattctgcacagctcgatacagacaaagatggaataggcgacgagtgcgacgatgacgatgataatgacggaattcccgacttagtacccccaggacccgataactgccgattagtgccaaatcctgcccaagaagactccaatagcgatggcgttggggatatttgtgagtcagattttgatcaggaccaagtgatagaccgtatagatgtgtgccctgagaacgctgaagtaacattgactgactttcgcgcataccagaccgttgttctggaccccgaaggagacgctcagattgatcctaattgggtggtcttgaatcaggggatggagatcgtacagaccatgaactctgatcctggcctggccgtaggctacaccgcctttaacggtgtcgactttgaaggaacctttcatgtcaacacgcagacagacgatgactacgctggcttcattttcggctatcaggactcctcctcattttacgtggtcatgtggaaacagacagagcagacctattggcaagcaacaccctttagggcagtggcggagccaggaattcagctcaaagccgtgaaaagcaagaccggccctggagaacacctaaggaactcattgtggcacactggcgacacttcagaccaagtacggctcttgtggaaagattctcggaatgtcgggtggaaagacaaagtcagttatagatggtttctgcagcatcgaccacaggtaggttacattcgagtgcgcttttatgagggaagtgaacttgtagccgatagtggagtgacgatcgacacaactatgaggggtggccggctgggcgtgttttgtttcagccaagagaacattatatggtctaatctgaaataccgctgcaatgatactatcccagaggacttccaagagttccagacacagaattttgaccgatttgacaactag

SEQ ID NO: 136699 - DNA, 2886 bp, Artificial Sequence
  derived and/or modified sequence
atgctggcccccagaggcgccgccgtgctgctgctgcacctggtgctgcagagatggctggccgccggcgcccaggccaccccccaggtgttcgacctgctgcccagcagcagccagagactgaaccccggcgccctgctgcccgtgctgaccgaccccgccctgaacgacctgtacgtgatcagcaccttcaagctgcagaccaagagcagcgccaccatcttcggcctgtacagcagcaccgacaacagcaagtacttcgagttcaccgtgatgggcagactgaacaaggccatcctgagatacctgaagaacgacggcaaggtgcacctggtggtgttcaacaacctgcagctggccgacggcagaagacacagaatcctgctgagactgagcaacctgcagagaggcgccggcagcctggagctgtacctggactgcatccaggtggacagcgtgcacaacctgcccagagccttcgccggccccagccagaagcccgagaccatcgagctgagaaccttccagagaaagccccaggacttcctggaggagctgaagctggtggtgagaggcagcctgttccaggtggccagcctgcaggactgcttcctgcagcagagcgagcccctggccgccaccggcaccggcgacttcaacagacagttcctgggccagatgacccagctgaaccagctgctgggcgaggtgaaggacctgctgagacagcaggtgaaggagaccagcttcctgagaaacaccatcgccgagtgccaggcctgcggccccctgaagttccagagccccacccccagcaccgtggtgccccccgccccccccgccccccccaccagaccccccagaagatgcgacagcaacccctgcttcagaggcgtgcagtgcaccgacagcagagacggcttccagtgcggcccctgccccgagggctacaccggcaacggcatcacctgcatcgacgtggacgagtgcaagtaccacccctgctaccccggcgtgcactgcatcaacctgagccccggcttcagatgcgacgcctgccccgtgggcttcaccggccccatggtgcagggcgtgggcatcagcttcgccaagagcaacaagcaggtgtgcaccgacatcgacgagtgcagaaacggcgcctgcgtgcccaacagcatctgcgtgaacaccctgggcagctacagatgcggcccctgcaagcccggctacaccggcgaccagatcagaggctgcaaggccgagagaaactgcagaaaccccgagctgaacccctgcagcgtgaacgcccagtgcatcgaggagagacagggcgacgtgacctgcgtgtgcggcgtgggctgggccggcgacggctacatctgcggcaaggacgtggacatcgacagctaccccgacgaggagctgccctgcagcgccagaaactgcaagaaggacaactgcaagtacgtgcccaacagcggccaggaggacgccgacagagacggcatcggcgacgcctgcgacgaggacgccgacggcgacggcatcctgaacgagcaggacaactgcgtgctgatccacaacgtggaccagagaaacagcgacaaggacatcttcggcgacgcctgcgacaactgcctgagcgtgctgaacaacgaccagaaggacaccgacggcgacggcagaggcgacgcctgcgacgacgacatggacggcgacggcatcaagaacatcctggacaactgccccaagttccccaacagagaccagagagacaaggacggcgacggcgtgggcgacgcctgcgacagctgccccgacgtgagcaaccccaaccagagcgacgtggacaacgacctggtgggcgacagctgcgacaccaaccaggacagcgacggcgacggccaccaggacagcaccgacaactgccccaccgtgatcaacagcgcccagctggacaccgacaaggacggcatcggcgacgagtgcgacgacgacgacgacaacgacggcatccccgacctggtgccccccggccccgacaactgcagactggtgcccaaccccgcccaggaggacagcaacagcgacggcgtgggcgacatctgcgagagcgacttcgaccaggaccaggtgatcgacagaatcgacgtgtgccccgagaacgccgaggtgaccctgaccgacttcagagcctaccagaccgtggtgctggaccccgagggcgacgcccagatcgaccccaactgggtggtgctgaaccagggcatggagatcgtgcagaccatgaacagcgaccccggcctggccgtgggctacaccgccttcaacggcgtggacttcgagggcaccttccacgtgaacacccagaccgacgacgactacgccggcttcatcttcggctaccaggacagcagcagcttctacgtggtgatgtggaagcagaccgagcagacctactggcaggccacccccttcagagccgtggccgagcccggcatccagctgaaggccgtgaagagcaagaccggccccggcgagcacctgagaaacagcctgtggcacaccggcgacaccagcgaccaggtgagactgctgtggaaggacagcagaaacgtgggctggaaggacaaggtgagctacagatggttcctgcagcacagaccccaggtgggctacatcagagtgagattctacgagggcagcgagctggtggccgacagcggcgtgaccatcgacaccaccatgagaggcggcagactgggcgtgttctgcttcagccaggagaacatcatctggagcaacctgaagtacagatgcaacgacaccatccccgaggacttccaggagttccagacccagaacttcgacagattcgacaactag

SEQ ID NO: 136700 - DNA, 2886 bp, Artificial Sequence
  derived and/or modified sequence
atgttagccccgagaggagccgctgtcctcctgttacacctggtgttacagaggtggctggcagccggcgcacaggctaccccacaggttttcgaccttctaccatcctcttcgcaaaggttgaacccaggagcattacttccggtcctgaccgatcccgctttgaacgatttgtacgtgatctcaacgttcaaactgcagacaaagtcatctgcgactatctttggcttatactctagcactgacaacagcaagtactttgagttcacagtcatgggccgcctcaataaggccatcctgcgctacctgaagaacgacggaaaggtccatctggtggtctttaacaatcttcaactcgctgatggccgtcggcatcgcatcctactgcggttgagcaatcttcaaaggggcgctggatctctggaactatacctcgactgcatccaggtggactccgtgcataacttgccaagagccttcgccggtccttcacagaaacccgagacaatcgagctacgcactttccagcggaagcctcaggattttctggaggagctgaaattggtagtgcgcggatctctcttccaggtggcctcacttcaggactgctttctgcaacagtctgaacctctggccgccacaggaacaggcgacttcaaccggcagttcctgggtcaaatgactcagttaaaccagctgctcggggaggtcaaggatttgttgcggcagcaagtgaaggaaacttccttcctacggaacactatcgccgaatgccaggcatgcggacccttaaaattccagagccctacgcctagcacagtggtgcctccggccccaccagctccgcccacacggccccctcgaagatgcgactcaaacccctgcttccgaggagtgcagtgtacagatagtcgtgacggttttcaatgcggtccctgccctgagggttatacaggtaacggcattacctgcattgacgttgacgagtgcaagtaccacccatgctacccaggagtgcattgcatcaacttgtcaccagggttccgttgcgacgcgtgccctgttggcttcactggccctatggtgcagggagtgggaatctcattcgcaaagtcaaataaacaggtgtgtactgatatcgacgaatgtcggaatggcgcctgtgttcctaacagtatctgcgtcaataccctggggtcctacagatgtgggccctgcaaaccaggctacaccggcgaccagattaggggctgtaaagcagaaaggaactgtcggaatccagagctgaacccctgctccgtgaacgcacagtgcattgaggaaaggcaaggggatgtaacctgtgtgtgtggagtggggtgggccggcgacggctatatttgcgggaaagacgttgacattgatagctacccagatgaggagctgccgtgttcagccagaaactgcaagaaggataattgtaaatatgtgcccaactctggtcaggaagacgcagatcgcgacggcatcggagacgcatgcgatgaggacgcagatggcgacggtatccttaacgaacaggataactgtgtgctgattcataacgtggatcagagaaactccgataaggatatctttggagatgcatgcgacaactgcctgtctgtattgaataacgatcagaaggacaccgatggagacggtaggggcgatgcctgcgacgatgacatggacggcgacgggatcaagaatatccttgataactgcccaaagttcccgaatagagaccagagggataaggatggcgatggggtgggggatgcctgcgattcatgtcccgatgttagtaacccgaatcagagcgatgtcgacaatgatctggttggggactcctgtgatacaaaccaagacagtgacggcgacgggcaccaagacagtacagataactgtcccaccgtgataaactccgctcagctagatactgacaaagacggcatcggcgacgagtgcgatgacgacgacgataacgacggcattccagacctggtaccccccgggcctgacaactgccggctagtaccaaaccccgcgcaggaggatagcaactccgacggtgtgggggatatctgtgagtccgacttcgaccaagatcaggtcattgatcgtattgacgtttgccccgagaacgccgaagtgacccttacagacttcagggcctaccagaccgtcgtgctggaccccgagggcgacgcacagattgaccccaactgggtggttctgaatcagggtatggagatcgtgcagactatgaacagcgatcccggcctggctgtgggctatacagctttcaatggagtagacttcgagggcacgtttcacgtcaacacacagaccgatgatgactatgcaggtttcatatttggctaccaagacagctcttctttctacgtggtgatgtggaaacaaactgagcaaacctactggcaagcgactcctttcagagccgtcgctgaaccaggcattcagttgaaagccgtgaagtcaaagacagggcccggtgagcacctccgaaactctttgtggcatacgggagatacatccgaccaagtaagactgctctggaaggattccagaaacgtcggctggaaagacaaagtctcatatcggtggtttctgcagcaccgtcctcaggtgggatatatccgggtgagattttacgagggatccgagcttgtggcggacagcggggttaccattgatacaacgatgaggggcgggcggctgggcgttttttgtttcagtcaagagaacattatctggagtaacctgaaatacaggtgcaacgacaccatcccagaggattttcaggagttccaaacccagaattttgaccgttttgacaactag

SEQ ID NO: 136701 - DNA, 3222 bp, Artificial Sequence
  derived and/or modified sequence
agcagccagctccccagcaccgcacggcggggacgcgagcgcgcccccgacggcagcccggacgccgagcacgggtcacctgcggcgccggcccgggcgccgaccgaggttcaacgcacggcccggggacccccaggcggggccaacgccgccgtcgcccccggcctcgcggggagcaggaagagccaacatgctggccccgcgcggagccgccgtcctcctgctgcacctggtcctgcagcggtggctagcggcaggcgcccaggccaccccccaggtctttgaccttctcccatcttccagtcagaggctaaacccaggcgctctgctgccagtcctgacagaccccgccctgaatgatctctatgtgatttccaccttcaagctgcagactaaaagttcagccaccatcttcggtctttactcttcaactgacaacagtaaatattttgaatttactgtgatgggacgcttaaacaaagccatcctccgttacctgaagaacgatgggaaggtgcatttggtggttttcaacaacctgcagctggcagacggaaggcggcacaggatcctcctgaggctgagcaatttgcagcgaggggccggctccctagagctctacctggactgcatccaggtggattccgttcacaatctccccagggcctttgctggcccctcccagaaacctgagaccattgaattgaggactttccagaggaagccacaggacttcttggaagagctgaagctggtggtgagaggctcactgttccaggtggccagcctgcaagactgcttcctgcagcagagtgagccactggctgccacaggcacaggggactttaaccggcagttcttgggtcaaatgacacaattaaaccaactcctgggagaggtgaaggaccttctgagacagcaggttaaggaaacatcatttttgcgaaacaccatagctgaatgccaggcttgcggtcctctcaagtttcagtctccgaccccaagcacggtggtgcccccggctccccctgcaccgccaacacgcccacctcgtcggtgtgactccaacccatgtttccgaggtgtccaatgtaccgacagtagagatggcttccagtgtgggccctgccccgagggctacacaggaaacgggatcacctgtattgatgttgatgagtgcaaataccatccctgctacccgggcgtgcactgcataaatttgtctcctggcttcagatgtgacgcctgcccagtgggcttcacagggcccatggtgcagggtgttgggatcagttttgccaagtcaaacaagcaggtctgcactgacattgatgagtgtcgaaatggagcgtgcgttcccaactcgatctgcgttaatactttgggatcttaccgctgtgggccttgtaagccggggtatactggtgatcagataaggggatgcaaagcggaaagaaactgcagaaacccagagctgaacccttgcagtgtgaatgcccagtgcattgaagagaggcagggggatgtgacatgtgtgtgtggagtcggttgggctggagatggctatatctgtggaaaggatgtggacatcgacagttaccccgacgaagaactgccatgctctgccaggaactgtaaaaaggacaactgcaaatatgtgccaaattctggccaagaagatgcagacagagatggcattggcgacgcttgtgacgaggatgctgacggagatgggatcctgaatgagcaggataactgtgtcctgattcataatgtggaccaaaggaacagcgataaagatatctttggggatgcctgtgataactgcctgagtgtcttaaataacgaccagaaagacaccgatggggatggaagaggagatgcctgtgatgatgacatggatggagatggaataaaaaacattctggacaactgcccaaaatttcccaatcgtgaccaacgggacaaggatggtgatggtgtgggggatgcctgtgacagttgtcctgatgtcagcaaccctaaccagtctgatgtggataatgatctggttggggactcctgtgacaccaatcaggacagtgatggagatgggcaccaggacagcacagacaactgccccaccgtcattaacagtgcccagctggacaccgataaggatggaattggtgacgagtgtgatgatgatgatgacaatgatggtatcccagacctggtgccccctggaccagacaactgccggctggtccccaacccagcccaggaggatagcaacagcgacggagtgggagacatctgtgagtctgactttgaccaggaccaggtcatcgatcggatcgacgtctgcccagagaacgcagaggtcaccctgaccgacttcagggcttaccagaccgtggtcctggatcctgaaggggatgcccagatcgatcccaactgggtggtcctgaaccagggcatggagattgtacagaccatgaacagtgatcctggcctggcagtggggtacacagcttttaatggagttgacttcgaagggaccttccatgtgaatacccagacagatgatgactatgcaggctttatctttggctaccaagatagctccagcttctacgtggtcatgtggaagcagacggagcagacatattggcaagccaccccattccgagcagttgcagaacctggcattcagctcaaggctgtgaagtctaagacaggtccaggggagcatctccggaactccctgtggcacacgggggacaccagtgaccaggtcaggctgctgtggaaggactccaggaatgtgggctggaaggacaaggtgtcctaccgctggttcctacagcacaggccccaggtgggctacatcagggtacgattttatgaaggctctgagttggtggctgactctggcgtcaccatagacaccacaatgcgtggaggccgacttggcgttttctgcttctctcaagaaaacatcatctggtccaacctcaagtatcgctgcaatgacaccatccctgaggacttccaagagtttcaaacccagaatttcgaccgcttcgataattaaaccaaggaagcaatctgtaactgcttttcggaacactaaaaccatatatattttaacttcaattttctttagcttttaccaacccaaatatatcaaaacgttttatgtgaatgtggcaataaaggagaagagatcatttttaaaaa

SEQ ID NO: 136702 - DNA, 2886 bp, Artificial Sequence
  derived and/or modified sequence
atgctggcccccagaggagctgctgtgctgctgctgcacctggtgctgcagcgctggctggccgccggggcccaggccaccccccaggtgtttgacctgctgcccagcagcagccagaggctgaaccctggggccctgctgcctgtgctgacagatcctgccctgaatgacctgtatgtgatcagcaccttcaagctgcagaccaagagcagcgccaccatcttcggcctgtacagcagcacagacaacagcaagtactttgagttcaccgtgatgggccgcctgaacaaggccatcctgcgctacctgaagaatgatggcaaggtgcacctggtggtgttcaacaacctgcagctggctgatggaagaagacaccgcatcctgctgcggctgagcaacctgcagagaggagctggcagcctggagctgtacctggactgcatccaggtggacagcgtgcacaacctgccccgggcctttgctggccccagccagaagccagagaccatcgagctgcggaccttccagaggaagccccaggacttcctggaggagctgaagctggtggtgcggggcagcctcttccaggtggccagcctgcaggactgcttcctgcagcagagcgagcccctggccgccaccggcaccggggacttcaaccggcagttcctgggccagatgacccagctgaaccagctgctgggggaggtgaaggacctgctgcggcagcaggtgaaggagaccagcttcctgaggaacaccatcgccgagtgccaggcctgtggccccctgaagttccagagccccacccccagcacagtggtgcccccagcccccccagccccacccacccggcccccccggcgctgtgacagcaacccctgcttccggggcgtgcagtgcacagacagcagagatggcttccagtgtggcccctgcccagagggctacacaggaaatggcatcacctgcattgatgtggatgagtgcaagtaccacccctgctacccaggagtgcactgcatcaacctgagccctggcttccgctgtgatgcctgccctgtgggcttcaccggccccatggtgcagggcgtgggcatcagctttgccaagagcaacaagcaggtgtgcacagacattgatgagtgcagaaatggagcctgtgtgcccaacagcatctgtgtgaacaccctgggcagctaccgctgtggcccctgcaagccaggctacacaggagaccagatccggggctgcaaggccgagaggaactgcagaaatcctgagctgaacccctgcagcgtgaatgcccagtgcatcgaggagcggcagggagatgtgacctgtgtgtgtggggtgggctgggccggagatggctacatctgtgggaaggatgtggacatcgacagctacccagatgaggagctgccctgcagcgccaggaactgcaagaaggacaactgcaagtatgtgcccaacagcggccaggaggatgctgacagagatggcattggagatgcctgtgatgaagatgctgatggagatggcatcctgaatgagcaggacaactgtgtgctgatccacaacgtggaccagaggaacagcgacaaggacatctttggagatgcctgtgacaactgcctgtctgtgctgaacaatgaccagaaggacacagatggagatggaagaggagatgcctgtgatgatgacatggatggagatggcatcaagaacatcctggacaactgccccaagttccccaacagagaccagagggacaaggatggagatggagtgggagatgcctgtgacagctgcccagatgtgagcaaccccaaccagagtgatgtggacaatgacctggtgggggacagctgtgacaccaaccaggacagtgatggagatggccaccaggacagcacagacaactgccccaccgtcatcaacagcgcccagctggacacagacaaggatggcattggagatgaatgtgatgatgatgatgacaatgatggcatcccagacctggtgcccccaggccctgacaactgccgcctggtgcccaacccagcccaggaggacagcaacagtgatggagtgggggacatctgtgagagtgactttgaccaggaccaggtgattgacagaattgatgtgtgcccagaaaatgctgaggtgaccctgacagacttccgggcctaccagacagtggtgctggaccctgaaggagatgcccagattgaccccaactgggtggtgctgaaccagggcatggagatcgtgcagaccatgaacagcgaccccggcctggccgtgggctacacagccttcaatggagtggactttgagggcaccttccacgtgaacacccagacagatgatgattatgccggcttcatcttcggctaccaggacagcagcagcttctacgtggtgatgtggaagcagacagagcagacctactggcaggccacccccttccgggctgtggccgagcccggcatccagctgaaggctgtgaagagcaagacaggccctggagagcacctgaggaacagcctgtggcacactggagacaccagtgaccaggtgcggctgctgtggaaggacagcagaaatgtgggctggaaggacaaggtgtcctaccgctggttcctgcagcaccggccccaggtgggctacatccgggtgcgcttctatgagggcagcgagctggtggccgacagcggcgtgaccatcgacaccaccatgaggggcggccgcctgggcgtcttctgcttcagccaggagaacatcatctggagcaacctgaagtaccgctgcaatgacaccatccctgaggacttccaggagttccagacccagaactttgacagatttgacaactag

SEQ ID NO: 136703 - DNA, 2886 bp, Artificial Sequence
  derived and/or modified sequence
atgctggccccccggggcgccgccgtgctgctgctgcacctggtgctccagagatggctggctgctggagcacaagccaccccccaagtcttcgatctgttaccgtcctcaagccagagactgaatcccggcgccctcctgcctgtcttaactgaccctgcccttaacgatctgtacgtaatttctacctttaaactgcagaccaagtcaagcgccaccatatttggcttatacagctcgacggacaattccaagtactttgagttcactgtcatggggcgtttaaacaaagccatactgaggtacttgaagaacgatgggaaggttcatctagttgtgtttaataacttacaactggcagacggtaggcgacataggattctgcttcggctctctaacctccagaggggcgcgggctctttggagctttaccttgattgtatccaagtggatagcgtgcacaatctgccaagggcttttgctggaccctcccagaagcccgagacaattgagcttagaacctttcagaggaagcctcaggacttccttgaggaacttaagctggtagtacgtgggagtcttttccaagttgcttcgctacaggattgttttctgcaacaatcagaacctctggctgccacaggaacaggcgactttaatcgtcagttcttgggccagatgactcagctgaaccagctcctcggggaagtgaaggacctcctgcgacaacaggttaaggaaacgtctttcctgcgcaacactatcgcggagtgccaggcctgcggacccctgaagtttcagagcccaacgccgtctactgtcgttccaccagcacctcccgcacccccaacacgcccgccaaggcgctgcgattcaaacccttgcttccgcggcgtccaatgtacagattctagggacggatttcagtgcggcccttgccctgaaggctacaccggaaatggcattacctgtatcgatgtggacgaatgcaaataccatccttgctaccctggagtacattgtattaacctgtctccaggctttcgctgtgatgcctgtccagtgggtttcacaggccctatggtgcaaggggtcggtatatcctttgccaagtcaaacaagcaggtttgcaccgacatcgacgaatgccggaatggtgcatgtgtgcctaacagcatctgcgtgaatactctcggctcctatcggtgcgggccttgcaagcccggttacacaggtgaccagatccgggggtgcaaggcagaaaggaattgcagaaatcctgagctcaacccatgcagtgtaaacgcgcagtgcatcgaggaacgccagggagatgtgacgtgtgtttgcggtgtggggtgggccggcgatggatatatatgcggcaaggacgtggatattgactcatacccggacgaggagcttccatgttccgcccggaactgcaagaaagataactgcaagtacgttcccaactcagggcaggaggacgctgatagggacgggattggggatgcttgtgatgaagatgcagatggcgacggtattcttaatgaacaagataactgcgtcttgatccacaacgtggatcagcgaaacagcgataaggatatcttcggcgatgcgtgtgataactgcctatctgtgttgaataacgatcagaaagatacagacggagatggcagaggggacgcttgtgatgatgacatggacggtgacggtattaagaacatcttggacaattgtcccaagtttccgaatcgggatcagcgagataaagatggcgacggagtcggtgatgcatgtgactcctgcccggacgtttctaaccctaatcaatcagacgtggataacgacctggtgggcgactcatgtgacacgaatcaggatagcgatggtgacgggcatcaggactctacggataactgccctacagttattaactcagcacagctggataccgacaaggatggaattggggacgagtgtgacgatgatgacgataatgacgggatcccggatctggtcccgccagggccagataactgcagactcgtgccaaatcccgcgcaggaagatagcaattcagacggggtgggagacatatgtgagtccgacttcgaccaagatcaggtgatcgatcggatcgatgtgtgcccggagaacgctgaggtgacattgaccgatttccgtgcgtaccaaacggttgtgctggatcctgaaggagacgcccaaatcgaccctaactgggtggtgctgaaccagggcatggaaatcgtgcagacaatgaacagcgaccctggtctggcggtgggatacacagcattcaatggtgtcgatttcgaagggacctttcacgtgaacacccagactgacgatgactacgccggtttcatctttggataccaggacagtagcagtttttatgtggttatgtggaaacagactgagcaaacttactggcaagcaacaccattcagagctgtcgccgagcccggcatccaacttaaagccgtcaagagcaaaaccggaccaggggagcacctgcgaaatagcctgtggcatactggagatacatccgaccaagtgcggctactgtggaaggactccaggaatgtggggtggaaagataaggtgagttaccgctggttcttgcaacatcgccctcaggtgggctatatccgcgtccggttctacgaagggtcagaactcgtggccgattctggagttaccatagacacaacaatgcgcggcggacgccttggagtgttttgtttctcacaggaaaatataatctggtctaatctgaaataccggtgcaatgatacgatacctgaggatttccaagagttccagacccaaaactttgaccgattcgacaattag

SEQ ID NO: 136704 - RNA, 2886 nt, Artificial Sequence
  derived and/or modified sequence
augcuugcuccccgaggggcugccguacuuuuacuucaccugguccugcaaagauggcuggccgcuggugcgcaggccaccccccagguauucgacuuguuacccucauccucucagcgacugaaccccggagcccuucugcccguccuuacugauccugcacucaaugaucuguacgucaucucuaccuucaaacugcagaccaaaagcagcgcaaccauuuuuggcuuauacagcagcacugauaacucgaaguacuuugaguuuacugugaugggcagacuuaauaaagcgauccugcgcuaucucaaaaaugacgguaaaguccaccuugucgucuucaauaaccugcagcuugccgaugggcgcaggcaccgcauucuccugcgucucagcaaccuacaacgaggggcuggaucccuggaacucuacuuggauugcauucagguggacucgguucacaacuuaccuagagcauucgccgggcccagccagaagcccgagacuaucgaacuacggacauuucaacguaaaccacaggauuuccuggaggagcugaaacuggugguccgaggcucccuguuccaagucgcuagucuacaagauuguuuucuucagcagucugaaccacucgcugcaaccgggacaggugauuucaaccgccaauuccucggucagaugacucaguuaaaccaacuacuuggcgaagucaaggacuuauugcgucaacagguaaaggagacuucuuuccugagaaacaccauugccgagugccaggcuugcggcccacuuaaauuccaaagccccaccccaagcacuguggucccgccggcgccucccgcaccccccaccaggccuccgcgucgcugcgacucuaauccguguuuccgcggaguucaaugcaccgauuccagagauggguuccaauguggcccauguccugagggcuacaccggaaauggcauuacuuguaucgaugucgacgagugcaaguaucauccguguuaucccgggguucauuguauuaaucuuagccccggguuucguugugacgcaugcccaguggguuucacgggccccaugguccaaggcguugguaucuccuucgccaaauccaauaaacagguuugcacagacauagaugaaugcagaaauggagcuugcgugccuaacaguaucugcgucaacacacuggggaguuaccgcugugggccuuguaagccuggauauacaggggaccagauucgagggugcaaagcugaacgaaacugucgcaauccugagcugaaucccugcucggugaaugcacagugcauugaagagcggcagggagaugucaccugcguuugcggcgugggaugggcaggagacggcuacaucugcgggaaggaugucgacauugacucuuauccagacgaagaguugccaugcucagcccgcaauugcaaaaaagauaauuguaaguaugugccuaauuccggacaggaagacgcugaucgagauggaaucggggacgccugcgacgaagacgcugauggugacggcauacucaacgagcaggacaauugcgugcuuauucauaauguggaucagcggaacucagauaaagacauuuucggagacgcuugcgauaacugccugucugugcucaauaaugaucagaaggacaccgacggagauggccgcggcgaugcuugugacgacgauauggauggcgauggcaucaagaauauucuagacaauuguccaaaguucccuaacagagaucagagagacaaagauggagaugggguuggcgacgcaugcgacucuugccccgaugugucaaauccaaaccaguccgacguagacaacgacuuagugggcgauaguugcgacaccaaucaggauagugauggcgauggccaccaggacucaaccgacaauugucccacagugauuaacuccgcucaacuagacaccgacaaggaugggaucggggacgaaugugacgaugaugaugauaacgacggcauuccugaucuuguuccuccaggcccagacaauugcagacuggugccuaauccugcacaagaggacagcaauagcgauggggugggggacauuugugagagugacuucgaucaggaucagguuauugacaggauagacgugugucccgagaaugcagaagugacccucacugacuuuagggcuuaucaaaccguuguccuagauccugaaggggaugcacagauagauccuaacuggguggugcucaaccaggguauggagauugugcaaacuaugaauucagaucccggccucgccgucggauacacggcuuucaacgggguggacuuugaaggaacauuucaugucaauacgcaaacagacgacgacuacgcaggcuuuauauuugguuaucaggauuccagcuccuuuuacguaguuauguggaagcagacugagcagaccuacuggcaggcgaccccuuuuagagccguggcagagcccggcauccaacucaaagcuguaaaauccaagacaggaccuggggaacauuuacggaacucauuguggcacacaggcgauaccuccgaucaagucaggcuacuguggaaggauagucguaaugucggcuggaaagauaaggucucauaccgaugguuccuccaacacaggccacaggucgguuacauucgaguaagauucuaugagggcuccgaacuaguggcugacucugguguuacaaucgauacaacaaugcggggcggaagacucgggguguuuuguuucucccaggaaaacauaauuugguccaaccugaaguaucggugcaaugauaccauaccugaagauuuucaggaauuucagacacagaauuucgauagauucgauaacuag

SEQ ID NO: 136705 - RNA, 2886 nt, Artificial Sequence
  derived and/or modified sequence
augcuugcuccccguggugcugcggugcuacuacuccaucuuguccugcagagauggcuggccgccggugcccaagcgacuccacagguguucgaccucuuaccaucuagcucccagagacuaaauccuggggcucuccuccccguccucaccgauccagcacuaaacgaccuguauguuauuaguacuuuuaaacuucagaccaagucuuccgcuaccauuuuuggucucuauucaucuacagacaacaguaaauacuuugaguuuacagucaugggccggcuuaauaaggcuauauugcgguaucuaaaaaacgaugggaaggugcaucucgucguauuuaacaaucugcagcuggcugacggacgcaggcaucgaauccuuuugcgacucucuaaucugcagcgcggcgcggguuccuuagagcuuuaucucgauugcauccaggucgacuccgugcauaacuuaccacgagccuuugcuggacccucacagaagccagagacaauugaguuacguacuuuccagaggaaaccccaagauuuucuggaggagcugaaacugguggucagaggcagccuguuccaaguggcuucuuuacaggauuguuuccuccagcaguccgagccauuggccgccacaggaacaggugacuucaauagacaguuccuagggcagaugacacagcuuaaucaacuucugggagaagugaaagaccuauugagacagcaggugaaggagaccaguuuucugcgcaauacaaucgccgagugucaggcuuguggcccacugaaauuucaaucuccaacuccuuccacaguuguaccccccgccccuccugcucccccgacuaggccccccaggcguugcgauucaaaucccugcuuuagaggcgugcagugcaccgauucucgagacggcuuucaaugcggucccugucccgaaggcuauaccggcaauggcauaaccugcauugacgucgacgaauguaaauaccauccauguuacccaggagugcauugcauuaauuuaucaccgggauuucgcugcgacgcauguccugucgguuuuacuggacccauggugcagggcgucggaaucucauuugcuaaauccaacaagcagguauguacugacauagaugaaugccgcaacggugccugugugccaaacucgauuugcgucaacacucucggauccuaccguugcggcccguguaaaccaggauauacuggcgaucaaauuagggguuguaaagcagaaaggaacugucgcaacccggaacuaaaucccugcucuguaaaugcccagugcauagaggaaaggcagggagacgugacuuguguguguggcgugggaugggcgggugauggauacauuuguggaaaggacguugauaucgauagcuacccugacgaagaacugccuuguagcgcuagaaacuguaagaaagacaacugcaaauaugugcccaauagcggucaggaggaugcagacagggacggaaucggagaugcaugugacgaagacgcugauggcgauggcauccucaaugagcaggacaacuguguucucauccauaauguggaucagaggaacuccgacaaggacaucuuuggcgacgcuugcgacaacugccucucgguauugaauaacgaccagaaagauaccgauggugauggacggggcgaugcuugugaugaugauauggauggcgacggaauuaaaaauauacuugacaacugcccuaaguucccuaacagagaccagcgggauaaggauggcgacggaguuggagacgcaugugacuccuguccugaugucuccaacccuaaucaauccgacguggauaacgaccuggugggggacuccugugacaccaaccaggacucugacggagacgggcaccaagacuccaccgauaauugccccaccgucaucaauucugcacagcucgauacagacaaagauggaauaggcgacgagugcgacgaugacgaugauaaugacggaauucccgacuuaguacccccaggacccgauaacugccgauuagugccaaauccugcccaagaagacuccaauagcgauggcguuggggauauuugugagucagauuuugaucaggaccaagugauagaccguauagaugugugcccugagaacgcugaaguaacauugacugacuuucgcgcauaccagaccguuguucuggaccccgaaggagacgcucagauugauccuaauuggguggucuugaaucaggggauggagaucguacagaccaugaacucugauccuggccuggccguaggcuacaccgccuuuaacggugucgacuuugaaggaaccuuucaugucaacacgcagacagacgaugacuacgcuggcuucauuuucggcuaucaggacuccuccucauuuuacguggucauguggaaacagacagagcagaccuauuggcaagcaacacccuuuagggcaguggcggagccaggaauucagcucaaagccgugaaaagcaagaccggcccuggagaacaccuaaggaacucauuguggcacacuggcgacacuucagaccaaguacggcucuuguggaaagauucucggaaugucggguggaaagacaaagucaguuauagaugguuucugcagcaucgaccacagguagguuacauucgagugcgcuuuuaugagggaagugaacuuguagccgauaguggagugacgaucgacacaacuaugagggguggccggcugggcguguuuuguuucagccaagagaacauuauauggucuaaucugaaauaccgcugcaaugauacuaucccagaggacuuccaagaguuccagacacagaauuuugaccgauuugacaacuag

SEQ ID NO: 136706 - protein, 689 aa, Artificial Sequence
  derived and/or modified sequence
MKPPAACAGDMADAASPCSVVNDLRWDLSAQQIEERTRELIEQTKRVYDQVGTQEFEDVSYESTLKALADVEVTYTVQRNILDFPQHVSPSKDIRTASTEADKKLSEFDVEMSMREDVYQRIVWLQEKVQKDSLRPEAARYLERLIKLGRRNGLHLPRETQENIKRIKKKLSLLCIDFNKNLNEDTTFLPFTLQELGGLPEDFLNSLEKMEDGKLKVTLKYPHYFPLLKKCHVPETRRKVEEAFNCRCKEENCAILKELVTLRAQKSRLLGFHTHADYVLEMNMAKTSQTVATFLDELAQKLKPLGEQERAVILELKRAECERRGLPFDGRIRAWDMRYYMNQVEETRYCVDQNLLKEYFPVQVVTHGLLGIYQELLGLAFHHEEGASAWHEDVRLYTARDAASGEVVGKFYLDLYPREGKYGHAACFGLQPGCLRQDGSRQIAIAAMVANFTKPTADAPSLLQHDEVETYFHEFGHVMHQLCSQAEFAMFSGTHVERDFVEAPSQMLENWVWEQEPLLRMSRHYRTGSAVPRELLEKLIESRQANTGLFNLRQIVLAKVDQALHTQTDADPAEEYARLCQEILGVPATPGTNMPATFGHLAGGYDAQYYGYLWSEVYSMDMFHTRFKQEGVLNSKVGMDYRSCILRPGGSEDASAMLRRFLGRDPKQDAFLLSKGLQVGGCEPEPQVC

SEQ ID NO: 136707 - protein, 258 aa, Artificial Sequence
  derived and/or modified sequence
MFSGTHVERDFVEAPSQMLENWVWEQEPLLRMSRHYRTGSAVPRELLEKLIESRQANTGLFNLRQIVLAKVDQALHTQTDADPAEEYARLCQEILGVPATPGTNMPATFGHLAGGYDAQYYGYLWSEVYSMDMFHTRFKQEGVLNSKFPHYEVRPLRHVSLCLPLTWCDPGSGQPPESLTRNRWLPALRAGPALPGCNIALGSLQVGMDYRSCILRPGGSEDASAMLRRFLGRDPKQDAFLLSKGLQVGGCEPEPQVC

SEQ ID NO: 136708 - DNA, 2070 bp, Artificial Sequence
  derived and/or modified sequence
atgaagccccccgccgcctgcgccggcgacatggccgacgccgccagcccctgcagcgtggtgaacgacctgagatgggacctgagcgcccagcagatcgaggagagaaccagagagctgatcgagcagaccaagagagtgtacgaccaggtgggcacccaggagttcgaggacgtgagctacgagagcaccctgaaggccctggccgacgtggaggtgacctacaccgtgcagagaaacatcctggacttcccccagcacgtgagccccagcaaggacatcagaaccgccagcaccgaggccgacaagaagctgagcgagttcgacgtggagatgagcatgagagaggacgtgtaccagagaatcgtgtggctgcaggagaaggtgcagaaggacagcctgagacccgaggccgccagatacctggagagactgatcaagctgggcagaagaaacggcctgcacctgcccagagagacccaggagaacatcaagagaatcaagaagaagctgagcctgctgtgcatcgacttcaacaagaacctgaacgaggacaccaccttcctgcccttcaccctgcaggagctgggcggcctgcccgaggacttcctgaacagcctggagaagatggaggacggcaagctgaaggtgaccctgaagtacccccactacttccccctgctgaagaagtgccacgtgcccgagaccagaagaaaggtggaggaggccttcaactgcagatgcaaggaggagaactgcgccatcctgaaggagctggtgaccctgagagcccagaagagcagactgctgggcttccacacccacgccgactacgtgctggagatgaacatggccaagaccagccagaccgtggccaccttcctggacgagctggcccagaagctgaagcccctgggcgagcaggagagagccgtgatcctggagctgaagagagccgagtgcgagagaagaggcctgcccttcgacggcagaatcagagcctgggacatgagatactacatgaaccaggtggaggagaccagatactgcgtggaccagaacctgctgaaggagtacttccccgtgcaggtggtgacccacggcctgctgggcatctaccaggagctgctgggcctggccttccaccacgaggagggcgccagcgcctggcacgaggacgtgagactgtacaccgccagagacgccgccagcggcgaggtggtgggcaagttctacctggacctgtaccccagagagggcaagtacggccacgccgcctgcttcggcctgcagcccggctgcctgagacaggacggcagcagacagatcgccatcgccgccatggtggccaacttcaccaagcccaccgccgacgcccccagcctgctgcagcacgacgaggtggagacctacttccacgagttcggccacgtgatgcaccagctgtgcagccaggccgagttcgccatgttcagcggcacccacgtggagagagacttcgtggaggcccccagccagatgctggagaactgggtgtgggagcaggagcccctgctgagaatgagcagacactacagaaccggcagcgccgtgcccagagagctgctggagaagctgatcgagagcagacaggccaacaccggcctgttcaacctgagacagatcgtgctggccaaggtggaccaggccctgcacacccagaccgacgccgaccccgccgaggagtacgccagactgtgccaggagatcctgggcgtgcccgccacccccggcaccaacatgcccgccaccttcggccacctggccggcggctacgacgcccagtactacggctacctgtggagcgaggtgtacagcatggacatgttccacaccagattcaagcaggagggcgtgctgaacagcaaggtgggcatggactacagaagctgcatcctgagacccggcggcagcgaggacgccagcgccatgctgagaagattcctgggcagagaccccaagcaggacgccttcctgctgagcaagggcctgcaggtgggcggctgcgagcccgagccccaggtgtgctag

SEQ ID NO: 136709 - DNA, 2070 bp, Artificial Sequence
  derived and/or modified sequence
atgaagccccccgcggcatgtgccggcgacatggctgatgccgcttcgccctgctccgtggtgaatgacctgcgttgggatctcagcgcccagcagatcgaagagagaacacgggagctgatcgagcagacgaaacgggtgtacgaccaagtaggaactcaagagttcgaagatgtttcatatgagtccactttaaaggcgttagctgatgttgaggtcacttatacagtccaaaggaatatcctcgactttccacagcacgtttctccatctaaggacatacgtaccgcttctaccgaagcagacaaaaaactttcggaattcgacgtggagatgagtatgcgagaggacgtctaccaaaggatcgtgtggctacaggagaaggtgcagaaggattctctgaggcctgaagcagctcggtacctggagcgcctgattaaacttgggagacgcaatggtctgcacctgccgagggagacgcaggaaaatattaaaagaatcaagaagaaattaagtctgttgtgtatcgactttaataagaatctgaatgaagatacaacctttctgcccttcaccctgcaagaactcggcgggctgcccgaagacttcctcaattccttggaaaagatggaagatggcaagctgaaagtaaccctcaagtacccacattactttcctcttctaaagaagtgtcatgtgcctgagacacgcagaaaggttgaggaagccttcaattgtcgatgtaaggaggaaaattgtgccatcctgaaggagttagtgacactgcgggcacagaaatctcgcttgctaggatttcatactcacgccgattatgtgcttgagatgaacatggccaaaacctcccagacagtagccacattcctcgatgaactggcacagaaactgaagcctctgggcgagcaggaacgcgccgtgatcctggagctcaaacgcgcagaatgtgaacgtagagggctgccatttgatggtcggatacgtgcatgggatatgagatactatatgaatcaggtcgaggaaactaggtactgtgtggatcagaacttgctgaaagaatattttccagtgcaagtcgttacacatggtcttcttggcatatatcaggagctgttgggacttgctttccatcatgaagagggcgcatctgcatggcacgaggacgtgaggctctacaccgcaagggacgctgcatctggtgaagtggtgggtaaattttatctcgatctctaccctagggagggcaagtacggccatgcagcgtgtttcggattacagcctgggtgcctgcgacaggacggctctcgccagattgctattgccgctatggtggcaaatttcaccaaacccaccgctgatgccccttcactgctccagcatgatgaggtggaaacttattttcacgaatttggtcatgtgatgcatcagctttgctcacaggccgagttcgccatgttttcaggcacgcacgttgaacgggactttgtggaggcaccctcacaaatgctggaaaattgggtctgggagcaggagccgctgttaaggatgagcagacactacagaaccgggtccgctgtgcctagggaactgctggagaagctcatcgaatctcggcaggctaacacaggactgttcaacctccgccagatcgtgctggcaaaggtggatcaggcgctccatacacagactgacgccgaccccgcagaggagtacgcccggctgtgccaggagatactgggagtacctgcaacccccggcaccaacatgccagcgactttcggccatctggccggcggctatgacgcacaatactatggttacctctggtctgaggtgtactccatggacatgttccacactaggttcaaacaggaaggcgtgttgaactcaaaagtcggtatggactacaggtcctgcatcttgaggcccggaggctccgaggatgcttctgcaatgctgaggcggtttcttgggagggatccgaagcaggatgctttcctgctttcaaagggacttcaagtaggaggttgcgagcccgagccacaagtgtgctag

SEQ ID NO: 136710 - DNA, 2070 bp, Artificial Sequence
  derived and/or modified sequence
atgaagcccccagctgcctgtgccggggacatggctgatgctgccagcccctgcagcgtggtgaatgacctgcgctgggacctgagcgcccagcagatcgaggagaggacccgggagctgattgagcagaccaagagggtgtatgaccaggtgggcacccaggagtttgaagatgtgtcctatgagagcaccctgaaggccctggctgatgtggaggtgacctacacagtgcagaggaacatcctggacttcccccagcacgtgagccccagcaaggacatcagaacagccagcacagaagctgacaagaagctgtctgaatttgatgtggagatgtccatgagagaagatgtgtaccagagaattgtgtggctgcaggagaaggtgcagaaggacagcctgcggcctgaggccgcccgctacctggagcggctcatcaagctgggcagaagaaatggcctgcacctgccccgggagacccaggagaacatcaagaggatcaagaagaagctgagcctgctgtgcatcgacttcaacaagaacctgaatgaagacaccaccttcctgcccttcaccctgcaggagctgggcggcctgcctgaggacttcctgaacagcctggagaagatggaggatggcaagctgaaggtgaccctgaagtacccccactacttccccctgctgaagaagtgccacgtgcctgagaccaggaggaaggtggaggaggccttcaactgccgctgcaaggaggagaactgtgccatcctgaaggagctggtgaccctgcgggcccagaagagccggctgctgggcttccacacccacgccgactatgtgctggagatgaacatggccaagaccagccagacagtggccaccttcctggatgagctggcccagaagctgaagcccctgggggagcaggagagagctgtgatcctggagctgaagagagcagaatgtgaaagaagaggcctgccctttgatggccgcatccgggcctgggacatgagatactacatgaaccaggtggaggagacccgctactgtgtggaccagaacctgctgaaggagtacttccctgtgcaggtggtgacccacggcctgctgggcatctaccaggagctgctgggcctggccttccaccacgaggagggcgccagcgcctggcatgaagatgtgcggctgtacacagccagagatgctgccagcggggaggtggtgggcaagttctacctggacctgtacccccgggagggcaagtatggccatgctgcctgcttcggcctgcagcccggctgcctgcggcaggacggcagccggcagatcgccatcgccgccatggtggccaacttcaccaagcccacagcagatgcccccagcctgctgcagcatgatgaggtggagacctacttccatgaatttggacatgtgatgcaccagctgtgcagccaggccgagtttgccatgttcagcggcacccacgtggagcgggactttgtggaggcccccagccagatgctggagaactgggtgtgggagcaggagcccctgctgaggatgagccgccactacagaactggatctgctgtgccccgggagctgctggagaagctgattgagagccggcaggccaacacaggcctcttcaacctgcggcagatcgtgctggccaaggtggaccaggccctgcacacccagacagatgctgaccctgctgaggagtatgcccggctgtgccaggagatcctgggcgtgcctgccaccccaggcaccaacatgcctgccaccttcggccacctggccggcggctatgatgcccagtactacggctacctgtggagcgaggtgtacagcatggacatgttccacacccgcttcaagcaggagggcgtgctgaacagcaaggtgggcatggactaccgcagctgcatcctgcggcctgggggctctgaagatgccagcgccatgctgcggcgcttcctgggccgggaccccaagcaggatgccttcctgctgagcaagggcctgcaggtgggcggctgtgagcctgagccccaggtgtgctag

SEQ ID NO: 136711 - DNA, 2070 bp, Artificial Sequence
  derived and/or modified sequence
atgaagccccccgccgcctgcgccggcgacatggccgacgccgccagtccatgttcagtggtaaacgacctgcgctgggacctgagcgcccaacaaattgaggagagaacgagggagctgatcgagcagaccaagagagtgtacgaccaggtgggtacacaagagttcgaagacgtctcttacgaaagtacactgaaggccctggccgacgtggaagttacttacactgtgcagaggaatattttggatttcccccagcacgtctctcccagtaaggacattcggacggcgagtacagaagccgacaagaagctcagtgagtttgacgtagagatgagcatgcgagaggacgtataccagaggattgtgtggctgcaggaaaaggtgcagaaagactctctcagaccggaagccgctcgttaccttgagcgactgataaaacttggcagacgaaatgggctgcacctgcctcgcgaaactcaggagaatataaagcgcatcaaaaagaagttatccttgctgtgtattgactttaacaagaatctgaacgaagataccacattcttgccattcactctacaggagttagggggactccctgaggactttctcaacagtctcgagaagatggaagatggcaaactcaaagttacattaaagtatccacactatttccccttgctgaaaaagtgccacgtgcctgaaacccgacgtaaagtggaggaagccttcaactgtaggtgtaaagaggaaaactgcgccattctcaaggaactggtgaccctacgagcacagaaatctcggcttctcggctttcatacccatgcagactatgtgttagagatgaatatggccaagacttcacaaaccgttgcaacatttcttgacgaacttgcgcagaaactcaagccgctcggtgagcaggagagggctgtgatactcgagctgaaacgcgcagagtgcgaacgcaggggtctaccctttgacggccgcattcgcgcttgggatatgcggtattacatgaatcaagttgaagagactagatactgcgtagatcaaaaccttctgaaggaatatttccccgtccaggtggtcactcacggtctcttaggcatctatcaggaacttctagggctggctttccatcatgaagagggcgcgagcgcctggcacgaggacgtgagactgtacaccgccagggatgcggctagcggcgaggtggttggaaagttttacctggatttatatcctcgggagggaaagtatgggcacgcagcatgctttgggttacaaccaggatgtctgcggcaagatggatcacggcagatcgctattgctgccatggtggccaactttactaaaccaactgccgacgcccctagtctcctgcagcatgacgaagtggaaacttacttccatgagttcgggcacgtaatgcatcagctttgctcacaggcagaattcgctatgttttcgggcacccatgtggagcgggattttgtcgaggctccctctcagatgctggaaaattgggtgtgggagcaggagccactactcagaatgtcacgccactaccggaccggctcagccgtgcctagagagttgctggagaagcttattgagtccaggcaagcgaacaccggcctatttaatctgcgacaaatagtcctcgctaaggtggatcaggctctccatacacagacagacgccgaccctgccgaggagtatgctaggctctgtcaggaaattctgggcgtgcctgctactcctggtactaacatgccagctaccttcgggcatctggcaggcggctatgatgcccaatattacgggtatctctggagtgaggtgtattctatggacatgtttcacactaggtttaagcaggaaggggtgctcaacagtaaggtagggatggactaccggtcctgtattctgcggccaggcggatccgaggatgcgtcagccatgctccgtaggtttctcgggcgcgaccctaagcaagatgctttccttctctctaagggactgcaagtgggtggatgtgagccagagccgcaagtctgttag

SEQ ID NO: 136712 - DNA, 2070 bp, Artificial Sequence
  derived and/or modified sequence
atgaaacctcctgcagcctgcgcgggtgatatggccgatgccgctagtccatgctccgtcgtcaatgatttgaggtgggatctgtccgcccaacaaattgaggaacgaacccgcgagctcatcgaacagactaagagagtgtatgaccaggtgggcacacaggaatttgaggatgttagctacgagtcaactctgaaagcactggcagatgtagaagtgacctacaccgtgcagagaaatattctcgactttccccagcacgtctcccctagcaaagatatccgcacagccagtaccgaggcagataagaagttgtcagagtttgatgtggagatgtctatgagagaggatgtctatcagcggatcgtatggctacaggagaaggtgcagaaggacagtctgagacccgaggctgctaggtacctcgaaagactcatcaagctgggtaggcggaacggcctgcacctgcccagagaaactcaggagaacatcaaacgaatcaaaaagaagctaagtctgctgtgtattgattttaataaaaatctgaatgaggacactacatttctcccattcaccctgcaggagctgggaggcttgccagaggacttcctgaatagtctagagaagatggaggacggcaaactgaaggttacattgaaatatcctcattatttcccactgctaaaaaagtgtcacgtgcctgaaacccgcagaaaagtggaggaggcgttcaactgtaggtgcaaagaagagaactgtgcaatacttaaggaactggtgaccctgcgggctcagaaatctcggcttttgggttttcacactcacgcggactatgtgcttgaaatgaatatggcaaagactagccaaactgtggccacctttttagacgagctggctcaaaagctcaagcccctgggagaacaggaaagggccgtcatactggagttgaagcgagctgagtgtgaacggaggggtctgccctttgatgggagaatccgggcatgggacatgcgatattatatgaaccaggtggaggagacaaggtactgcgtggaccagaatttgctaaaagaatacttccccgtgcaggtcgtgacccacgggctcctcgggatttaccaggagctgctgggactcgcatttcaccacgaagaaggcgcttcagcctggcatgaggatgttcgtctctacacagcacgggacgccgcttctggcgaggtagtaggtaaattttatctggacctctatccccgagagggaaaatatgggcacgccgcatgcttcgggctgcagccgggttgcctgcgtcaggacggcagtcggcaaatcgccatcgctgcaatggtcgctaactttaccaaacctaccgctgacgccccaagccttctgcagcatgacgaagtggaaacctacttccatgaatttggacatgtgatgcaccagttgtgctcgcaggctgagttcgcaatgttctcagggacgcacgttgaacgcgacttcgtcgaagcccctagccaaatgctcgagaattgggtatgggagcaggagcccctgctgcgcatgagccggcattatcgaaccggcagcgcggtcccccgtgaactgctagaaaagctgatcgagagccggcaagccaacaccggcttgtttaatctgagacagattgtcttggcaaaggtagatcaggctctgcacacccagacggacgccgacccggctgaggagtatgcacggctttgccaggagatcttaggcgtccctgccacacccggtaccaatatgcccgcaaccttcgggcatctggcagggggatacgatgcacagtattatggatatttgtggagcgaggtatactctatggacatgttccatacgcggttcaagcaggaaggtgttctcaattccaaggtcggcatggattataggagctgcatcttgaggccaggcggatcagaggatgcatccgcaatgctaagaagattcctcggtagagaccctaaacaggacgccttcctcctgagtaagggcctgcaggtcggtgggtgtgagccagagccccaggtgtgttag

SEQ ID NO: 136713 - DNA, 2539 bp, Artificial Sequence
  derived and/or modified sequence
gccccgggagcgcgggcggcgggccccttggtcctcaggcggccgtggcggcggtggcggcggttgggccgaggcaggcggcctcagtggccgaggtggctggacgcgtagcaggtggaaggagggagggagccgcaggcgcagacccacccgccatgaagccccccgcagcctgtgcaggagacatggcggacgcagcatctccgtgctctgtggtaaacgacctgcggtgggacctgagtgcccagcagatagaggagcgcaccagggagctcatcgagcagaccaagcgcgtgtatgaccaggttggcacccaggagtttgaggacgtgtcctacgagagcacgctcaaggcgctggccgatgtggaggtcacctacacagttcagaggaatatccttgacttcccccagcatgtttccccctccaaggacatccggacagccagcacagaggccgacaagaagctctctgagttcgacgtggagatgagcatgagggaggacgtgtaccagaggatcgtgtggctccaggagaaagttcagaaggactcactgaggcccgaggctgcgcggtacctggagcggctaatcaagctgggccggagaaatgggcttcacctccccagagagactcaggaaaacatcaaacgcatcaagaagaagctgagccttctgtgcatcgacttcaacaagaacctgaacgaggacacgaccttcctgcccttcacgctccaggagctaggagggctccccgaggactttctgaactccctggagaagatggaggacggcaagttgaaggtcaccctcaagtacccccattacttccccctcctgaagaaatgccacgtgcctgagaccaggaggaaagtggaggaggccttcaactgccggtgcaaggaggagaactgcgctatcctcaaggagctggtgacgctgcgggcccagaagtcccgcctgctggggttccacacgcacgccgactatgtcctggagatgaacatggccaagaccagccagaccgtggccaccttcctagatgagctggcgcagaagctgaagcccctgggggagcaggagcgtgcggtgattctggagctgaagcgtgcggagtgcgagcgccggggcctgcccttcgacggccgcatccgtgcctgggacatgcgctactacatgaaccaggtggaggagacgcgctactgcgtggaccagaacctgctcaaggagtacttccccgtgcaggtggtcacgcacgggctgctgggcatctaccaggagctcctggggctggccttccaccacgaggagggcgccagtgcctggcatgaggacgtgcggctctacaccgcgagggacgcggcctcgggggaggtggtcggcaagttctacctggacctgtacccgcgggaaggaaagtacgggcacgcggcctgctttggcctgcagcccggctgcctgcggcaggatgggagccgccagatcgccatcgcggccatggtggccaacttcaccaagcccacagccgacgcgccctcgctgctgcagcatgacgaggtggagacctacttccatgagtttggccacgtgatgcaccagctctgctcccaggcggagttcgccatgttcagcgggacccacgtggagcgggactttgtggaggcgccgtcgcagatgctggagaactgggtgtgggagcaggagccgctgctgcggatgtcgcggcactaccgcacaggcagcgccgtgccccgggagctcctggagaagctcattgagtcccggcaggccaacacaggcctcttcaacctgcgccagatcgtcctcgccaaggtggaccaggccctgcacacgcagacggacgcagaccccgccgaggagtatgcgcggctctgccaggagatcctcggggtcccggccacgccaggaaccaacatgcctgcaaccttcggccatctggcaggtggctacgacgcccagtactacgggtacctgtggagcgaggtgtattccatggacatgttccacacgcgcttcaagcaggagggtgtcctgaacagcaaggttggcatggattacagaagctgcatcctgagacccggcggttccgaggatgccagcgccatgctgaggcgcttcctgggccgtgaccccaagcaggacgccttcctcctgagcaaggggctgcaggtcgggggctgcgagcccgagccgcaggtctgctgaggcctggcactgcgactgcccagtctggcctgcgctcccgccgccctggtgccttagcccccggcacaggatggggcaggctctggcacagtgcctgggactggcagggtggctgagcggctgtcttgcctcttgtcattgtctgtccccacccggtcgtggcccacccggctagagacggcgtcctcaaggcatctggagggctttcgtggctgccagggcctggtctttgttgcactaacacgtctcctctctgggaaacgtcccttgtcaggagacggctcttctttgaaatgaggtcattaaaaggaaac

SEQ ID NO: 136714 - protein, 490 aa, Artificial Sequence
  derived and/or modified sequence
MEQKPSKVECGSDPEENSARSPDGKRKRKNGQCSLKTSMSGYIPSYLDKDEQCVVCGDKATGYHYRCITCEGCKGFFRRTIQKNLHPTYSCKYDSCCVIDKITRNQCQLCRFKKCIAVGMAMDLVLDDSKRVAKRKLIEQNRERRRKEEMIRSLQQRPEPTPEEWDLIHIATEAHRSTNAQGSHWKQRRKFLPDDIGQSPIVSMPDGDKVDLEAFSEFTKIITPAITRVVDFAKKLPMFSELPCEDQIILLKGCCMEIMSLRAAVRYDPESDTLTLSGEMAVKREQLKNGGLGVVSDAIFELGKSLSAFNLDDTEVALLQAVLLMSTDRSGLLCVDKIEKSQEAYLLAFEHYVNHRKHNIPHFWPKLLMKEREVQSSILYKGAAAEGRPGGSLGVHPEGQQLLGMHVVQGPQVRQLEQQLGEAGSLQGPVLQHQSPKSPQQRLLELLHRSGILHARAVCGEDDSSEADSPSSSEEEPEVCEDLAGNAASP

SEQ ID NO: 136715 - DNA, 2474 bp, Artificial Sequence
  derived and/or modified sequence
cgcctctgccggaggagccgcggggccgccacactcgccccccgccccccccgcgctcactcgcactcacacccgggcgcaggaggcgggcggcccgggccccaccggccccccatggacgcccccagcacggggcgctgagacccccgcgtcgctgcccagcccggtccggcgcgccacgccgagggatctctggacaggacaagactccgaagctactcccccagcacacagcccgggacccacaaacccagcttgcccccagccctcccacctgccactccctggcccctcccaccgcccgccccccttggggcgcagggcatggtgtgaaaggccaagtgctgaggcgggtatcatgggtgctgtgccctagggcctgggtggcagggggtgggtggcctgtgggtgtgccgggggggccagtgtgcccaccccagtctcttggcgtgctggagggcatcctggatggaattgaagtgaatggaacagaagccaagcaaggtggagtgtgggtcagacccagaggagaacagtgccaggtcaccagatggaaagcgaaaaagaaagaacggccaatgttccctgaaaaccagcatgtcagggtatatccctagttacctggacaaagacgagcagtgtgtcgtgtgtggggacaaggcaactggttatcactaccgctgtatcacttgtgagggctgcaagggcttctttcgccgcacaatccagaagaacctccatcccacctattcctgcaaatatgacagctgctgtgtcattgacaagatcacccgcaatcagtgccagctgtgccgcttcaagaagtgcatcgccgtgggcatggccatggacttggttctagatgactcgaagcgggtggccaagcgtaagctgattgagcagaaccgggagcggcggcggaaggaggagatgatccgatcactgcagcagcgaccagagcccactcctgaagagtgggatctgatccacattgccacagaggcccatcgcagcaccaatgcccagggcagccattggaaacagaggcggaaattcctgcccgatgacattggccagtcacccattgtctccatgccggacggagacaaggtggacctggaagccttcagcgagtttaccaagatcatcaccccggccatcacccgtgtggtggactttgccaaaaaactgcccatgttctccgagctgccttgcgaagaccagatcatcctcctgaaggggtgctgcatggagatcatgtccctgcgggcggctgtccgctacgaccctgagagcgacaccctgacgctgagtggggagatggctgtcaagcgggagcagctcaagaatggcggcctgggcgtagtctccgacgccatctttgaactgggcaagtcactctctgcctttaacctggatgacacggaagtggctctgctgcaggctgtgctgctaatgtcaacagaccgctcgggcctgctgtgtgtggacaagatcgagaagagtcaggaggcgtacctgctggcgttcgagcactacgtcaaccaccgcaaacacaacattccgcacttctggcccaagctgctgatgaaggagagagaagtgcagagttcgattctgtacaagggggcagcggcagaaggccggccgggcgggtcactgggcgtccacccggaaggacagcagcttctcggaatgcatgttgttcagggtccgcaggtccggcagcttgagcagcagcttggtgaagcgggaagtctccaagggccggttcttcagcaccagagcccgaagagcccgcagcagcgtctcctggagctgctccaccgaagcggaattctccatgcccgagcggtctgtggggaagacgacagcagtgaggcggactccccgagctcctctgaggaggaaccggaggtctgcgaggacctggcaggcaatgcagcctctccctgaagccccccagaaggccgatggggaaggagaaggagtgccataccttctcccaggcctctgccccaagagcaggaggtgcctgaaagctgggagcgtgggctcagcagggctggtcacctcccatcccgtaagaccaccttcccttcctcagcaggccaaacatggccagactcccttgctttttgctgtgtagttccctctgcctgggatgcccttccccctttctctgcctggcaacatcttacttgtcctttgaggccccaactcaagtgtcacctccttccccagctcccccaggcagaaatagttgtctgtgcttccttggttcatgcttctactgtgacacttatctcactgttttataattagtcgggcatgagtctgtttcccaagctagactgtgtctgaatcatgtctgtatccccagtgcccggtgcagggcctggcatagagtaggtactccataaaaggtgtgttgaattgaaaaaaaaaaaaaaaaaaaaaaaaaaaaaaaaaaa

SEQ ID NO: 136716 - DNA, 1473 bp, Artificial Sequence
  derived and/or modified sequence
atggagcagaagcccagcaaggtggagtgcggcagcgaccccgaggagaacagcgccagaagccccgacggcaagagaaagagaaagaacggccagtgcagcctgaagaccagcatgagcggctacatccccagctacctggacaaggacgagcagtgcgtggtgtgcggcgacaaggccaccggctaccactacagatgcatcacctgcgagggctgcaagggcttcttcagaagaaccatccagaagaacctgcaccccacctacagctgcaagtacgacagctgctgcgtgatcgacaagatcaccagaaaccagtgccagctgtgcagattcaagaagtgcatcgccgtgggcatggccatggacctggtgctggacgacagcaagagagtggccaagagaaagctgatcgagcagaacagagagagaagaagaaaggaggagatgatcagaagcctgcagcagagacccgagcccacccccgaggagtgggacctgatccacatcgccaccgaggcccacagaagcaccaacgcccagggcagccactggaagcagagaagaaagttcctgcccgacgacatcggccagagccccatcgtgagcatgcccgacggcgacaaggtggacctggaggccttcagcgagttcaccaagatcatcacccccgccatcaccagagtggtggacttcgccaagaagctgcccatgttcagcgagctgccctgcgaggaccagatcatcctgctgaagggctgctgcatggagatcatgagcctgagagccgccgtgagatacgaccccgagagcgacaccctgaccctgagcggcgagatggccgtgaagagagagcagctgaagaacggcggcctgggcgtggtgagcgacgccatcttcgagctgggcaagagcctgagcgccttcaacctggacgacaccgaggtggccctgctgcaggccgtgctgctgatgagcaccgacagaagcggcctgctgtgcgtggacaagatcgagaagagccaggaggcctacctgctggccttcgagcactacgtgaaccacagaaagcacaacatcccccacttctggcccaagctgctgatgaaggagagagaggtgcagagcagcatcctgtacaagggcgccgccgccgagggcagacccggcggcagcctgggcgtgcaccccgagggccagcagctgctgggcatgcacgtggtgcagggcccccaggtgagacagctggagcagcagctgggcgaggccggcagcctgcagggccccgtgctgcagcaccagagccccaagagcccccagcagagactgctggagctgctgcacagaagcggcatcctgcacgccagagccgtgtgcggcgaggacgacagcagcgaggccgacagccccagcagcagcgaggaggagcccgaggtgtgcgaggacctggccggcaacgccgccagcccctag

SEQ ID NO: 136717 - DNA, 1473 bp, Artificial Sequence
  derived and/or modified sequence
atggagcagaaacctagcaaggttgaatgcgggtccgatccggaagaaaattcagccagaagtccagacgggaagcggaagcgaaaaaacggtcaatgtagccttaagacctcaatgagtggctacatcccctcctatctggacaaggatgaacagtgtgtggtctgcggcgacaaagcaactggatatcactaccggtgtatcacctgcgagggatgtaaggggttctttcgcagaaccatacagaagaatctgcacccaacttattcttgtaagtatgatagctgttgtgttatcgataaaattaccagaaaccagtgtcaactttgtaggttcaagaagtgtatcgccgtggggatggccatggacctagtccttgatgacagcaaacgggttgctaaacgcaaattaatcgaacagaaccgggaaagacggaggaaggaagaaatgatccgcagcttacaacaaaggcctgagccaacacctgaggaatgggatctgattcacatcgctacagaggctcatcggagcacaaatgcccagggatctcactggaagcaaaggcgcaagtttttacccgacgacatcggacagtctcccattgtgagtatgcctgacggcgacaaggtggaccttgaggctttttcagaattcaccaagatcattacacccgcgataacccgggtggttgatttcgctaaaaagctacctatgttcagcgagctcccctgtgaagatcagatcatcctactgaagggctgttgcatggaaataatgagtctcagagccgccgtccggtacgacccagaaagcgacactcttactctcagcggggaaatggctgtgaagagggagcagcttaaaaatggcgggctcggcgtggtgtccgatgcgatctttgaactgggaaagtctttatcagctttcaacctggacgacaccgaagtcgcactgctccaggcagtgctgctgatgtctaccgacagatctgggttgctgtgtgtggataagatcgaaaagtcgcaggaggcatatctgctggcttttgagcactatgttaatcaccggaagcacaacatccctcatttttggccaaagctccttatgaaggaacgcgaggttcagtcttccatcctgtacaagggagccgctgccgaaggacgccccggcgggtcattgggagtgcaccccgaagggcagcagttacttggcatgcacgtagtgcagggtcctcaggtgcggcagctggagcagcagctcggggaggccgggtcccttcaaggacccgtgctccagcatcaatctcccaaatcaccccaacagcgtctgctcgaactgttgcaccggagcgggattcttcacgcgcgcgcagtctgcggagaagacgacagcagtgaggcagattcaccctctagtagcgaagaagagccggaagtttgtgaagatctcgccggcaatgccgcgtccccctag

SEQ ID NO: 136718 - DNA, 1473 bp, Artificial Sequence
  derived and/or modified sequence
atggagcaaaagccaagcaaggttgagtgtgggtctgaccccgaagagaattcggctcgatcacctgatggtaagcggaagagaaaaaacggacagtgtagccttaagacatctatgtcggggtatataccgtcttatctggacaaggacgaacaatgtgtggtgtgcggcgacaaagctacaggctaccattatcgatgtataacttgtgaaggatgcaagggttttttccgccggaccatccagaaaaacctgcacccaacttacagttgcaagtatgatagctgttgcgtgatagacaagattactcggaatcaatgtcagctttgccggttcaagaagtgtattgctgttgggatggctatggatttagtcttggacgactcaaaacgcgtggctaaaagaaaacttatagagcaaaatagagagcgaagacggaaagaggaaatgattcgcagcttgcaacaaaggcctgaaccaactccggaagagtgggatctaatccacatagcaactgaagcccacagatcaacaaatgcgcagggatctcattggaagcagcgaagaaagttcctcccggacgacattggccaatcccccattgtctctatgccagacggcgacaaggttgacctggaggcttttagcgaattcaccaaaattatcacaccagctatcacgcgagttgtcgacttcgctaaaaagctacccatgttctcggagctcccctgtgaggatcagatcattctgttgaagggatgttgcatggagattatgtccctgcgtgccgctgtgcgttatgaccctgaaagtgatacccttaccctcagcggagagatggccgttaagagggaacagcttaagaacggaggattgggggtggttagtgacgcaatatttgaactcggtaaatctctgtcagccttcaacctggacgatacggaggtggcactactgcaagctgtgctgctgatgagcactgatcggagcgggctcctgtgcgtggacaagatagagaagtcccaggaggcataccttctggcattcgagcactacgttaatcacaggaaacacaatataccccatttttggcctaagcttctcatgaaagagcgtgaggtccagagcagtatcttatacaagggggctgccgcggaaggtcggccaggggggtctcttggggtacatccagagggtcagcaactgctaggcatgcacgtcgttcaggggccacaggtcagacagttggaacagcagctgggtgaggcaggaagcctgcaagggcctgtgcttcagcaccagtctccaaagagcccgcagcagcgcctgctggagctgctgcatcggagcgggatcctccacgcaagagcggtttgcggcgaggatgactcctccgaggcagacagtccaagcagttctgaggaggaaccagaggtctgtgaagatctagccgggaatgccgcctcaccctag

SEQ ID NO: 136719 - DNA, 1473 bp, Artificial Sequence
  derived and/or modified sequence
atggagcagaagcccagcaaggtggagtgtggcagtgaccctgaggagaacagcgcccggagcccagatggcaagaggaagaggaagaatggccagtgcagcctgaagacctccatgagcggctacatccccagctacctggacaaggatgagcagtgtgtggtgtgtggggacaaggccaccggctaccactaccgctgcatcacctgtgagggctgcaagggcttcttccggaggaccatccagaagaacctgcaccccacctacagctgcaagtatgacagctgctgcgtgattgacaagatcaccaggaaccagtgccagctgtgccgcttcaagaagtgcatcgctgtgggcatggccatggacctggtgctggatgacagcaagagggtggccaagaggaagctgattgagcagaaccgggagaggaggaggaaggaggagatgatccgcagcctgcagcagaggcctgagcccaccccagaggagtgggacctgatccacatcgccacagaggcccacaggagcaccaatgcccagggcagccactggaagcagaggaggaagttcctgcctgatgacatcggccagagccccatcgtgtccatgccagatggagacaaggtggacctggaggccttcagcgagttcaccaagatcatcaccccagccatcaccagggtggtggactttgccaagaagctgcccatgttcagcgagctgccctgtgaggaccagatcatcctgctgaagggctgctgcatggagatcatgagcctgcgggctgctgtgcgctatgaccctgagagtgacaccctgaccctgtctggagagatggctgtgaagcgggagcagctgaagaatggaggcctgggcgtggtgtctgatgccatctttgagctgggcaagagcctgagcgccttcaacctggatgacacagaggtggccctgctgcaggccgtgctgctgatgagcacagacaggagcggcctgctgtgtgtggacaagattgagaagagccaggaggcctacctgctggcctttgagcactacgtgaaccacaggaagcacaacatcccccacttctggcccaagctgctgatgaaggagcgggaggtgcagagcagcatcctgtacaagggagctgctgctgagggccggcctgggggcagcctgggcgtgcaccctgagggccagcagctgctgggcatgcacgtggtgcagggcccccaggtgcggcagctggagcagcagctgggggaggccggcagcctgcagggccctgtgctgcagcaccagagccccaagagcccccagcagaggctgctggagctgctgcacaggagcggcatcctgcacgcccgggctgtgtgtggagaagatgacagcagcgaggccgacagccccagcagcagcgaggaggagcctgaggtgtgtgaggacctggccggaaatgctgccagcccctag

SEQ ID NO: 136720 - DNA, 1473 bp, Artificial Sequence
  derived and/or modified sequence
atggagcagaagcccagcaaggtggagtgcggcagcgaccccgaggagaatagcgcccggtcccccgatggaaagcgcaaacgaaaaaatggacaatgttctcttaaaactagcatgtcagggtatatcccctcttaccttgataaagatgagcaatgcgtggtgtgcggcgataaagctaccggctatcactaccgctgcattacctgcgaaggttgtaaaggctttttccggagaacaattcagaagaacttgcacccgacatactcctgtaaatacgattcatgctgtgtgattgataaaataactagaaaccaatgtcagctctgccgattcaagaaatgcatcgcagtgggcatggcaatggacctggtcctggacgactccaaacgcgtcgccaagcgaaagcttatagaacagaatcgtgagcggcgccggaaagaggagatgatcaggagcctgcagcagcgtccagagccaacacccgaagagtgggacttgatccacattgccacagaagctcatcgctccacaaacgcacagggaagccactggaaacagaggcgcaaatttctcccagatgacattgggcagtctccaatcgtgtctatgcctgacggtgataaagtggacctcgaggcattctccgagttcacgaagattatcacacctgcgatcacacgggtagtggattttgctaagaagttgcctatgttttctgagttaccatgcgaagatcagatcatcctcctcaaaggctgctgcatggagatcatgtctctcagagcagcagtgaggtatgatccggagtccgatactctcacactaagtggcgaaatggccgtgaaacgcgagcagttgaaaaacggcggactcggcgtcgtctcggacgccatctttgaacttggtaagtctctaagtgcgtttaacctggacgatactgaggtcgctctcctccaggctgtgctactcatgagtacagatagatctggactgttatgcgtggacaagatcgaaaagagccaggaagcttacttgttggcgttcgagcactacgtgaaccacaggaagcacaacataccgcacttctggcccaaactgcttatgaaggaaagagaggtgcagagttccatcctgtataaaggggcggccgcagagggccgccccggaggcagcctgggagtgcaccccgaggggcagcagctgctgggtatgcatgtagtacagggccctcaggtgcgccagctggagcaacagttgggagaggcaggctccttgcaagggccggtccttcagcatcagtctcctaaatcacctcagcaacgcttattagagttacttcaccgatccggaatcctacacgctcgggcagtctgcggtgaagacgattccagcgaagccgacagtccatcctcatcagaggaggaaccggaggtatgcgaggatttggcaggaaacgctgcatcgccctag

SEQ ID NO: 136721 - DNA, 1473 bp, Artificial Sequence
  derived and/or modified sequence
atggagcagaagcccagcaaggtggagtgcggcagcgaccccgaggagaattctgccaggagtcccgacggtaagaggaagaggaagaatgggcaatgctctctaaaaacgtcgatgtctgggtatataccctcctacttagacaaggacgaacaatgtgtggtttgtggggataaagcgaccgggtaccattaccgatgtattacctgtgagggttgtaaaggattttttcggcgaacaatacagaagaatctgcaccctacctacagctgcaaatacgatagctgttgcgtcattgataaaatcactcggaatcaatgccagctgtgtagattcaagaagtgcatagcagttgggatggcgatggatctggtgctcgatgattctaagagggtggcaaaacgaaagctcatcgagcaaaatagagagcgccggcgcaaagaggagatgataagaagtctgcagcaaaggccagagcccacgcccgaagagtgggatctgatccacatagcaacagaggcccatcggtccacgaatgctcaaggctctcactggaaacagaggaggaaatttttacccgatgatatcggtcagtccccaattgtgagtatgccagacggggacaaggtggatttggaagccttttctgaattcacaaaaatcataaccccagctattacgagggttgtcgacttcgctaagaaactccccatgttctccgagctaccttgcgaggaccagataatccttttgaagggttgctgcatggaaattatgagcctgagagccgcggtcaggtacgatcccgagtcagatactctgacactgtcaggggagatggcagtgaagagagagcagctgaaaaacggtggtttgggggtggtatccgacgccatttttgagcttgggaaatccctaagcgcgtttaacctggacgataccgaggtcgctttgctgcaggctgtcttactaatgtcaacagaccgctcgggccttctatgtgtcgataagatcgagaagtcccaagaggcgtatctgctagccttcgaacactatgttaatcaccgcaaacataacatccctcacttttggccgaaactgcttatgaaagagcgcgaggtacagtcatccatcctgtacaagggggccgcggctgagggccggccaggcgggtcattgggcgtgcacccagagggacagcagctcctggggatgcacgtcgtccagggtccccaggtgcgccagttggaacagcagttaggcgaggctgggtccctgcagggtcctgtccttcagcatcagtcccccaagagtccccagcagagactgctcgagctgctgcataggtcaggcattcttcatgcccgtgccgtatgcggagaggatgattcttccgaggctgattctccatcttccagcgaagaagagcccgaagtgtgcgaggacttggcaggaaacgccgcctctccttag

SEQ ID NO: 136722 - DNA, 1473 bp, Artificial Sequence
  derived and/or modified sequence
atggaacagaaaccgtccaaggtggagtgtggtagcgatcccgaggagaacagtgccaggtcacctgatggcaagaggaaaaggaagaacggccagtgcagccttaagacgtcaatgtcaggatacatcccttcctatctggataaggatgaacagtgcgtcgtgtgtggggataaagcaacgggctaccactaccgctgcataacctgcgaaggctgcaagggcttttttcggagaaccattcagaagaacctgcatccaacctactcgtgcaagtatgactcctgttgcgtgatcgacaagattaccagaaaccagtgtcagctgtgcagattcaagaagtgcattgcagtcggcatggccatggatctagtgttggatgacagtaagagggttgctaagcgaaaactaatagagcagaacagggagaggcgcaggaaagaagaaatgatcaggagtttgcagcagagacccgaacccactcctgaagagtgggatctgatacatatagccacagaggcacatagatcgacaaacgcacagggcagccactggaaacagcgtcgcaaatttctccccgatgacatagggcaatcgcctatcgtgtcgatgcccgatggagataaggtggaccttgaagccttcagcgagtttaccaagattatcacccctgccataactagggtggtggacttcgcaaagaaactgccaatgttcagtgaactgccttgtgaggatcaaatcatactcttaaaggggtgttgtatggagattatgtccctcagagcggcagtgcggtacgatcccgagagcgatacactgacgctctccggagagatggctgtcaagagagagcaacttaaaaatggcggtctgggagtggtgagcgatgcgatctttgagcttgggaagagcctgagcgcatttaacctggacgacaccgaagttgccctgttgcaggccgtgctcctcatgagcacggatcgttcaggactgttgtgcgtggataaaatagagaaaagccaggaagcttacctcctggccttcgaacactatgtgaaccatcggaaacataacatcccacatttctggcccaagctcctcatgaaagagcgggaagtacaatcgagcattctctacaaaggcgcagccgctgaagggaggcccggaggctcccttggcgtccaccccgaaggtcagcagttacttggcatgcacgtagtgcaaggcccacaggtgcgacagcttgagcagcagttaggagaggcaggctctttgcagggccctgtgctccagcaccagagcccaaaatccccccagcagcgcttactggagctgctgcacaggtcaggtatactccacgcccgtgccgtctgcggcgaagatgacagcagtgaggcagattcccccagcagttcagaggaggagcctgaagtgtgcgaggacttggccggaaatgctgctagcccctag

SEQ ID NO: 136723 - DNA, 1473 bp, Artificial Sequence
  derived and/or modified sequence
atggagcagaaacctagtaaggtggaatgcggctctgaccctgaggaaaactccgctaggtctcctgatggcaagagaaaacgcaagaatgggcagtgttctctcaagactagcatgagcgggtatataccatcctatctcgataaggacgagcagtgtgtcgtttgtggggacaaggcaactggctatcactaccgttgcattacatgtgagggatgcaagggattttttagacgtaccatccagaagaacctgcacccaacctattcctgcaaatatgactcctgttgtgtcattgataagatcacccggaatcaatgccaactctgcagattcaaaaagtgcatagccgtggggatggcaatggacctcgtgctcgacgattcgaagagagtagctaagcggaagttgattgaacagaatcgcgagagaagacggaaggaagagatgatccggagtctccaacagagaccggagcccacacctgaggaatgggacctgatccatatagccaccgaagctcacagaagcacgaatgctcagggctctcactggaaacagcggaggaaattcttgcctgacgacattggtcagagccccatagtctctatgcccgacggcgataaagttgatctcgaggctttcagcgagttcactaaaattatcacccccgctataacgagagtagtggatttcgccaagaaactgccaatgttttctgagctcccatgcgaagaccaaattattctgctgaaaggatgctgcatggagatcatgagcctgagagcagccgtgcgctatgaccccgagtcagatacattgacgctgagtggggaaatggccgtgaagagagagcagctgaaaaatgggggattgggcgtggtttcagatgccattttcgagctgggcaaaagccttagcgcatttaatctggatgataccgaggtagcgctcctgcaggctgtgctactcatgtcaacagatcggagcggcctgctgtgcgttgacaaaattgaaaaatcacaggaagcctatctcctggcatttgaacactacgttaaccacagaaagcacaacattccccacttttggcccaaattactgatgaaggaaagagaagtgcagtcctctatcctttacaaaggagcggcagccgagggtcggcctggtggatccctgggggttcaccccgaagggcaacagctgctgggaatgcacgtggtacagggcccacaggtgcgtcagctcgagcaacagctgggtgaagcaggttccctgcagggacccgtcctccagcaccagagtcccaaatctccccagcagagacttctcgagctgcttcatcgttcaggcatcctgcatgcccgagcagtctgcggtgaggatgacagtagcgaggccgactctccctcctcgtcagaagaagagcctgaggtgtgcgaagatctggccggaaacgcagcatcaccatag

SEQ ID NO: 136724 - DNA, 2538 bp, Artificial Sequence
  derived and/or modified sequence
gaggcggcctgcagggagcagccgcgagccggccgggcgcgccgagcccgagccccagccggagcggggcgggggagggaggagccagagcggccgccgcctctgccggaggagccgcggggccgccacactcgccccccgccccccccgcgctcactcgcactcacacccgggcgcaggaggcgggcggcccgggccccaccggccccccatggacgcccccagcacggggcgctgagacccccgcgtcgctgcccagcccggtccggcgcgccacgccgagggatctctggacaggacaagactccgaagctactcccccagcacacagcccgggacccacaaacccagcttgcccccagccctcccacctgccactccctggcccctcccaccgcccgccccccttggggcgcagggcatggtgtgaaaggccaagtgctgaggcgggtatcatgggtgctgtgccctagggcctgggtggcagggggtgggtggcctgtgggtgtgccgggggggccagtgtgcccaccccagtctcttggcgtgctggagggcatcctggatggaattgaagtgaatggaacagaagccaagcaaggtggagtgtgggtcagacccagaggagaacagtgccaggtcaccagatggaaagcgaaaaagaaagaacggccaatgttccctgaaaaccagcatgtcagggtatatccctagttacctggacaaagacgagcagtgtgtcgtgtgtggggacaaggcaactggttatcactaccgctgtatcacttgtgagggctgcaagggcttctttcgccgcacaatccagaagaacctccatcccacctattcctgcaaatatgacagctgctgtgtcattgacaagatcacccgcaatcagtgccagctgtgccgcttcaagaagtgcatcgccgtgggcatggccatggacttggttctagatgactcgaagcgggtggccaagcgtaagctgattgagcagaaccgggagcggcggcggaaggaggagatgatccgatcactgcagcagcgaccagagcccactcctgaagagtgggatctgatccacattgccacagaggcccatcgcagcaccaatgcccagggcagccattggaaacagaggcggaaattcctgcccgatgacattggccagtcacccattgtctccatgccggacggagacaaggtggacctggaagccttcagcgagtttaccaagatcatcaccccggccatcacccgtgtggtggactttgccaaaaaactgcccatgttctccgagctgccttgcgaagaccagatcatcctcctgaaggggtgctgcatggagatcatgtccctgcgggcggctgtccgctacgaccctgagagcgacaccctgacgctgagtggggagatggctgtcaagcgggagcagctcaagaatggcggcctgggcgtagtctccgacgccatctttgaactgggcaagtcactctctgcctttaacctggatgacacggaagtggctctgctgcaggctgtgctgctaatgtcaacagaccgctcgggcctgctgtgtgtggacaagatcgagaagagtcaggaggcgtacctgctggcgttcgagcactacgtcaaccaccgcaaacacaacattccgcacttctggcccaagctgctgatgaaggagagagaagtgcagagttcgattctgtacaagggggcagcggcagaaggccggccgggcgggtcactgggcgtccacccggaaggacagcagcttctcggaatgcatgttgttcagggtccgcaggtccggcagcttgagcagcagcttggtgaagcgggaagtctccaagggccggttcttcagcaccagagcccgaagagcccgcagcagcgtctcctggagctgctccaccgaagcggaattctccatgcccgagcggtctgtggggaagacgacagcagtgaggcggactccccgagctcctctgaggaggaaccggaggtctgcgaggacctggcaggcaatgcagcctctccctgaagccccccagaaggccgatggggaaggagaaggagtgccataccttctcccaggcctctgccccaagagcaggaggtgcctgaaagctgggagcgtgggctcagcagggctggtcacctcccatcccgtaagaccaccttcccttcctcagcaggccaaacatggccagactcccttgctttttgctgtgtagttccctctgcctgggatgcccttccccctttctctgcctggcaacatcttacttgtcctttgaggccccaactcaagtgtcacctccttccccagctcccccaggcagaaatagttgtctgtgcttccttggttcatgcttctactgtgacacttatctcactgttttataattagtcgggcatgagtctgtttcccaagctagactgtgtctgaatcatgtctgtatccccagtgcccggtgcagggcctggcatagagtaggtactccataaaaggtgtgttgaattgaa

SEQ ID NO: 136725 - DNA, 2512 bp, Artificial Sequence
  derived and/or modified sequence
agcagattgttgggggaaatggctggtgacagagaatagaaagagcctatatggagaagggtgacgttggaaaagggaggcagtggatcggtattgatgttagaaatgagaggggagggaggtaacagggaatgaacccccacaaggatgaaaaacgtaagatgattgaagttaaaaggacatcaggggtcacctgcccagccctcgcagctgaagcttgaggaagctctgcccccgacagcagtggcgatttgtcaagggatctctggacaggacaagactccgaagctactcccccagcacacagcccgggacccacaaacccagcttgcccccagccctcccacctgccactccctggcccctcccaccgcccgccccccttggggcgcagggcatggtgtgaaaggccaagtgctgaggcgggtatcatgggtgctgtgccctagggcctgggtggcagggggtgggtggcctgtgggtgtgccgggggggccagtgtgcccaccccagtctcttggcgtgctggagggcatcctggatggaattgaagtgaatggaacagaagccaagcaaggtggagtgtgggtcagacccagaggagaacagtgccaggtcaccagatggaaagcgaaaaagaaagaacggccaatgttccctgaaaaccagcatgtcagggtatatccctagttacctggacaaagacgagcagtgtgtcgtgtgtggggacaaggcaactggttatcactaccgctgtatcacttgtgagggctgcaagggcttctttcgccgcacaatccagaagaacctccatcccacctattcctgcaaatatgacagctgctgtgtcattgacaagatcacccgcaatcagtgccagctgtgccgcttcaagaagtgcatcgccgtgggcatggccatggacttggttctagatgactcgaagcgggtggccaagcgtaagctgattgagcagaaccgggagcggcggcggaaggaggagatgatccgatcactgcagcagcgaccagagcccactcctgaagagtgggatctgatccacattgccacagaggcccatcgcagcaccaatgcccagggcagccattggaaacagaggcggaaattcctgcccgatgacattggccagtcacccattgtctccatgccggacggagacaaggtggacctggaagccttcagcgagtttaccaagatcatcaccccggccatcacccgtgtggtggactttgccaaaaaactgcccatgttctccgagctgccttgcgaagaccagatcatcctcctgaaggggtgctgcatggagatcatgtccctgcgggcggctgtccgctacgaccctgagagcgacaccctgacgctgagtggggagatggctgtcaagcgggagcagctcaagaatggcggcctgggcgtagtctccgacgccatctttgaactgggcaagtcactctctgcctttaacctggatgacacggaagtggctctgctgcaggctgtgctgctaatgtcaacagaccgctcgggcctgctgtgtgtggacaagatcgagaagagtcaggaggcgtacctgctggcgttcgagcactacgtcaaccaccgcaaacacaacattccgcacttctggcccaagctgctgatgaaggagagagaagtgcagagttcgattctgtacaagggggcagcggcagaaggccggccgggcgggtcactgggcgtccacccggaaggacagcagcttctcggaatgcatgttgttcagggtccgcaggtccggcagcttgagcagcagcttggtgaagcgggaagtctccaagggccggttcttcagcaccagagcccgaagagcccgcagcagcgtctcctggagctgctccaccgaagcggaattctccatgcccgagcggtctgtggggaagacgacagcagtgaggcggactccccgagctcctctgaggaggaaccggaggtctgcgaggacctggcaggcaatgcagcctctccctgaagccccccagaaggccgatggggaaggagaaggagtgccataccttctcccaggcctctgccccaagagcaggaggtgcctgaaagctgggagcgtgggctcagcagggctggtcacctcccatcccgtaagaccaccttcccttcctcagcaggccaaacatggccagactcccttgctttttgctgtgtagttccctctgcctgggatgcccttccccctttctctgcctggcaacatcttacttgtcctttgaggccccaactcaagtgtcacctccttccccagctcccccaggcagaaatagttgtctgtgcttccttggttcatgcttctactgtgacacttatctcactgttttataattagtcgggcatgagtctgtttcccaagctagactgtgtctgaatcatgtctgtatccccagtgcccggtgcagggcctggcatagagtaggtactccataaaaggtgtgttgaattg

SEQ ID NO: 136726 - protein, 146 aa, Artificial Sequence
  derived and/or modified sequence
MQVLTKRYPKNCLLTVMDRYAAEVHNMEQVVMIPSLLRDVQLSGPGGQAQAEAPDLYTYFTMLKAICVDVDHGLLPREEWQAKVAGSEENGTAETEEVEDESASGELDLEAQFHLHFSSLHHILMHLTEKAQEVTRKYQEMTGQVW

SEQ ID NO: 136727 - DNA, 441 bp, Artificial Sequence
  derived and/or modified sequence
atgcaggtgctgaccaagagataccccaagaactgcctgctgaccgtgatggacagatacgccgccgaggtgcacaacatggagcaggtggtgatgatccccagcctgctgagagacgtgcagctgagcggccccggcggccaggcccaggccgaggcccccgacctgtacacctacttcaccatgctgaaggccatctgcgtggacgtggaccacggcctgctgcccagagaggagtggcaggccaaggtggccggcagcgaggagaacggcaccgccgagaccgaggaggtggaggacgagagcgccagcggcgagctggacctggaggcccagttccacctgcacttcagcagcctgcaccacatcctgatgcacctgaccgagaaggcccaggaggtgaccagaaagtaccaggagatgaccggccaggtgtggtag

SEQ ID NO: 136728 - DNA, 441 bp, Artificial Sequence
  derived and/or modified sequence
atgcaagtgctgactaagagatatcctaaaaactgtctgctgactgtgatggatcgatacgccgctgaggttcacaatatggagcaggtagtgatgattccatctctcctccgggatgtacagttgagcgggccaggtggccaggcacaggcagaggcccccgacctctacacatacttcacaatgcttaaagccatttgcgtcgacgtggatcacggccttcttccccgcgaggaatggcaggcaaaggtcgcggggtccgaggagaacgggactgctgagacggaagaggtggaggatgaatctgcctccggagaactcgatctggaagcacagtttcacctgcacttctctagtctgcaccatatcctgatgcatcttactgagaaggcgcaggaagtgacacgaaagtaccaggaaatgacaggccaagtctggtag

SEQ ID NO: 136729 - DNA, 441 bp, Artificial Sequence
  derived and/or modified sequence
atgcaggtgctgaccaagcgctaccccaagaactgcctgctgactgtgatggacagatatgctgctgaggtgcacaacatggagcaggtggtgatgatccccagcctgctgagagatgtgcagctgagcggccctgggggccaggcccaggccgaggccccagacctgtacacctacttcaccatgctgaaggccatctgtgtggatgtggaccacggcctgctgccccgggaggagtggcaggccaaggtggccggctctgaagaaaatggaacagctgagacagaggaggtggaggatgagagcgccagcggggagctggacctggaggcccagttccacctgcacttcagcagcctgcaccacatcctgatgcacctgacagagaaggcccaggaggtgaccaggaagtaccaggagatgacaggccaggtgtggtag

SEQ ID NO: 136730 - DNA, 441 bp, Artificial Sequence
  derived and/or modified sequence
atgcaggtgctgaccaagcggtaccccaagaactgcctgctgaccgtcatggaccgctatgcggctgaggtccacaacatggagcaggtggttatgatcccatccctgctgcgcgatgtgcagctctccggccctggtggccaagcacaagcagaagcccctgatttgtacacctactttaccatgctcaaggctatttgcgtggatgtggatcacggcttgctaccacgcgaggagtggcaggcaaaagttgccggatctgaagaaaatgggacagcagaaactgaggaagtggaggacgagagtgctagtggggaactggaccttgaggcccagttccatctgcatttcagctcgctgcatcacattctcatgcacctgactgaaaaggcccaagaggtgaccaggaagtaccaggaaatgaccggtcaagtgtggtag

SEQ ID NO: 136731 - DNA, 441 bp, Artificial Sequence
  derived and/or modified sequence
atgcaggtgcttacaaaacgctaccccaagaattgcctgctgacagtgatggatcgctacgctgccgaagttcataacatggaacaagtagtcatgatcccctctctgttaagggatgttcaattgtcgggtccgggaggccaggctcaggccgaagcgccagacctgtatacctactttacaatgctgaaagccatttgcgtggacgttgatcatggcttactgccaagggaagaatggcaggctaaggtggcgggaagcgaagagaacggcacagccgagacagaggaggtggaagatgaatcagcatccggggagctggaccttgaggctcagttccacctgcatttctcatctttacaccacatcctgatgcatctgactgagaaggctcaggaagtgacacgcaaatatcaggaaatgaccggacaagtgtggtag

SEQ ID NO: 136732 - DNA, 1174 bp, Artificial Sequence
  derived and/or modified sequence
attgtgtcagaggaagcaaccatgcaggtgctaaccaagcgttaccccaagaactgcctgctgaccgtcatggaccggtatgcagccgaggtgcacaacatggagcaggtggtgatgatccccagccttctgcgggacgtgcagctgagtgggcctgggggccaggcccaggctgaggcccctgatctctacacctacttcaccatgctcaaggccatctgtgtggatgtggaccatgggctgctgccgcgggaggagtggcaggccaaggtggcaggcagcgaagagaatggaaccgcagagacagaggaagtcgaggacgagagtgcctcaggagagctggacctggaagcccagttccacctgcacttctccagcctccatcacatcctcatgcacctcaccgagaaagcccaggaggtgacaaggaaataccaggaaatgacgggacaagtttggtagaccttggacactagggaagatcccttcacatgatagaagacagactctttgatgaggtcggcggagcagttcactagccaatgatgagagcagaaaggcctagacctgcagccagaagtgaaggcggctcagttctccgggatgcttctctacctcctgagcaccaattcctggattccagtcactggctcacctttagaatgtctgttgctattcactgctcccctcgctcctcttaacagcttggggaggtgaccagtggttcaggagggactagacaattacctgtccagtgtggtatggtaggaagagtgtaggtgttggcacgtgaccaaaattcacatccctcctcatggcagtcattcagtatgtgtacttgtacaagttatttaacccattggagcctaaattccctcatctataaaatggggataatattatctacctcacaagcttatgaaaactaaacatgatgaatcaaaagcacttggcatgtgagggctattaaaatagcctgattttttttttctccccctctccccaatgtatttgctctggcccttgctttttaccctccagagctaagaggtagcagagtctcttgggatgagtgattcaccctcttacttggcgaccactgatgagatcaacaacaggtgaactataaacctattatttattgcagaactaataaaaaatccaaagccttgta

SEQ ID NO: 136733 - protein, 132 aa, Artificial Sequence
  derived and/or modified sequence
MITEHTSNDPYCFVEFYEHRDAAAALAAMNGRKILGKEVKVNWATTPSSQKKDTSNHFHVFVGDLSPEITTEDIKSAFAPFGKISDARVVKDMATGKSKGYGFVSFYNKLDAENAIVHMGGQWLGGRQIRTN

SEQ ID NO: 136734 - protein, 375 aa, Artificial Sequence
  derived and/or modified sequence
MMEDDGQPRTLYVGNLSRDVTEVLILQLFSQIGPCKSCKMITEHTSNDPYCFVEFYEHRDAAAALAAMNGRKILGKEVKVNWATTPSSQKKDTSNHFHVFVGDLSPEITTEDIKSAFAPFGKISDARVVKDMATGKSKGYGFVSFYNKLDAENAIVHMGGQWLGGRQIRTNWATRKPPAPKSTQENNTKQLRFEDVVNQSSPKNCTVYCGGIASGLTDQLMRQTFSPFGQIMEIRVFPEKGYSFVRFSTHESAAHAIVSVNGTTIEGHVVKCYWGKESPDMTKNFQQVDYSQWGQWSQVYGNPQQYGQYMANGWQVPPYGVYGQPWNQQGFGVDQSPSAAWMGGFGAQPPQGQAPPPVIPPPNQAGYGMASYQTQ

SEQ ID NO: 136735 - protein, 85 aa, Artificial Sequence
  derived and/or modified sequence
MITEHTSNDPYCFVEFYEHRDAAAALAAMNGRKILGKEVKVNWATTPSSQKKDTSNHFHVFVGDLSPEITTEDIKSAFAPFGKIS

SEQ ID NO: 136736 - DNA, 515 bp, Artificial Sequence
  derived and/or modified sequence
aaaaaagaaagaaagaaagaaagaaagaaaagatacgtaggtaacctttccagagatgtgacagaagtccttatacttcagttgttcagtcagattggaccctgtaaaagctgtaaaatgataacagagcatacaagcaatgacccatattgctttgtggaattttatgaacacagagatgcagctgctgcattagctgctatgaatgggagaaaaattttgggaaaggaggtcaaagtaaactgggcaaccacaccaagtagccagaaaaaagatacttccaatcacttccatgtgtttgttggggatttgagtccagaaattacaacagaagatatcaaatcagcatttgccccctttggtaaaatatcggatgcccgggtagttaaagacatggcaactggaaaatccaaaggctatggttttgtatctttttataacaaactggatgcagaaaatgcgattgtgcatatgggcggtcagtggttgggtggtcgtcaaatccgaaccaattg

SEQ ID NO: 136737 - DNA, 1401 bp, Artificial Sequence
  derived and/or modified sequence
accctgccctcccccttgtcccgggatcgctccgtcgcacccaccatgatggaagacgacgggcagccccggactctatacgtaggtaacctttccagagatgtgacagaagtccttatacttcagttgttcagtcagattggaccctgtaaaagctgtaaaatgataacagagcatacaagcaatgacccatattgctttgtggaattttatgaacacagagatgcagctgctgcattagctgctatgaatgggagaaaaattttgggaaaggaggtcaaagtaaactgggcaaccacaccaagtagccagaaaaaagatacttccaatcacttccatgtgtttgttggggatttgagtccagaaattacaacagaagatatcaaatcagcatttgccccctttggtaaaatatcggatgcccgggtagttaaagacatggcaactggaaaatccaaaggctatggttttgtatctttttataacaaactggatgcagaaaatgcgattgtgcatatgggcggtcagtggttgggtggtcgtcaaatccgaaccaattgggccactcgtaaaccacctgcacctaaaagtacacaagaaaacaacactaagcagttgagatttgaagatgtagtaaaccagtcaagtccaaaaaattgtactgtgtactgtggaggaattgcgtctgggttaacagatcagcttatgagacagacattctcaccatttggacaaattatggaaataagagttttcccagaaaagggctattcatttgtcagattttcaacccatgaaagtgcagcccatgccattgtttcggtgaacggtactacgattgaaggacatgtggttaaatgctattggggtaaagaatctcctgatatgactaaaaacttccaacaggttgactatagtcaatggggccaatggagccaagtgtatggaaacccacaacagtatggacagtatatggcaaatgggtggcaagtaccgccttatggagtatacgggcaaccatggaatcaacaaggatttggagtagatcaatcaccttctgctgcttggatgggtggatttggtgctcagcctccccaaggacaagctcctccccctgtaatacctcctcctaaccaagccggatatggtatggcaagttaccaaacacagtgagccgggactctaaaaaaaaattgtaattcatgataggcttcgatttcctgtgacactctgaagacatgaaagtagacatcggaaaatgaaaatatttattttaaaaattgaaatgtttggaacctttagcacagatttgctttggtgaaggacacgtgtcttctagttctgcctttttaagtttttgttcatgatggatatgaacatgatttttctttatgtacaaaa

SEQ ID NO: 136738 - DNA, 490 bp, Artificial Sequence
  derived and/or modified sequence
ttatacttcagttgttcagtcagattggaccctgtaaaagctgtaaaatgataacagagcatacaagcaatgacccatattgctttgtggaattttatgaacacagagatgcagctgctgcattagctgctatgaatgggagaaaaattttgggaaaggaggtcaaagtaaactgggcaaccacaccaagtagccagaaaaaagatacttccaatcacttccatgtgtttgttggggatttgagtccagaaattacaacagaagatatcaaatcagcatttgccccctttggtaaaatatcgtaagtatcataatcagtactacactcagtcatgataggcagaattgtatatgattaacttgtaattgaattaagattttctttctctagttagtatggttttgttttgtttcttatttttcatttatttattttggtttgttttgagtagtggatgttgttgaaaatgttaatgtcatttcagtgtct

SEQ ID NO: 136739 - DNA, 258 bp, Artificial Sequence
  derived and/or modified sequence
atgatcaccgagcacaccagcaacgacccctactgcttcgtggagttctacgagcacagagacgccgccgccgccctggccgccatgaacggcagaaagatcctgggcaaggaggtgaaggtgaactgggccaccacccccagcagccagaagaaggacaccagcaaccacttccacgtgttcgtgggcgacctgagccccgagatcaccaccgaggacatcaagagcgccttcgcccccttcggcaagatcagctag

SEQ ID NO: 136740 - DNA, 399 bp, Artificial Sequence
  derived and/or modified sequence
atgatcaccgagcacaccagcaacgacccctactgcttcgtggagttctacgagcacagagacgccgccgccgccctggccgccatgaacggcagaaagatcctgggcaaggaggtgaaggtgaactgggccaccacccccagcagccagaagaaggacaccagcaaccacttccacgtgttcgtgggcgacctgagccccgagatcaccaccgaggacatcaagagcgccttcgcccccttcggcaagatcagcgacgccagagtggtgaaggacatggccaccggcaagagcaagggctacggcttcgtgagcttctacaacaagctggacgccgagaacgccatcgtgcacatgggcggccagtggctgggcggcagacagatcagaaccaactag

SEQ ID NO: 136741 - DNA, 1128 bp, Artificial Sequence
  derived and/or modified sequence
atgatggaggacgacggccagcccagaaccctgtacgtgggcaacctgagcagagacgtgaccgaggtgctgatcctgcagctgttcagccagatcggcccctgcaagagctgcaagatgatcaccgagcacaccagcaacgacccctactgcttcgtggagttctacgagcacagagacgccgccgccgccctggccgccatgaacggcagaaagatcctgggcaaggaggtgaaggtgaactgggccaccacccccagcagccagaagaaggacaccagcaaccacttccacgtgttcgtgggcgacctgagccccgagatcaccaccgaggacatcaagagcgccttcgcccccttcggcaagatcagcgacgccagagtggtgaaggacatggccaccggcaagagcaagggctacggcttcgtgagcttctacaacaagctggacgccgagaacgccatcgtgcacatgggcggccagtggctgggcggcagacagatcagaaccaactgggccaccagaaagccccccgcccccaagagcacccaggagaacaacaccaagcagctgagattcgaggacgtggtgaaccagagcagccccaagaactgcaccgtgtactgcggcggcatcgccagcggcctgaccgaccagctgatgagacagaccttcagccccttcggccagatcatggagatcagagtgttccccgagaagggctacagcttcgtgagattcagcacccacgagagcgccgcccacgccatcgtgagcgtgaacggcaccaccatcgagggccacgtggtgaagtgctactggggcaaggagagccccgacatgaccaagaacttccagcaggtggactacagccagtggggccagtggagccaggtgtacggcaacccccagcagtacggccagtacatggccaacggctggcaggtgcccccctacggcgtgtacggccagccctggaaccagcagggcttcggcgtggaccagagccccagcgccgcctggatgggcggcttcggcgcccagcccccccagggccaggcccccccccccgtgatccccccccccaaccaggccggctacggcatggccagctaccagacccagtag

SEQ ID NO: 136742 - DNA, 258 bp, Artificial Sequence
  derived and/or modified sequence
atgatcaccgaacacacctcaaatgacccttactgctttgttgagttttatgaacatcgggacgcagctgcagcactagcagccatgaacggccgaaaaattctgggaaaggaggtaaaagttaattgggccaccacgccttcatcacagaagaaagatacgagcaaccatttccacgtgtttgtgggagacctgtcccctgagattactacagaggatataaagtctgccttcgcccccttcggtaagattagctag

SEQ ID NO: 136743 - DNA, 399 bp, Artificial Sequence
  derived and/or modified sequence
atgattactgaacataccagcaacgacccatattgtttcgtggagttttatgaacatcgagacgcagcggcggctctcgctgcgatgaatggtaggaaaatcctggggaaggaggttaaggtgaattgggccacaacaccctcatctcaaaaaaaggacacttccaaccacttccacgttttcgtgggcgatttgtcccctgagattaccacagaagacatcaagtccgcctttgctcctttcggcaaaatctcagatgcccgagtggtgaaggatatggccactggtaaatcaaaaggatacggatttgtgagtttctacaacaaactggacgctgagaatgcaattgtgcatatgggaggccagtggctgggtggaaggcagatcaggacgaactag

SEQ ID NO: 136744 - DNA, 1128 bp, Artificial Sequence
  derived and/or modified sequence
atgatggaggatgatgggcagccgaggactctctatgtgggaaacctgagccgggatgtcactgaagtcctgatcctgcaactgttttctcagattggaccgtgcaagtcttgcaagatgataaccgaacacacttccaatgatccctactgtttcgtcgagttctatgagcacagagacgccgctgcggccctcgcggcgatgaacgggcggaagattcttggaaaagaagtgaaggtgaactgggccacaaccccgtccagccagaaaaaagacactagtaatcacttccatgtgttcgtgggagatctgagccctgagataaccacggaggacatcaaaagcgccttcgcaccattcgggaaaatcagtgacgcccgagtggtaaaggacatggcaacaggaaaatcaaaaggatatggcttcgtctcgttttataacaaactcgatgccgagaatgccattgttcacatgggaggccagtggttgggagggcggcagattagaactaattgggcgacaagaaagcctcccgccccgaaatctacccaggaaaacaataccaagcaactgaggtttgaggacgtggtgaaccaaagctctccaaagaactgcaccgtgtactgcgggggtatagcttcaggcttgaccgatcagctcatgagacaaacgttctccccattcggacagattatggaaatccgggttttccctgagaaaggctactcgttcgtgagatttagcacacatgaaagcgctgcccacgccatagtgtcagtaaatggcactacaatcgaaggtcatgtggtgaagtgttattggggaaaagagagtcctgatatgactaagaacttccagcaggtagactattcccagtgggggcagtggagccaagtgtacggaaacccacagcaatatggacagtatatggccaatgggtggcaggttcccccatacggcgtttatggccagccgtggaaccagcagggattcggcgtagaccagtccccctctgcagcttggatgggcggatttggagctcagcctccccagggtcaggcaccaccgccagtgattcctccacccaatcaggcaggatacggaatggcatcataccagacccagtag

SEQ ID NO: 136745 - DNA, 258 bp, Artificial Sequence
  derived and/or modified sequence
atgatcacagagcacaccagcaatgacccctactgctttgtggagttctatgagcacagagatgctgctgctgccctggccgccatgaatggaaggaagatcctgggcaaggaggtgaaggtgaactgggccaccacccccagcagccagaagaaggacaccagcaaccacttccacgtgtttgtgggggacctgagccctgagatcaccacagaggacatcaagagcgcctttgccccctttgggaagatctcctag

SEQ ID NO: 136746 - DNA, 399 bp, Artificial Sequence
  derived and/or modified sequence
atgatcacagagcacaccagcaatgacccctactgctttgtggagttctatgagcacagagatgctgctgctgccctggccgccatgaatggaaggaagatcctgggcaaggaggtgaaggtgaactgggccaccacccccagcagccagaagaaggacaccagcaaccacttccacgtgtttgtgggggacctgagccctgagatcaccacagaggacatcaagagcgcctttgccccctttgggaagatcagtgatgcccgggtggtgaaggacatggccaccgggaagagcaagggctacggctttgtgtccttctacaacaagctggatgctgaaaatgccatcgtgcacatgggcggccagtggctgggcggccggcagatccgcaccaactag

SEQ ID NO: 136747 - DNA, 1128 bp, Artificial Sequence
  derived and/or modified sequence
atgatggaggatgatggccagcccaggaccctgtatgtgggcaacctgagcagagatgtgacagaggtgctgatcctgcagctgttcagccagatcggcccctgcaagagctgcaagatgatcacagagcacaccagcaatgacccctactgctttgtggagttctatgagcacagagatgctgctgctgccctggccgccatgaatggaaggaagatcctgggcaaggaggtgaaggtgaactgggccaccacccccagcagccagaagaaggacaccagcaaccacttccacgtgtttgtgggggacctgagccctgagatcaccacagaggacatcaagagcgcctttgccccctttgggaagatcagtgatgcccgggtggtgaaggacatggccaccgggaagagcaagggctacggctttgtgtccttctacaacaagctggatgctgaaaatgccatcgtgcacatgggcggccagtggctgggcggccggcagatccgcaccaactgggccaccaggaagcccccagcccccaagagcacccaggagaacaacaccaagcagctgcgctttgaagatgtggtgaaccagagcagccccaagaactgcaccgtgtactgcggcggcatcgccagcggcctgacagaccagctgatgaggcagaccttcagccccttcggccagatcatggagatccgggtcttccctgagaagggctacagctttgtgcgcttcagcacccatgagagcgctgcccacgccatcgtgtctgtgaatggcaccaccatcgagggccacgtggtgaagtgctactggggcaaggagagcccagacatgaccaagaacttccagcaggtggactacagccagtggggccagtggagccaggtgtatggcaacccccagcagtatggccagtacatggccaacggctggcaggtgcccccctatggagtgtatggccagccctggaaccagcagggctttggagtggaccagagccccagcgctgcctggatgggcggctttggagcccagcccccccagggccaggcccctcctcctgtgatccccccacccaaccaggccggctacggcatggccagctaccagacccagtag

SEQ ID NO: 136748 - DNA, 258 bp, Artificial Sequence
  derived and/or modified sequence
atgatcaccgagcacaccagcaacgacccctactgcttcgtggagttttacgagcaccgggacgccgctgcagccctagccgccatgaacggcaggaaaatactgggcaaagaagtgaaagttaattgggccactacccccagcagtcagaagaaagatacgtctaatcacttccacgtattcgtgggcgatttgagtcccgagatcaccacagaggacatcaaatccgcttttgctccattcggcaagatctcgtag

SEQ ID NO: 136749 - DNA, 399 bp, Artificial Sequence
  derived and/or modified sequence
atgatcaccgagcacaccagcaacgacccctactgcttcgtggagttttacgagcaccgagacgcagcagcagccttggctgccatgaacggtaggaagatattgggcaaggaagtgaaggtgaactgggctacaacaccttcctcgcagaagaaggatacaagtaaccactttcacgtgtttgtcggtgatctatctccggaaattaccaccgaggacatcaaatccgcgtttgctccctttgggaaaatctcagacgccagagtggtaaaggatatggctacaggaaagagtaagggttacggttttgtgagtttctataataagctggatgccgaaaacgcgattgtccatatgggggggcagtggctgggcgggcgccagattcgaacaaattag

SEQ ID NO: 136750 - DNA, 1128 bp, Artificial Sequence
  derived and/or modified sequence
atgatggaggacgacggccagccccggaccctgtacgtgggcaacctatctcgggacgtcactgaggtgctaatactgcagttattctcacagatcggaccatgcaagagttgcaagatgatcacagaacacacttctaatgacccttattgctttgtcgagttctacgaacacagagacgcggcagctgccctagccgctatgaacggccgcaaaattttaggcaaggaagtgaaagtaaactgggctactacaccttcttctcagaagaaagacactagcaaccacttccatgtgtttgtgggagatctgagccctgaaatcaccactgaggacatcaaatctgcctttgcccctttcggcaaaatttcagacgctagagtggtgaaagatatggccaccgggaaatctaagggatacggattcgtttctttttataacaaattagatgcggagaacgccatcgtacatatgggcggacagtggctcggcgggagacagatcagaaccaattgggcaactcgaaagcccccggcacccaaatcgactcaagaaaataacacgaaacagctgcggttcgaagacgtcgtgaaccagtctagcccaaaaaactgtacggtgtattgcggcgggatcgcctctgggctgactgaccagctaatgcgccaaaccttttctccttttgggcagataatggagattcgggttttccctgaaaaaggctattctttcgtgcgctttagcacccacgaatcagccgctcacgctattgtgtcagttaacgggacgactatagaggggcatgtagtcaaatgctattggggcaaagaaagcccagacatgaccaaaaatttccagcaggtggactattcccagtggggacagtggtcacaagtgtatggtaacccccagcagtacggacagtacatggcgaatggctggcaagtgccaccctatggtgtatacgggcagccatggaatcagcaaggatttggtgtcgaccagtcccccagtgccgcatggatgggagggtttggcgcacagcccccacaggggcaggcccctcctcccgtgattccccccccaaaccaggccggatacgggatggcctcgtatcagacacagtag

SEQ ID NO: 136751 - DNA, 258 bp, Artificial Sequence
  derived and/or modified sequence
atgattacagagcacaccagcaatgacccatattgcttcgttgagttttatgaacatcgtgatgctgctgccgctcttgcagccatgaatgggaggaaaatcctcgggaaagaggtgaaggtgaactgggcaacgacgccaagcagtcagaagaaggacacatcaaaccactttcatgtgtttgtgggggacctcagccctgagattacaacagaagacattaagtccgcctttgccccattcggaaagatttcgtag

SEQ ID NO: 136752 - DNA, 399 bp, Artificial Sequence
  derived and/or modified sequence
atgatcactgagcacacctccaatgatccctattgctttgtggagttttatgaacatcgagatgccgcagcggcactggccgctatgaatggaagaaagatcttgggcaaggaggtgaaggtgaactgggctactaccccatctagccagaagaaggacacgtcaaaccactttcacgtcttcgtcggagacctctcaccagagatcaccactgaggatatcaaaagcgcctttgccccttttggcaagataagtgacgcccgagtagtgaaggacatggctaccgggaagagcaaagggtacggctttgtgagcttctataacaagcttgatgcggagaacgcaatagttcatatgggcggacaatggcttggagggaggcaaattcggacaaattag

SEQ ID NO: 136753 - DNA, 1128 bp, Artificial Sequence
  derived and/or modified sequence
atgatggaggacgatggtcaaccccgaacactgtatgtcggaaacctgtcgcgcgatgtaacggaggtgttaatccttcagctgttcagccaaataggcccatgcaaaagttgtaaaatgattacagagcacacatctaatgacccctactgtttcgttgaattttatgaacacagggatgccgctgcagctctagctgccatgaatggcagaaagatcctgggaaaagaagtgaaagtgaactgggcaacgaccccttcttcccagaagaaggacacctctaaccattttcacgtattcgtcggagatctttcgcctgaaatcaccactgaggatatcaagagtgctttcgccccatttgggaaaattagcgatgccagagtggttaaagatatggccaccggcaagtctaagggatacggatttgtgtccttctataacaagctggatgctgaaaacgcgatcgtgcatatgggcggtcagtggctaggcggaagacagattcgcacaaattgggcaactcggaagccacctgcacccaaatccacccaagaaaacaacactaaacagctgaggttcgaagatgttgtgaaccagagctcaccaaagaattgtacggtctactgcgggggtattgcctccggcttgactgatcagctgatgagacagacattcagccctttcgggcagattatggagataagagtcttccctgagaagggctattcatttgtgcgattttctacacacgagtccgccgctcatgctattgtatctgtgaacgggacaactattgagggtcatgtggtcaaatgctattgggggaaggaatccccagacatgaccaagaactttcaacaggtggattatagccagtgggggcaatggtctcaggtttatggcaaccctcagcaatatggacagtatatggccaatggctggcaggttcccccttacggagtctatgggcagccttggaaccagcagggcttcggagttgaccagtcccccagtgcagcttggatggggggatttggcgcacagcctccccagggacaggcaccaccgcctgtgattcctcctccaaaccaggctggatatggaatggcaagttaccaaacacagtag

SEQ ID NO: 136754 - protein, 207 aa, Artificial Sequence
  derived and/or modified sequence
MAPFEPLASGILLLLWLIAPSRACTCVPPHPQTAFCNSDLVIRAKFVGTPEVNQTTLYQRYEIKMTKMYKGFQALGDAADIRFVYTPAMESVCGYFHRSHNRSEEFLIAGKLQDGLLHITTCSFVAPWNSLSLAQRRGFTKTYTVGCEECTVFPCLSIPCKLQSGTHCLWTDQLLQGSEKGFQSRHLACLPREPGLCTWQSLRSQIA

SEQ ID NO: 136755 - protein, 143 aa, Artificial Sequence
  derived and/or modified sequence
MTKMYKGFQALGDAADIRFVYTPAMESVCGYFHRSHNRSEEFLIAGKLQDGLLHITTCSFVAPWNSLSLAQRRGFTKTYTVGCEECTVFPCLSIPCKLQSGTHCLWTDQLLQGSEKGFQSRHLACLPREPGLCTWQSLRSQIA

SEQ ID NO: 136756 - protein, 96 aa, Artificial Sequence [sequence omitted]

SEQ ID NO: 136757 - protein, 136 aa, Artificial Sequence
  derived and/or modified sequence
MAPFEPLASGILLLLWLIAPSRACTCVPPHPQTAFCNSDLVIRAKFVGTPEVNQTTLYQRYEIKMTKMYKGFQALGDAADIRFVYTPAMESVCGYFHRSHNRSEEFLIAGEAPSPRPVPHQPVPGARPSNHEGARL

SEQ ID NO: 136758 - DNA, 432 bp, Artificial Sequence
  derived and/or modified sequence
atgaccaagatgtacaagggcttccaggccctgggcgacgccgccgacatcagattcgtgtacacccccgccatggagagcgtgtgcggctacttccacagaagccacaacagaagcgaggagttcctgatcgccggcaagctgcaggacggcctgctgcacatcaccacctgcagcttcgtggccccctggaacagcctgagcctggcccagagaagaggcttcaccaagacctacaccgtgggctgcgaggagtgcaccgtgttcccctgcctgagcatcccctgcaagctgcagagcggcacccactgcctgtggaccgaccagctgctgcagggcagcgagaagggcttccagagcagacacctggcctgcctgcccagagagcccggcctgtgcacctggcagagcctgagaagccagatcgcctag

SEQ ID NO: 136759 - DNA, 291 bp, Artificial Sequence
  derived and/or modified sequence
atgcccgtgtacagcgcctggcccgccgagcccaccatggcccccttcgagcccctggccagcggcatcctgctgctgctgtggctgatcgcccccagcagagcctgcacctgcgtgcccccccacccccagaccgccttctgcaacagcgacctggtgatcagagccaagttcgtgggcacccccgaggtgaaccagaccaccctgtaccagagatacgagatcaagatgaccaagatgtacaagggcttccaggccctgggcgacgccgccgacatcagattcgtgtag

SEQ ID NO: 136760 - DNA, 498 bp, Artificial Sequence
  derived and/or modified sequence
tgacccagagccctgtgccacaccaaccagagcctgggcagaggcctggccaccaccagaggcagaggcagcgacggcaacggccccaccggcaacggcgaccaccccaacttcagcctgagcgagggcagagccttcggcagcctggccgcccagcccatcaccagctgcctgagcgtgcccgccccccccttcagcctgggcaagctgcaggacggcctgctgcacatcaccacctgcagcttcgtggccccctggaacagcctgagcctggcccagagaagaggcttcaccaagacctacaccgtgggctgcgaggagtgcaccgtgttcccctgcctgagcatcccctgcaagctgcagagcggcacccactgcctgtggaccgaccagctgctgcagggcagcgagaagggcttccagagcagacacctggcctgcctgcccagagagcccggcctgtgcacctggcagagcctgagaagccagatcgcctag

SEQ ID NO: 136761 - DNA, 411 bp, Artificial Sequence
  derived and/or modified sequence
atggcccccttcgagcccctggccagcggcatcctgctgctgctgtggctgatcgcccccagcagagcctgcacctgcgtgcccccccacccccagaccgccttctgcaacagcgacctggtgatcagagccaagttcgtgggcacccccgaggtgaaccagaccaccctgtaccagagatacgagatcaagatgaccaagatgtacaagggcttccaggccctgggcgacgccgccgacatcagattcgtgtacacccccgccatggagagcgtgtgcggctacttccacagaagccacaacagaagcgaggagttcctgatcgccggcgaggcccccagccccagacccgtgccccaccagcccgtgcccggcgccagacccagcaaccacgagggcgccagactgtag

SEQ ID NO: 136762 - DNA, 432 bp, Artificial Sequence
  derived and/or modified sequence
atgaccaaaatgtataagggattccaggcactcggagatgctgcagatattagattcgtttacacccctgctatggaatccgtctgtggttatttccacagatctcataaccgtagcgaagagtttctgatcgcaggcaaattgcaggacggactgctacatattaccacatgtagttttgtggctccctggaactctctgagcttggcccagcggagaggttttacgaagacctatactgtaggatgtgaagagtgcactgtgtttccatgtctgagcatcccatgcaagctgcaaagcgggactcactgcttgtggacagaccagctgttgcagggctctgagaagggatttcagagtagacacttagcatgtcttcccagggaacccgggttgtgcacgtggcagtccctcagatcacagattgcctag

SEQ ID NO: 136763 - DNA, 291 bp, Artificial Sequence
  derived and/or modified sequence
atgcccgtatactcggcatggccagctgaaccaacaatggcaccatttgaacccttggcttcaggaattctgctcctgctgtggctgatcgccccctcccgggcttgcacttgtgtgccaccccacccccaaaccgctttttgcaactccgacctggtaattagagccaaattcgttgggactcccgaggtcaatcagactactttatatcaaaggtacgaaatcaaaatgaccaagatgtataaaggattccaggccttgggggacgccgccgatatcaggtttgtgtag

SEQ ID NO: 136764 - DNA, 498 bp, Artificial Sequence
  derived and/or modified sequence
taaccacgcgctctgtgtcacaccaaccagagtctaggtcgaggcttggctactacccgtggacgaggtagcgacggtaacgggcctactggcaatggcgaccaccccaatttttcattatcagaaggacgggccttcggttcgctagctgcgcagccaataacatcatgtctttccgtccccgctcctccattctctcttggaaagctgcaggatggcctcctccacatcacgacctgcagctttgtggccccctggaacagtctgtctctggcccagcgaagagggtttaccaagacctataccgtcggatgtgaggagtgcacagtgttcccatgtctttccattccctgtaagttacaaagcggcacccattgcctgtggacagaccagctcctgcaaggatctgaaaagggctttcagagcaggcaccttgcttgtctccctagggagccggggctgtgcacatggcagagcctgagatctcagatcgcttag

SEQ ID NO: 136765 - DNA, 411 bp, Artificial Sequence
  derived and/or modified sequence
atggcaccatttgagccgctggcatctgggatccttttgttgctttggctgatcgccccatctcgcgcctgcacctgtgtgccacctcacccccagaccgccttttgcaactcagatctggtcatccgcgcaaagtttgtgggcacccctgaggttaaccagaccacattgtaccagaggtacgagataaagatgacaaagatgtacaagggctttcaagccctgggtgatgcggcggatatccgcttcgtctatacccctgctatggagtctgtgtgcggatactttcatagatctcataatcggtccgaggagttcctgattgccggtgaagccccatccccccgcccagtcccccatcagcccgtgccaggagctagaccgtctaatcatgagggtgcaaggctctag

SEQ ID NO: 136766 - DNA, 432 bp, Artificial Sequence
  derived and/or modified sequence
atgaccaagatgtacaagggcttccaggccctgggagatgctgctgacatccgctttgtgtacaccccagccatggagagcgtgtgtggctacttccacaggagccacaacagaagtgaggagttcctgattgctgggaagctgcaggacggcctgctgcacatcaccacctgcagctttgtggccccctggaacagcctgagcctggcccagaggcggggcttcaccaagacctacacagtgggctgtgaagaatgtactgtgttcccctgcctgagcatcccctgcaagctgcagagcggcacccactgcctgtggacagaccagctgctgcagggcagcgagaagggcttccagagccgccacctggcctgcctgccccgggagcccggcctgtgcacctggcagagcctgcggagccagatcgcctag

SEQ ID NO: 136767 - DNA, 291 bp, Artificial Sequence
  derived and/or modified sequence
atgcctgtgtacagcgcctggccagctgagcccaccatggccccctttgagcccctggccagcggcatcctgctgctgctgtggctgattgcccccagccgggcctgcacctgtgtgcccccccacccccagacagccttctgcaacagcgacctggtgatccgggccaagtttgtgggcaccccagaggtgaaccagaccaccctgtaccagagatatgagatcaagatgaccaagatgtacaagggcttccaggccctgggagatgctgctgacatccgctttgtgtag

SEQ ID NO: 136768 - DNA, 498 bp, Artificial Sequence
  derived and/or modified sequence
tgaccccgggccctgtgccacaccaaccagagcctgggccggggcctggccaccacccggggccggggcagtgatggaaatggccccactggaaatggagaccaccccaacttcagcctgtctgagggccgggccttcggcagcctggccgcccagcccatcaccagctgcctgtctgtgcctgccccacccttcagcctgggcaagctgcaggacggcctgctgcacatcaccacctgcagctttgtggccccctggaacagcctgagcctggcccagaggcggggcttcaccaagacctacacagtgggctgtgaagaatgtactgtgttcccctgcctgagcatcccctgcaagctgcagagcggcacccactgcctgtggacagaccagctgctgcagggcagcgagaagggcttccagagccgccacctggcctgcctgccccgggagcccggcctgtgcacctggcagagcctgcggagccagatcgcctag

SEQ ID NO: 136769 - DNA, 411 bp, Artificial Sequence
  derived and/or modified sequence
atggccccctttgagcccctggccagcggcatcctgctgctgctgtggctgattgcccccagccgggcctgcacctgtgtgcccccccacccccagacagccttctgcaacagcgacctggtgatccgggccaagtttgtgggcaccccagaggtgaaccagaccaccctgtaccagagatatgagatcaagatgaccaagatgtacaagggcttccaggccctgggagatgctgctgacatccgctttgtgtacaccccagccatggagagcgtgtgtggctacttccacaggagccacaacagaagtgaggagttcctgattgctggggaggcccccagccccaggcctgtgccccaccagcctgtgcctggggcccggcccagcaaccatgaaggagcccggctgtag

SEQ ID NO: 136770 - DNA, 432 bp, Artificial Sequence
  derived and/or modified sequence
atgaccaagatgtacaagggcttccaggccctgggcgacgccgccgacatcaggtttgtgtatacccctgcaatggaatcagtgtgcggctacttccaccgctctcacaaccgcagtgaggagtttctgatagcaggtaagctccaagacggactcctgcacattaccacatgttcatttgtggcaccatggaacagtttgagtcttgctcagcgccgcggatttaccaagacatatactgtcggctgtgaggaatgtaccgtgtttccttgtctgtctattccttgtaaactccagagcggaacccattgtctctggactgatcaactcctgcagggatcagaaaagggcttccagagccggcaccttgcgtgcctgccccgcgagccaggcctgtgtacttggcagagcctaaggtcccagatcgcttag

SEQ ID NO: 136771 - DNA, 291 bp, Artificial Sequence
  derived and/or modified sequence
atgcccgtgtacagcgcctggcccgccgagcccaccatggcccccttcgaacccttggctagtggcatcttactgttgctatggttgatagccccctcacgggcctgtacttgtgtcccaccccatcctcagaccgctttttgtaattccgacttagtgatcagggctaaattcgtgggcacccccgaggtgaatcagactaccctgtaccagcgatatgagatcaagatgaccaagatgtataaaggttttcaggctctcggtgacgcagcagatattagattcgtttag

SEQ ID NO: 136772 - DNA, 498 bp, Artificial Sequence
  derived and/or modified sequence
tgaccccgggccctgtgccacaccaaccagagcctgggccggggcctggcgaccacacggggaaggggctccgacggcaatgggccaactgggaatggggaccatccaaattttagcctgagtgagggccgggcgttcggctcgcttgccgcgcagcccattacgtcctgtctgagtgtgcccgcccccccttttagcttaggcaaactccaggatggcttgcttcatattaccacctgtagtttcgtagccccttggaactccctctctttggcccagcgcagaggatttaccaaaacgtacaccgtgggatgcgaggagtgtacagtgttcccttgcttgagtattccttgtaagctgcagagcggaacgcactgtctgtggaccgatcagctcctgcaaggtagtgaaaaggggttccagtctcgtcacctcgcttgcctgccccgggagcccggtctctgtacctggcagagcctgaggagccaaatcgcttag

SEQ ID NO: 136773 - DNA, 411 bp, Artificial Sequence
  derived and/or modified sequence
atggcccccttcgagcccctggccagcggcatcctgctgctgctgtggctcatcgctccctccagagcatgtacatgcgttccgcctcatccacagacagctttctgcaactctgacttggtgatcagggccaagttcgttggaacacctgaagtgaatcagacgaccctatatcagagatatgagatcaaaatgacaaagatgtacaaagggttccaggcccttggcgacgcagccgacataaggtttgtttacaccccagccatggagtctgtgtgtgggtactttcacagatcccataaccgctcagaagaattcctgatcgccggagaggccccatccccgcgcccggttccccatcagccggttcctggggctcgcccaagtaatcatgagggagcaagactgtag

SEQ ID NO: 136774 - DNA, 432 bp, Artificial Sequence
  derived and/or modified sequence
atgaccaagatgtataaaggtttccaggcactgggggatgctgcagacataagatttgtgtacacaccagccatggaatctgtgtgcgggtatttccaccgttcacataacagatccgaggagtttctgattgctggcaaactgcaggacggcctcctgcatatcaccacttgctctttcgtggctccatggaactcgctcagtcttgctcagcggaggggcttcacaaagacttacacagtgggctgcgaagagtgcaccgtgtttccctgtctgagcataccctgtaagctccagtctggcacccactgtctgtggacggaccaactgctccaggggtcagaaaaagggttccagtcaaggcatttggcgtgtctaccgagagaacctgggttatgtacctggcagtcccttagatcgcagattgcctag

SEQ ID NO: 136775 - DNA, 291 bp, Artificial Sequence
  derived and/or modified sequence
atgccagtttattccgcctggcccgcagaacccactatggcaccatttgagccattagccagtggcattctgctgttactatggttgatcgcacccagcagagcctgtacctgtgtcccccctcacccccagaccgctttttgcaatagcgatctggtcatcagagcaaagttcgtcgggacacccgaagtaaaccagaccactctttaccaacggtacgaaattaagatgaccaaaatgtacaaaggtttccaggccctgggggacgccgcagatatcagatttgtgtag

SEQ ID NO: 136776 - DNA, 498 bp, Artificial Sequence
  derived and/or modified sequence
tagccacgggctttgtgtcacactaatcagtccctgggacgcggtttagcaacgacccgcggaagggggtctgatgggaatggacccacgggcaatggggatcaccctaacttttccttgtcggagggcagagccttcggtagcctggcagcacagcccataacatcatgcctgagcgtcccagccccaccattttctcttggaaaactgcaggatgggcttcttcacattaccacatgcagcttcgtcgcgccttggaattcactgagcctggcccagcgcaggggctttactaagacatatacggttggatgcgaagaatgtacagtgttcccatgtctgtcgataccttgtaaacttcagagcgggactcattgcttgtggacagatcaactcctgcaggggagcgagaaaggctttcagtcccgacacttggcttgcctgccaagagagcccggactgtgcacctggcagtcactgcggagccaaatcgcctag

SEQ ID NO: 136777 - DNA, 411 bp, Artificial Sequence
  derived and/or modified sequence
atggctccttttgagcctctcgcgtcaggcattttactgttgctgtggctgatcgccccttcccgcgcatgcacgtgcgttcctcctcatcctcaaaccgccttctgcaattctgacctggtaatcagggcaaagttcgttggcaccccagaagtgaatcaaactacgctttaccagagatacgagattaaaatgactaaaatgtataagggatttcaggcactaggagacgcagccgacatcagatttgtgtacacccccgctatggagtctgtgtgcgggtatttccatagatctcataataggtctgaagagttcttgattgccggagaagctccatcccccagaccagtgccacaccagcccgtccctggagctagaccgtcaaaccacgaaggcgctcgcttgtag

SEQ ID NO: 136778 - DNA, 892 bp, Artificial Sequence
  derived and/or modified sequence
ttctgcactgatggtgggtggatgagtaatgcatccaggaagcctggaggcctgtggtttccgcacccgctgccacccccgcccctagcgtggacatttatcctctagcgctcaggccctgccgccatcgccgcagatccagcgcccagagagacaccagagaacccaccatggccccctttgagcccctggcttctggcatcctgttgttgctgtggctgatagcccccagcagggcctgcacctgtgtcccaccccacccacagacggccttctgcaattccgacctcgtcatcagggccaagttcgtggggacaccagaagtcaaccagaccaccttataccagcgttatgagatcaagatgaccaagatgtataaagggttccaagccttaggggatgccgctgacatccggttcgtctacacccccgccatggagagtgtctgcggatacttccacaggtcccacaaccgcagcgaggagtttctcattgctggaaaactgcaggatggactcttgcacatcactacctgcagttttgtggctccctggaacagcctgagcttagctcagcgccggggcttcaccaagacctacactgttggctgtgaggaatgcacagtgtttccctgtttatccatcccctgcaaactgcagagtggcactcattgcttgtggacggaccagctcctccaaggctctgaaaagggcttccagtcccgtcaccttgcctgcctgcctcgggagccagggctgtgcacctggcagtccctgcggtcccagatagcctgaatcctgcccggagtggaagctgaagcctgcacagtgtccaccctgttcccactcccatctttcttccggacaatgaaataaagagttaccacccagca

SEQ ID NO: 136779 - DNA, 626 bp, Artificial Sequence
  derived and/or modified sequence
tccagcgcccagagagacaccagagtcatcagggccaagttcgtggggacaccagaagtcaaccagaccaccttataccagcgttatgagatcaagatgaccaagatgtataaagggttccaagccttaggggatgccgctgacatccggttcgtctacacccccgccatggagagtgtctgcggatacttccacaggtcccacaaccgcagcgaggagtttctcattgctggaaaactgcaggatggactcttgcacatcactacctgcagttttgtggctccctggaacagcctgagcttagctcagcgccggggcttcaccaagacctacactgttggctgtgaggaatgcacagtgtttccctgtttatccatcccctgcaaactgcagagtggcactcattgcttgtggacggaccagctcctccaaggctctgaaaagggcttccagtcccgtcaccttgcctgcctgcctcgggagccagggctgtgcacctggcagtccctgcggtcccagatagcctgaatcctgcccggagtggaagctgaagcctgcacagtgtccaccctgttcccactcccatctttcttccggacaatgaaataaagagttaccacccagca

SEQ ID NO: 136780 - DNA, 341 bp, Artificial Sequence
  derived and/or modified sequence
gagctgggctgcagcttgggtgctggccaccaggcccgtgcactcccgtgccagatgcctgtctactcagcttggcctgcggaacccaccatggccccctttgagcccctggcttctggcatcctgttgttgctgtggctgatagcccccagcagggcctgcacctgtgtcccaccccacccacagacggccttctgcaattccgacctcgtcatcagggccaagttcgtggggacaccagaagtcaaccagaccaccttataccagcgttatgagatcaagatgaccaagatgtataaagggttccaagccttaggggatgccgctgacatccggttcgt

SEQ ID NO: 136781 - DNA, 595 bp, Artificial Sequence
  derived and/or modified sequence
gtccccgcgccctgtgccacaccaaccagtccctggggcgcggcctagcaaccacgagggggcgaggctctgatgggaatggtcccactggaaatggggaccaccccaatttcagtctatcagaaggccgggcctttggcagcttggcagctcagccaatcacaagctgcttgtcggtccccgccccgcctttctccttaggaaaactgcaggatggactcttgcacatcactacctgcagttttgtggctccctggaacagcctgagcttagctcagcgccggggcttcaccaagacctacactgttggctgtgaggaatgcacagtgtttccctgtttatccatcccctgcaaactgcagagtggcactcattgcttgtggacggaccagctcctccaaggctctgaaaagggcttccagtcccgtcaccttgcctgcctgcctcgggagccagggctgtgcacctggcagtccctgcggtcccagatagcctgaatcctgcccggagtggaagctgaagcctgcacagtgtccaccctgttcccactcccatctttcttccggacaatgaaataaagagttaccacccagca

SEQ ID NO: 136782 - DNA, 624 bp, Artificial Sequence
  derived and/or modified sequence
atggctccgtttgaacctctcgcatcaggtattctactgctactgtggctcatagcaccgtcacgcgcatgcacgtgtgtgccaccccacccacagacagcattctgcaacagcgacttggtgatcagggcaaaattcgttggcacacctgaagttaatcagaccacgctgtaccagcgatacgagattaagatgaccaaaatgtacaaaggatttcaggccctcggcgatgccgcagacatcagattcgtctacacacccgcaatggagtctgtgtgcggttactttcacagatctcataatcgaagcgaagagtttttgattgccggtaagctgcaggacggcctcctgcacataaccacatgtagctttgtggccccatggaacagcctgagcctggcacagaggcgaggctttacaaaaacttatacagtggggtgcgaggagtgcaccgtctttccatgcctgtctataccctgcaagctacaatcaggcacacactgcttatggacggatcagttgttgcagggttctgagaaggggtttcagtctcgccaccttgcttgtctacccagagagccaggtctgtgtacatggcagtctcttcggagccaaatcgcctag

SEQ ID NO: 136783 - DNA, 624 bp, Artificial Sequence
  derived and/or modified sequence
atggcccccttcgagcccctggccagcggcatcctgctgctgctgtggctgatcgcccccagcagagcctgcacctgcgtgcccccccacccccagaccgccttctgcaacagcgacctggtgatcagagccaagttcgtgggcacccccgaggtgaaccagaccaccctgtaccagagatacgagatcaagatgaccaagatgtacaagggcttccaggccctgggcgacgccgccgacatcagattcgtgtacacccccgccatggagagcgtgtgcggctacttccacagaagccacaacagaagcgaggagttcctgatcgccggcaagctgcaggacggcctgctgcacatcaccacctgcagcttcgtggccccctggaacagcctgagcctggcccagagaagaggcttcaccaagacctacaccgtgggctgcgaggagtgcaccgtgttcccctgcctgagcatcccctgcaagctgcagagcggcacccactgcctgtggaccgaccagctgctgcagggcagcgagaagggcttccagagcagacacctggcctgcctgcccagagagcccggcctgtgcacctggcagagcctgagaagccagatcgcctag

SEQ ID NO: 136784 - DNA, 624 bp, Artificial Sequence
  derived and/or modified sequence
atggcccctttcgagccactcgcgtctggtattctgcttctgctgtggctgattgcgcctagcagggcgtgcacctgtgtgcctccacacccccagaccgctttttgtaactctgaccttgtcatcagagccaaattcgtggggactcctgaagtgaaccagacaacgctttaccaaagatatgaaattaaaatgacaaaaatgtataaggggtttcaagccctgggagacgctgccgacatcagattcgtttacactcctgccatggagtcggtttgcggctattttcaccgctcccacaatcggtccgaagagttcctcattgcgggcaaactccaggatggcctgctgcatattactacatgtagcttcgtggccccctggaattccctgtccttggcgcagagacggggttttacaaagacgtacacagtggggtgtgaggagtgtactgtttttccttgcctctctatcccctgcaagcttcaatcagggacccactgtttgtggaccgatcagctgctgcaaggttcagaaaagggcttccagagtcggcacttagcttgcctgcctcgcgaacctggcctgtgcacctggcagagtctacgaagtcagatcgcatag

SEQ ID NO: 136785 - DNA, 624 bp, Artificial Sequence
  derived and/or modified sequence
atggccccctttgagcccctggccagcggcatcctgctgctgctgtggctgattgcccccagccgggcctgcacctgtgtgcccccccacccccagacagccttctgcaacagcgacctggtgatccgggccaagtttgtgggcaccccagaggtgaaccagaccaccctgtaccagagatatgagatcaagatgaccaagatgtacaagggcttccaggccctgggagatgctgctgacatccgctttgtgtacaccccagccatggagagcgtgtgtggctacttccacaggagccacaacagaagtgaggagttcctgattgctgggaagctgcaggacggcctgctgcacatcaccacctgcagctttgtggccccctggaacagcctgagcctggcccagaggcggggcttcaccaagacctacacagtgggctgtgaagaatgtactgtgttcccctgcctgagcatcccctgcaagctgcagagcggcacccactgcctgtggacagaccagctgctgcagggcagcgagaagggcttccagagccgccacctggcctgcctgccccgggagcccggcctgtgcacctggcagagcctgcggagccagatcgcctag

SEQ ID NO: 136786 - DNA, 624 bp, Artificial Sequence
  derived and/or modified sequence
atggcccccttcgagcccctggccagcggcatcctgctgctgctgtggctcatcgccccctctcgggcctgcacgtgcgttccccctcatccccagactgccttttgtaactccgaccttgtgatccgggccaaattcgttgggactcccgaggtgaaccaaaccacgctctatcagagatatgagatcaaaatgactaaaatgtataagggattccaggccctgggggatgcagctgacataagattcgtctatacaccggctatggagagtgtctgtgggtactttcaccgatcgcataacaggtccgaagaattcctgatcgcaggtaaattacaggacggactgctgcatatcacaacatgctctttcgttgcgccttggaatagcctgagcctagcacagaggcgtggcttcacaaagacctatacagtggggtgcgaagaatgcaccgttttcccctgtttatccattccctgcaaattacaatcgggcacacattgcttgtggactgatcagctcctgcagggctccgaaaaaggtttccagagcaggcacctcgcatgcttgcctagagaacccggattatgcacctggcagtctctgaggtcccagattgcttag

SEQ ID NO: 136787 - protein, 220 aa, Artificial Sequence
  derived and/or modified sequence
MGAAARTLRLALGLLLLATLLRPADACSCSPVHPQQAFCNADVVIRAKAVSEKEVDSGNDIYGNPIKRIQYEIKQIKMFKGPEKDIEFIYTAPSSAVCGVSLDVGGKKEYLIAGKAEGDGKMHITLCDFIVPWDTLSTTQKKSLNHRYQMGCECKITRCPMIPCYISSPDECLWMDWVTEKNINGHQAKFFACIKRSDGSCAWYRGAAPPKQEFLDIEDP

SEQ ID NO: 136788 - protein, 143 aa, Artificial Sequence
  derived and/or modified sequence
MFKGPEKDIEFIYTAPSSAVCGVSLDVGGKKEYLIAGKAEGDGKMHITLCDFIVPWDTLSTTQKKSLNHRYQMGCECKITRCPMIPCYISSPDECLWMDWVTEKNINGHQAKFFACIKRSDGSCAWYRGAAPPKQEFLDIEDP

SEQ ID NO: 136789 - DNA, 663 bp, Artificial Sequence
  derived and/or modified sequence
atgggcgccgccgccagaaccctgagactggccctgggcctgctgctgctggccaccctgctgagacccgccgacgcctgcagctgcagccccgtgcacccccagcaggccttctgcaacgccgacgtggtgatcagagccaaggccgtgagcgagaaggaggtggacagcggcaacgacatctacggcaaccccatcaagagaatccagtacgagatcaagcagatcaagatgttcaagggccccgagaaggacatcgagttcatctacaccgcccccagcagcgccgtgtgcggcgtgagcctggacgtgggcggcaagaaggagtacctgatcgccggcaaggccgagggcgacggcaagatgcacatcaccctgtgcgacttcatcgtgccctgggacaccctgagcaccacccagaagaagagcctgaaccacagataccagatgggctgcgagtgcaagatcaccagatgccccatgatcccctgctacatcagcagccccgacgagtgcctgtggatggactgggtgaccgagaagaacatcaacggccaccaggccaagttcttcgcctgcatcaagagaagcgacggcagctgcgcctggtacagaggcgccgccccccccaagcaggagttcctggacatcgaggacccctag

SEQ ID NO: 136790 - DNA, 432 bp, Artificial Sequence
  derived and/or modified sequence
atgttcaagggccccgagaaggacatcgagttcatctacaccgcccccagcagcgccgtgtgcggcgtgagcctggacgtgggcggcaagaaggagtacctgatcgccggcaaggccgagggcgacggcaagatgcacatcaccctgtgcgacttcatcgtgccctgggacaccctgagcaccacccagaagaagagcctgaaccacagataccagatgggctgcgagtgcaagatcaccagatgccccatgatcccctgctacatcagcagccccgacgagtgcctgtggatggactgggtgaccgagaagaacatcaacggccaccaggccaagttcttcgcctgcatcaagagaagcgacggcagctgcgcctggtacagaggcgccgccccccccaagcaggagttcctggacatcgaggacccctag

SEQ ID NO: 136791 - DNA, 663 bp, Artificial Sequence
  derived and/or modified sequence
atgggagcagctgcccgtactcttcggctcgcgttgggcctgcttctgctggcgactctgctgaggcccgccgacgcttgctcttgtagccccgtgcaccctcagcaggcattttgtaacgcagatgttgtgataagggcaaaagccgtgagcgagaaagaagtggacagcggcaatgatatatacggtaatcccatcaagagaattcagtatgagatcaagcaaatcaaaatgttcaagggtccagaaaaagatatagagttcatctacactgctccaagttccgccgtttgcggggtttctctggatgtggggggcaagaaagagtatctgatcgccggcaaagctgaaggagacgggaaaatgcatattactttatgcgattttatcgtgccttgggacacacttagtactacccaaaagaagtcactcaaccataggtaccaaatggggtgcgaatgcaagatcaccaggtgcccgatgatcccttgttacatttctagtcctgacgagtgcctgtggatggactgggtaacagaaaaaaatatcaatggtcatcaggccaaattctttgcctgcattaagagatctgacggatcctgcgcctggtatagaggggccgccccaccgaagcaagaatttctcgatattgaggacccatag

SEQ ID NO: 136792 - DNA, 432 bp, Artificial Sequence
  derived and/or modified sequence
atgttcaaggggccagaaaaagatattgagtttatttacacagcgccctcttccgcggtctgcggcgtgagccttgacgttggcggaaagaaagaatacctgattgcgggtaaggctgagggtgacggcaagatgcacatcaccctgtgtgactttatcgtcccttgggacacattgagcacgacgcagaagaagtcgcttaatcaccggtatcaaatgggctgcgagtgcaagatcaccagatgtccaatgattccctgttacatttcctctcctgacgagtgcctatggatggattgggtgacagagaaaaatatcaacggccatcaggcgaagttctttgcatgcatcaagagaagcgatggttcgtgcgcttggtaccggggcgccgccccacccaagcaggagttcttggatattgaagacccctag

SEQ ID NO: 136793 - DNA, 663 bp, Artificial Sequence
  derived and/or modified sequence
atgggcgccgccgcccggaccctgcggctggccctgggcctgctgctgctggccaccctgctgcggccagcagatgcctgcagctgcagccctgtgcacccccagcaggccttctgcaatgctgatgtggtgatccgggccaaggctgtgtctgagaaggaggtggacagcggaaatgacatctacggcaaccccatcaagaggatccagtatgagatcaagcagatcaagatgttcaagggccctgagaaggacatcgagttcatctacacagcccccagcagcgctgtgtgtggggtgtccctggatgtgggcggcaagaaggagtacctgattgctgggaaggccgagggagatggcaagatgcacatcaccctgtgtgacttcatcgtgccctgggacaccctgagcaccacccagaagaagagcctgaaccaccgctaccagatgggctgtgagtgcaagatcacccgctgccccatgatcccctgctacatcagcagcccagatgaatgtctgtggatggactgggtgacagagaagaacatcaatggccaccaggccaagttctttgcctgcatcaagagaagtgatggcagctgtgcctggtacagaggagctgccccacccaagcaggagttcctggacatcgaggacccctag

SEQ ID NO: 136794 - DNA, 432 bp, Artificial Sequence
  derived and/or modified sequence
atgtttaaaggacctgagaaggacatcgagttcatctacacagcccccagcagcgctgtgtgtggggtgtccctggatgtgggcggcaagaaggagtacctgattgctgggaaggccgagggagatggcaagatgcacatcaccctgtgtgacttcatcgtgccctgggacaccctgagcaccacccagaagaagagcctgaaccaccgctaccagatgggctgtgagtgcaagatcacccgctgccccatgatcccctgctacatcagcagcccagatgagtgcctgtggatggactgggtgacagagaagaacatcaatggccaccaggccaagttctttgcctgcatcaagagaagtgatggcagctgtgcctggtacagaggagctgccccacccaagcaggagttcctggacatcgaggacccctag

SEQ ID NO: 136795 - DNA, 663 bp, Artificial Sequence
  derived and/or modified sequence
atgggcgccgccgcccggaccctgcggctggccctgggcctgctgctgctcgccacactgttgcggcccgcagatgcctgttcctgcagtcccgtccaccctcagcaggctttttgtaatgctgatgttgtgataagggccaaagctgttagtgagaaagaggtagatagcgggaacgacatctatggcaatcctattaagcgcattcagtatgagataaagcagataaagatgttcaagggcccagaaaaggacatcgaatttatttacaccgccccttcgtctgccgtttgtggcgtgtcactggatgtgggggggaagaaagagtacctgattgccggcaaagcagagggtgatggaaagatgcacatcaccttgtgcgacttcattgtgccgtgggataccttgagcaccacacagaagaaatcccttaatcatcgctaccagatggggtgcgagtgcaagatcactagatgccctatgattccatgctatatatcatctcctgatgaatgtctgtggatggattgggtaacagagaagaacattaatggacaccaggctaagttcttcgcttgcattaagaggtcggatggttcctgtgcctggtataggggtgccgctccgcccaagcaggaatttctcgatatcgaagatccctag

SEQ ID NO: 136796 - DNA, 432 bp, Artificial Sequence
  derived and/or modified sequence
atgttcaagggccccgagaaggacatcgagttcatctacaccgcccccagttcagcagtgtgcggtgtttctctggatgtaggaggtaagaaggagtacctgatcgctggcaaggctgagggcgacgggaagatgcacattaccctatgcgattttattgttccctgggatacccttagcactacacagaaaaagtctctgaaccacagataccagatgggctgcgagtgcaagattaccaggtgtcctatgataccttgttacatttctagcccagacgagtgtctttggatggactgggtaactgaaaagaatatcaatgggcaccaagccaagttcttcgcgtgcatcaagcggagtgatgggagctgcgcatggtacagaggtgcggctccccccaaacaggagttcttagacattgaggatccttag

SEQ ID NO: 136797 - DNA, 663 bp, Artificial Sequence
  derived and/or modified sequence
atgggtgcagcggctcgcactttaaggctggctctggggctcctgttgcttgctacactgcttagacctgcggacgcctgtagctgttcacccgtgcacccgcagcaggccttctgtaatgcggacgtggtcattagggccaaggcagtgtctgagaaagaagtggattccggtaacgatatatacgggaaccccatcaagcggattcaatacgagattaagcaaattaagatgttcaaggggcctgagaaggatattgagttcatatacaccgctccctcatctgccgtgtgtggcgtttccctcgacgtgggagggaagaaggagtacctgattgccggaaaggctgagggggatggaaagatgcatattacgctatgtgactttattgtcccatgggacaccctgtctactacccaaaagaaaagcctgaaccatcggtatcagatgggatgtgagtgcaagatcacacggtgtcctatgatcccctgttatatcagctcccctgacgagtgtctttggatggattgggtgaccgaaaagaacatcaatggacatcaagcaaagtttttcgcgtgtataaagcgctctgacggcagctgcgcctggtacagaggcgctgctccgcctaagcaagagtttttagacattgaagatccctag

SEQ ID NO: 136798 - DNA, 432 bp, Artificial Sequence
  derived and/or modified sequence
atgttcaagggtccagaaaaagatattgaatttatctacacagccccatctagcgcagtatgcggtgttagtctggacgtgggtggcaagaaagaatacctcatcgctggcaaggcagagggtgatggtaagatgcatataacactgtgtgacttcattgttccttgggatacactgagcaccacacagaagaaatctctgaaccaccgatatcagatgggatgtgagtgcaagattacaaggtgtcctatgatcccttgttacatctctagtcccgatgagtgtctgtggatggactgggtcacggaaaagaatatcaacgggcatcaggctaagtttttcgcttgtatcaagcgcagcgacgggagttgtgcctggtataggggcgctgctccacctaaacaagagttcctggatatcgaggatccttag

SEQ ID NO: 136799 - DNA, 3652 bp, Artificial Sequence
  derived and/or modified sequence
agcaaacacatccgtagaaggcagcgcggccgccgagaaccgcagcgccgctcgcccgccgccccccaccccgccgccccgcccggcgaattgcgccccgcgcccctcccctcgcgcccccgagacaaagaggagagaaagtttgcgcggccgagcggggcaggtgaggagggtgagccgcgcgggaggggcccgcctcggccccggctcagcccccgcccgcgcccccagcccgccgccgcgagcagcgcccggaccccccagcggcggcccccgcccgcccagccccccggcccgccatgggcgccgcggcccgcaccctgcggctggcgctcggcctcctgctgctggcgacgctgcttcgcccggccgacgcctgcagctgctccccggtgcacccgcaacaggcgttttgcaatgcagatgtagtgatcagggccaaagcggtcagtgagaaggaagtggactctggaaacgacatttatggcaaccctatcaagaggatccagtatgagatcaagcagataaagatgttcaaagggcctgagaaggatatagagtttatctacacggccccctcctcggcagtgtgtggggtctcgctggacgttggaggaaagaaggaatatctcattgcaggaaaggccgagggggacggcaagatgcacatcaccctctgtgacttcatcgtgccctgggacaccctgagcaccacccagaagaagagcctgaaccacaggtaccagatgggctgcgagtgcaagatcacgcgctgccccatgatcccgtgctacatctcctccccggacgagtgcctctggatggactgggtcacagagaagaacatcaacgggcaccaggccaagttcttcgcctgcatcaagagaagtgacggctcctgtgcgtggtaccgcggcgcggcgccccccaagcaggagtttctcgacatcgaggacccataagcaggcctccaacgcccctgtggccaactgcaaaaaaagcctccaagggtttcgactggtccagctctgacatcccttcctggaaacagcatgaataaaacactcatcccatgggtccaaattaatatgattctgctccccccttctccttttagacatggttgtgggtctggagggagacgtgggtccaaggtcctcatcccatcctccctctgccaggcactatgtgtctggggcttcgatccttgggtgcaggcagggctgggacacgcggcttccctcccagtccctgccttggcaccgtcacagatgccaagcaggcagcacttagggatctcccagctgggttagggcagggcctggaaatgtgcattttgcagaaacttttgagggtcgttgcaagactgtgtagcaggcctaccaggtccctttcatcttgagagggacatggcccttgttttctgcagcttccacgcctctgcactccctgcccctggcaagtgctcccatcgccccggtgcccaccatgagctcccagcacctgactccccccacatccaagggcagcctggaaccagtggctagttcttgaaggagccccatcaatcctattaatcctcagaattccagtgggagcctccctctgagccttgtagaaatgggagcgagaaaccccagctgagctgcgttccagcctcagctgagtctttttggtctgcacccacccccccacccccccccccccgcccacatgctccccagcttgcaggaggaatcggtgaggtcctgtcctgaggctgctgtccggggccggtggctgccctcaaggtcccttccctagctgctgcggttgccattgcttcttgcctgttctggcatcaggcacctggattgagttgcacagctttgctttatccgggcttgtgtgcagggcccggctgggctccccatctgcacatcctgaggacagaaaaagctgggtcttgctgtgccctcccaggcttagtgttccctccctcaaagactgacagccatcgttctgcacggggctttctgcatgtgacgccagctaagcatagtaagaagtccagcctaggaagggaaggattttggaggtaggtggctttggtgacacactcacttctttctcagcctccaggacactatggcctgttttaagagacatcttatttttctaaaggtgaattctcagatgataggtgaacctgagttgcagatataccaacttctgcttgtatttcttaaatgacaaagattacctagctaagaaacttcctagggaactagggaacctatgtgttccctcagtgtggtttcctgaagccagtgatatgggggttaggataggaagaactttctcggtaatgataaggagaatctcttgtttcctcccacctgtgttgtaaagataaactgacgatatacaggcacattatgtaaacatacacacgcaatgaaaccgaagcttggcggcctgggcgtggtcttgcaaaatgcttccaaagccaccttagcctgttctattcagcggcaaccccaaagcacctgttaagactcctgacccccaagtggcatgcagcccccatgcccaccgggacctggtcagcacagatcttgatgacttccctttctagggcagactgggagggtatccaggaatcggcccctgccccacgggcgttttcatgctgtacagtgacctaaagttggtaagatgtcataatggaccagtccatgtgatttcagtatatacaactccaccagacccctccaacccatataacaccccacccctgttcgcttcctgtatggtgatatcatatgtaacatttactcctgtttctgctgattgtttttttaatgttttggtttgtttttgacatcagctgtaatcattcctgtgctgtgttttttattacccttggtaggtattagacttgcacttttttaaaaaaaggtttctgcatcgtggaagcatttgacccagagtggaacgcgtggcctatgcaggtggattccttcaggtctttcctttggttctttgagcatctttgctttcattcgtctcccgtctttggttctccagttcaaattattgcaaagtaaaggatctttgagtaggttcggtctgaaaggtgtggcctttatatttgatccacacacgttggtcttttaaccgtgctgagcagaaaacaaaacaggttaagaagagccgggtggcagctgacagaggaagccgctcaaataccttcacaataaatagtggcaatatatatatagtttaagaaggctctccatttggcatcgtttaatttatatgttatgttctaagcacagctctcttctcctattttcatcctgcaagcaactcaaaatatttaaaataaagtttacattgtagttattttcaaatctttgcttgataagtattaagaaatattggacttgctgccgtaatttaaagctctgttgattttgtttccgtttggatttttgggggaggggagcactgtgtttatgctggaatatgaagtctgagaccttccggtgctgggaacacacaagagttgttgaaagttgacaagcagactgcgcatgtctctgatgctttgtatcattcttgagcaatcgctcggtccgtggacaataaacagtattatcaaagagaa

SEQ ID NO: 136800 - DNA, 1140 bp, Artificial Sequence
  derived and/or modified sequence
gcatttgaggggggacgtaattcagcccatacaccaggctgccttctcttattcccagtcaccctttccgtgctcaaccaacttgggataaacaacccaggacatcccagggtagggtcccggaacaaatcccacagggacgacagcggcctgtctattctccagtgttcgattctcctcgaagcgatgcagtgatcagggccaaagcggtcagtgagaaggaagtggactctggaaacgacatttatggcaaccctatcaagaggatccagtatgagatcaagcagataaagatgttcaaagggcctgagaaggatatagagtttatctacacggccccctcctcggcagtgtgtggggtctcgctggacgttggaggaaagaaggaatatctcattgcaggaaaggccgagggggacggcaagatgcacatcaccctctgtgacttcatcgtgccctgggacaccctgagcaccacccagaagaagagcctgaaccacaggtaccagatgggctgcgagtgcaagatcacgcgctgccccatgatcccgtgctacatctcctccccggacgagtgcctctggatggactgggtcacagagaagaacatcaacgggcaccaggccaagttcttcgcctgcatcaagagaagtgacggctcctgtgcgtggtaccgcggcgcggcgccccccaagcaggagtttctcgacatcgaggacccataagcaggcctccaacgcccctgtggccaactgcaaaaaaagcctccaagggtttcgactggtccagctctgacatcccttcctggaaacagcatgaataaaacactcatcccatgggtccaaattaatatgattctgctccccccttctccttttagacatggttgtgggtctggagggagacgtgggtccaaggtcctcatcccatcctccctctgccaggcactatgtgtctggggcttcgatccttgggtgcaggcagggctgggacacgcggcttccctcccagtccctgccttggcaccgtcacagatgccaagcaggcagcacttagggatctcccagctgggttagggcagggcctggaaatgtgcattttgcagaaacttttgagggtcgttgcaagactgtgtagcag

SEQ ID NO: 136801 - protein, 224 aa, Artificial Sequence
  derived and/or modified sequence
MPGSPRPAPSWVLLLRLLALLRPPGLGEACSCAPAHPQQHICHSALVIRAKISSEKVVPASADPADTEKMLRYEIKQIKMFKGFEKVKDVQYIYTPFDSSLCGVKLEANSQKQYLLTGQVLSDGKVFIHLCNYIEPWEDLSLVQRESLNHHYHLNCGCQITTCYTVPCTISAPNECLWTDWLLERKLYGYQAQHYVCMKHVDGTCSWYRGHLPLRKEFVDIVQP

SEQ ID NO: 136802 - DNA, 675 bp, Artificial Sequence
  derived and/or modified sequence
atgcccggcagccccagacccgcccccagctgggtgctgctgctgagactgctggccctgctgagaccccccggcctgggcgaggcctgcagctgcgcccccgcccacccccagcagcacatctgccacagcgccctggtgatcagagccaagatcagcagcgagaaggtggtgcccgccagcgccgaccccgccgacaccgagaagatgctgagatacgagatcaagcagatcaagatgttcaagggcttcgagaaggtgaaggacgtgcagtacatctacacccccttcgacagcagcctgtgcggcgtgaagctggaggccaacagccagaagcagtacctgctgaccggccaggtgctgagcgacggcaaggtgttcatccacctgtgcaactacatcgagccctgggaggacctgagcctggtgcagagagagagcctgaaccaccactaccacctgaactgcggctgccagatcaccacctgctacaccgtgccctgcaccatcagcgcccccaacgagtgcctgtggaccgactggctgctggagagaaagctgtacggctaccaggcccagcactacgtgtgcatgaagcacgtggacggcacctgcagctggtacagaggccacctgcccctgagaaaggagttcgtggacatcgtgcagccctag

SEQ ID NO: 136803 - DNA, 675 bp, Artificial Sequence
  derived and/or modified sequence
atgcctggatccccaaggccagcaccctcttgggtactactgcttagactgttggcccttctgcgcccacctggtttaggtgaggcatgttcatgcgcgcctgcacacccccaacagcatatctgccattcagcgttggtaattcgcgcgaaaatcagctctgaaaaggtggttcccgccagcgcagatccggcagatactgagaaaatgttgagatacgaaataaaacagattaagatgttcaagggatttgaaaaagtcaaggacgtacagtatatctacactcctttcgactccagcctctgtggggttaaactggaagcaaattcccaaaaacagtacttgcttaccggccaggtactgtccgatgggaaagtgtttatacatttgtgcaactacatcgagccctgggaggacctttctttagtgcagagagagtctctcaatcaccactaccatctgaactgtgggtgccagatcacgacgtgctatacggtcccttgcaccatcagtgcaccaaacgagtgcctatggactgattggctcttagaaagaaaactgtatggataccaggctcaacattatgtttgtatgaagcatgtggatggcacatgcagttggtaccgaggacacctgccattgcgcaaagagttcgtggacattgtgcagccttag

SEQ ID NO: 136804 - DNA, 675 bp, Artificial Sequence
  derived and/or modified sequence
atgcctggcagccccaggcctgcccccagctgggtgctgctgctgcggctgctggccctgctgcggcccccaggcctgggggaggcctgcagctgtgccccagcccacccccagcagcacatctgccacagcgccctggtgatccgggccaagatcagcagcgagaaggtggtgcctgccagcgctgaccctgctgacacagagaagatgctgcgctatgagatcaagcagatcaagatgttcaagggctttgagaaggtgaaggatgtgcagtacatctacaccccatttgacagcagcctgtgtggggtgaagctggaggccaacagccagaagcagtacctgctgaccggccaggtgctgagtgatggcaaggtgttcatccacctgtgcaactacatcgagccctgggaggacctgagcctggtgcagcgggagagcctgaaccaccactaccacctgaactgtggctgccagatcaccacctgctacacagtgccctgcaccatcagcgccccaaatgaatgtctgtggacagactggctgctggagaggaagctgtatggctaccaggcccagcactacgtgtgcatgaagcacgtggatggcacctgctcctggtaccggggccacctgcccctgaggaaggagtttgtggacatcgtgcagccctag

SEQ ID NO: 136805 - DNA, 675 bp, Artificial Sequence
  derived and/or modified sequence
atgcccggcagcccccggcccgcccccagctgggtgctgctgctgagattgctggccctcctacgacctcctggacttggcgaggcttgtagctgtgccccagcacatcctcagcagcacatctgtcacagcgccctggtgatccgggccaaaatctcttctgagaaggtcgtgccagcttccgcggatccagccgatacggaaaaaatgttacggtacgagatcaaacagataaagatgtttaagggatttgagaaggtcaaggacgtccagtacatttacaccccttttgatagctctctttgcggagttaaactggaggcaaatagccagaaacagtacctacttacaggccaggtgctttcagacggaaaggtgtttatccatctctgcaactacatagagccttgggaggatttgagtctggtgcagcgggaatccctcaatcatcactaccacctgaactgtggatgccagattactacctgttacaccgtgccctgcacaattagcgctcctaacgaatgcctctggacagactggcttttagagagaaaactgtatggttaccaggcacagcactacgtctgcatgaagcacgtcgatgggacctgctcctggtatcggggccacctcccactccgcaaggagttcgtagatattgtacagccatag

SEQ ID NO: 136806 - DNA, 675 bp, Artificial Sequence
  derived and/or modified sequence
atgcccggaagcccaagaccggcaccttcatgggtccttctactgcggctgctggctctcctgcgtccccctggcttgggcgaagcctgtagctgtgctcccgctcacccgcagcagcatatctgtcactcagctctagtaattagagcaaagatcagcagtgagaaggtagtcccggcaagtgctgatcccgctgatacagaaaagatgcttagatatgagattaaacagatcaagatgtttaaaggcttcgagaaagtaaaagatgtacaatatatatacacgccattcgactccagtctgtgcggtgttaagctggaagccaacagccagaaacagtacttgctaacgggccaggtgctctctgacggcaaggtgtttatccacttatgtaattacattgagccatgggaggatctcagcctcgttcagagagagtcactcaaccaccactatcaccttaactgtggctgtcagatcacaacatgttacacagtgccctgcactatttccgctcccaatgaatgcctctggaccgactggttattggagagaaagttgtatgggtaccaggctcagcactacgtttgcatgaaacatgtcgatgggacctgtagctggtatagaggtcacctcccgctgcgcaaggagtttgtggatatcgtgcagccctag

SEQ ID NO: 136807 - DNA, 1650 bp, Artificial Sequence
  derived and/or modified sequence
gctcagcaaggggtccgtccttctctgtcactgtctcttttgcctgttgtaattctgtctgcctctctgggactctgcctgtctcactctttctgtctgtgcctctcctcactcttgttctttctgcctgaatcacagccctcagtttttctgtcctcatgcatttgtctttgtggctctttccgtctttctgcccttgacaccatcccctctcccagtgcttcccctctgcttccagatcgcttcatgacttaggcagggaaacagaggtcagggcctccttccaggcttccctctgcatcttactgagtatgcaggtcggaagagcctcgggtcctgcctccgcgggtggcctagagccaaaggaaggcggagcccgtcggggcgggattggcccttagggccacctcataaagcctggggcgaggggcacaacggccttgggaaggagccctgctggggccgtccagtcccccagacctcacaggctcagtcgcggatctgcagtgtcatgcctgggagccctcggcccgcgccaagctgggtgctgttgctgcggctgctggcgttgctgcggcccccggggctgggtgaggcatgcagctgcgccccggcgcaccctcagcagcacatctgccactcggcacttgtgattcgggccaaaatctccagtgagaaggtagttccggccagtgcagaccctgctgacactgaaaaaatgctccggtatgaaatcaaacagataaagatgttcaaagggtttgagaaagtcaaggatgttcagtatatctatacgccttttgactcttccctctgtggtgtgaaactagaagccaacagccagaagcagtatctcttgactggtcaggtcctcagtgatggaaaagtcttcatccatctgtgcaactacatcgagccctgggaggacctgtccttggtgcagagggaaagtctgaatcatcactaccatctgaactgtggctgccaaatcaccacctgctacacagtaccctgtaccatctcggcccctaacgagtgcctctggacagactggctgttggaacgaaagctctatggttaccaggctcagcattatgtctgtatgaagcatgttgacggcacctgcagctggtaccggggccacctgcctctcaggaaggagtttgttgacatcgttcagccctagtagggaccagtgaccatcacatcccttcaagagtcctgaagatcaagccagttctccttccctgcagagctttggccattaccacctgacctcttgctgccagctaataagaagtgccaagtggacagtctggccactgtcaaggcagggaaggggccatgacttttctgccctgccctcagcctgttgcccctgcctcccaaaccccattagtctagccttgtagctgttactgcaagtgtttcttctggcttagtctgttttctaaagccaggactattccctttcctccccaggaatatgtgttttcctttgtcttaatcgatctggtaggggagaaatggcgaatgtcatacacatgagatggtatatccttgcgatgtacagtatcagaaggtggtttgacagcatcataaacaggctgactggcaggaatgaaaacaagaacatactgtggctgtgta

SEQ ID NO: 136808 - protein, 1748 aa, Artificial Sequence
  derived and/or modified sequence
MSARAAAAKSTAMEETAIWEQHTVTLHRAPGFGFGIAISGGRDNPHFQSGETSIVISDVLKGGPAEGQLQENDRVAMVNGVSMDNVEHAFAVQQLRKSGKNAKITIRRKKKVQIPVSRPDPEPVSDNEEDSYDEEIHDPRSGRSGVVNRRSEKIWPRDRSASRERSLSPRSDRRSVASSQPAKPTKVTLVKSRKNEEYGLRLASHIFVKEISQDSLAARDGNIQEGDVVLKINGTVTENMSLTDAKTLIERSKGKLKMVVQRDERATLLNVPDLSDSIHSANASERDDISEIQSLASDHSGRSHDRPPRRSRSRSPDQRSEPSDHSRHSPQQPSNGSLRSRDEERISKPGAVSTPVKHADDHTPKTVEEVTVERNEKQTPSLPEPKPVYAQVGQPDVDLPVSPSDGVLPNSTHEDGILRPSMKLVKFRKGDSVGLRLAGGNDVGIFVAGVLEDSPAAKEGLEEGDQILRVNNVDFTNIIREEAVLFLLDLPKGEEVTILAQKKKDVYRRIVESDVGDSFYIRTHFEYEKESPYGLSFNKGEVFRVVDTLYNGKLGSWLAIRIGKNHKEVERGIIPNKNRAEQLASVQYTLPKTAGGDRADFWRFRGLRSSKRNLRKSREDLSAQPVQTKFPAYERVVLREAGFLRPVTIFGPIADVAREKLAREEPDIYQIAKSEPRDAGTDQRSSGIIRLHTIKQIIDQDKHALLDVTPNAVDRLNYAQWYPIVVFLNPDSKQGVKTMRMRLCPESRKSARKLYERSHKLRKNNHHLFTTTINLNSMNDGWYGALKEAIQQQQNQLVWVSEGKADGATSDDLDLHDDRLSYLSAPGSEYSMYSTDSRHTSDYEDTDTEGGAYTDQELDETLNDEVGTPPESAITRSSEPVREDSSGMHHENQTYPPYSPQAQPQPIHRIDSPGFKPASQQKAEASSPVPYLSPETNPASSTSAVNHNVNLTNVRLEEPTPAPSTSYSPQADSLRTPSTEAAHIMLRDQEPSLSSHVDPTKVYRKDPYPEEMMRQNHVLKQPAVSHPGHRPDKEPNLTYEPQLPYVEKQASRDLEQPTYRYESSSYTDQFSRNYEHRLRYEDRVPMYEEQWSYYDDKQPYPSRPPFDNQHSQDLDSRQHPEESSERGYFPRFEEPAPLSYDSRPRYEQAPRASALRHEEQPAPGYDTHGRLRPEAQPHPSAGPKPAESKQYFEQYSRSYEQVPPQGFTSRAGHFEPLHGAAAVPPLIPSSQHKPEALPSNTKPLPPPPTQTEEEEDPAMKPQSVLTRVKMFENKRSASLETKKDVNDTGSFKPPEVASKPSGAPIIGPKPTSQNQFSEHDKTLYRIPEPQKPQLKPPEDIVRSNHYDPEEDEEYYRKQLSYFDRRSFENKPPAHIAASHLSEPAKPAHSQNQSNFSSYSSKGKPPEADGVDRSFGEKRYEPIQATPPPPPLPSQYAQPSQPVTSASLHIHSKGAHGEGNSVSLDFQNSLVSKPDPPPSQNKPATFRPPNREDTAQAAFYPQKSFPDKAPVNGTEQTQKTVTPAYNRFTPKPYTSSARPFERKFESPKFNHNLLPSETAHKPDLSSKTPTSPKTLVKSHSLAQPPEFDSGVETFSIHAEKPKYQINNISTVPKAIPVSPSAVEEDEDEDGHTVVATARGIFNSNGGVLSSIETGVSIIIPQGAIPEGVEQEIYFKVCRDNSILPPLDKEKGETLLSPLVMCGPHGLKFLKPVELRLPHCDPKTWQNKCLPGDPNYLVGANCVSVLIDHF

SEQ ID NO: 136809 - protein, 234 aa, Artificial Sequence
  derived and/or modified sequence
MSCINLPTVLPGSPSKTRGQIQVILGPMFSGKSTELMRRVRRFQIAQYKCLVIKYAKDTRYSSSFCTHDRNTMEALPACLLRDVAQEALGVAVIGIDEGQFFPDIVEFCEAMANAGKTVIVAALDGTFQRKPFGAILNLVPLAESVVKLTAVCMECFREAAYTKRLGTEKEVEVIGGADKYHSVCRLCYFKKASGQPAGPDNKENCPVPGKPGEAVAARKLFAPQQILQCSPAN

SEQ ID NO: 136810 - DNA, 705 bp, Artificial Sequence
  derived and/or modified sequence
atgagctgcatcaacctgcccaccgtgctgcccggcagccccagcaagaccagaggccagatccaggtgatcctgggccccatgttcagcggcaagagcaccgagctgatgagaagagtgagaagattccagatcgcccagtacaagtgcctggtgatcaagtacgccaaggacaccagatacagcagcagcttctgcacccacgacagaaacaccatggaggccctgcccgcctgcctgctgagagacgtggcccaggaggccctgggcgtggccgtgatcggcatcgacgagggccagttcttccccgacatcgtggagttctgcgaggccatggccaacgccggcaagaccgtgatcgtggccgccctggacggcaccttccagagaaagcccttcggcgccatcctgaacctggtgcccctggccgagagcgtggtgaagctgaccgccgtgtgcatggagtgcttcagagaggccgcctacaccaagagactgggcaccgagaaggaggtggaggtgatcggcggcgccgacaagtaccacagcgtgtgcagactgtgctacttcaagaaggccagcggccagcccgccggccccgacaacaaggagaactgccccgtgcccggcaagcccggcgaggccgtggccgccagaaagctgttcgccccccagcagatcctgcagtgcagccccgccaactag

SEQ ID NO: 136811 - DNA, 705 bp, Artificial Sequence
  derived and/or modified sequence
atgtcctgtattaacctgcccaccgttttgccggggtcgccaagcaaaactagagggcagatccaggtgattcttggacccatgttttccggaaagtctaccgaattaatgaggcgcgttcgacgattccaaattgctcagtacaagtgcctagtcataaaatacgccaaagatacaagatactctagttccttctgcactcatgatcgtaacacaatggaggcgttaccggcttgtctcctgagagatgttgctcaggaggctctcggcgtggctgttattgggattgatgaggggcaattcttccccgatatcgtagaattctgcgaagctatggccaatgccggcaagactgtgatcgtggctgcgcttgacgggaccttccagcggaagccgttcggcgcaatcttgaacctggtccctctagcagagtcagtggtgaagttaaccgcagtgtgcatggagtgcttccgtgaggcagcctacacgaaacgtctgggaactgagaaggaagtggaggtcatcgggggtgccgacaagtatcattcggtttgcagactgtgctatttcaagaaggcatccggtcaaccagccggccccgacaataaggagaattgccccgtgcccggaaagcccggggaggctgtcgcagcaagaaagctattcgccccccagcaaattcttcagtgttctccagctaactag

SEQ ID NO: 136812 - DNA, 705 bp, Artificial Sequence
  derived and/or modified sequence
atgtcgtgcattaacctgccaactgtgctgcctggctcgccctcaaaaacgagagggcagatacaggtgatcctcggtccgatgttttccggcaagtctacggagctgatgcgcagagtccgtcgcttccaaatcgctcaatacaagtgcctggtcatcaaatatgccaaagacacgagatattccagttccttttgtacccacgacagaaacactatggaagccctgccagcctgcctcttgcgggatgtggcgcaggaagccttaggtgttgccgtgattggaattgatgaggggcagttcttccctgacatagtggagttttgcgaagcaatggccaatgccggcaagaccgtgattgtcgcagctctggatgggacatttcagcgcaagccctttggggccattttaaacctcgtgcctctggcagagtccgttgtgaagctaacagccgtctgcatggagtgttttcgcgaggctgcttatacaaagagactaggcacagagaaggaagtcgaagtgattgggggggccgataagtatcatagcgtgtgtagactgtgttactttaagaaggctagcggacaacccgctggccctgacaataaggagaattgccccgtcccaggcaaaccaggggaggcggtggccgcacgtaaactgtttgccccgcagcagatcctccagtgcagtccagccaactag

SEQ ID NO: 136813 - DNA, 705 bp, Artificial Sequence
  derived and/or modified sequence
atgagctgcatcaacctgcccaccgtgctgcccggcagccccagcaagacccggggccagatccaggtgatcctgggccccatgttcagcggcaagagcacagagctgatgagaagagtgcggcgcttccagatcgcccagtacaagtgcctggtgatcaagtatgccaaggacacccgctacagcagcagcttctgcacccatgacaggaacaccatggaggccctgcctgcctgcctgctgagagatgtggcccaggaggccctgggcgtggccgtcatcggcattgatgagggccagttcttcccagacatcgtggagttctgtgaggccatggccaatgccggcaagacagtcatcgtggccgccctggatggcaccttccagaggaagccctttggagccatcctgaacctggtgcccctggccgagagcgtggtgaagctgacagctgtgtgcatggagtgcttccgggaggccgcctacaccaagaggctgggcacagagaaggaggtggaggtgattggaggagctgacaagtaccacagcgtgtgccgcctgtgctacttcaagaaggccagcggccagcctgctggccctgacaacaaggagaactgccctgtgcctgggaagccaggagaggccgtggccgccaggaagctgtttgccccccagcagatcctgcagtgcagccctgccaactag

SEQ ID NO: 136814 - DNA, 705 bp, Artificial Sequence
  derived and/or modified sequence
atgagctgcatcaacctgcccaccgtgctgcccggcagccccagcaaaacaagaggacagatccaggtgatcctcgggcccatgtttagtgggaaaagtaccgagctcatgagaagagttagacgttttcagatagctcagtataagtgccttgtcatcaagtatgctaaagatacgcgctactcttctagtttttgcacacacgatcggaataccatggaggcgcttccggcttgccttttgcgcgatgtcgcgcaggaggcacttggcgtggccgtgattgggattgacgagggtcaattcttcccggacatcgttgaattctgtgaggccatggctaacgccgggaagactgtaattgttgctgcgctcgacggcacctttcaacgaaaacctttcggcgccatcctcaacctcgtgcctctcgccgaaagcgttgtgaagctgacggccgtgtgtatggagtgtttcagggaagctgcctacaccaaacggttaggcacagaaaaagaagtggaagtgatcggaggtgccgacaaatatcattccgtttgccggctctgttattttaaaaaggcctccggtcagcccgcgggccctgacaataaggagaactgccccgtcccggggaagcctggggaggccgtggccgcacggaaactcttcgctccgcagcagatccttcagtgttctccagcaaattag

SEQ ID NO: 136815 - DNA, 705 bp, Artificial Sequence
  derived and/or modified sequence
atgagctgcatcaacctgcccaccgtgctgcccggcagccccagcaaaacaagaggacagatacaggtgattttggggcccatgttctccggcaagtctaccgagctgatgcgtagggtgaggaggtttcagatcgcacagtacaagtgcctcgttatcaaatatgccaaggatacaagatactccagctccttttgcactcatgaccgcaacacaatggaagccttacctgcttgcctgttaagggatgtcgcgcaggaggcacttggcgtagcagtgatcggcatcgatgagggacaattcttccctgacatcgtcgaattctgtgaggccatggctaacgctggcaaaacagtgatcgttgcggccctggacgggacattccagcgcaaacccttcggggccatccttaatctggtcccactggctgaaagtgtcgtgaaactgaccgcagtgtgtatggagtgtttccgtgaagctgcttacaccaagaggcttggcacggagaaagaggtggaggtgattggcggagctgataaatatcacagcgtgtgccgactctgctacttcaaaaaggcgagtgggcaacccgctggacctgacaacaaggagaactgccccgtgccagggaagcctggcgaggccgttgccgcccgcaaattatttgcccctcaacagatcctccaatgctctcccgctaattag

SEQ ID NO: 136816 - DNA, 705 bp, Artificial Sequence
  derived and/or modified sequence
atgtcttgcattaacctccccactgtgctaccgggttctcctagtaagactaggggccagatccaggtcattctggggccaatgttctcagggaaaagcaccgaactcatgcgaagagtgcgcagatttcagattgctcaatataaatgcctggtaattaaatacgccaaagacacacggtattcttcttctttctgcactcatgaccgtaatacaatggaagctctgccagcttgcttacttagggatgtagctcaggaagcactgggagttgctgtgatcggtattgacgaaggccagttctttcctgacattgtggaattttgcgaagctatggccaatgccggtaagaccgtgatcgtggctgcgctagacggtaccttccaaagaaagccctttggagctattttaaatctggtccccctggctgaatccgtggtgaaactgactgctgtatgcatggaatgcttcagggaagccgcttacaccaagcgcctgggcacagagaaagaggtggaagttattgggggagctgataagtaccatagtgtttgtagattatgctatttcaagaaggccagcggccaaccagctggcccagacaataaggagaattgccccgttcccggtaagcctggagaggctgtggccgcaagaaaactgttcgcgccacagcagatcctgcagtgcagtcccgcaaactag

SEQ ID NO: 136817 - DNA, 705 bp, Artificial Sequence
  derived and/or modified sequence
atgtcgtgcataaatctgcccacagttcttcctggatcgccctcaaaaacacggggacagatccaagtcatcttggggcctatgttcagcggtaagagcaccgagctaatgaggcgggtgcgcaggttccagattgcccagtataagtgtctggttatcaagtacgctaaggacacccgctacagctcctctttctgtacacacgatcgcaacactatggaagcgttgccagcgtgtctgttgcgggacgtggcccaggaggccctgggtgtggcagtgattgggattgacgaagggcagttttttcctgatattgttgagttctgcgaagccatggcaaatgccggaaagaccgtcattgtggccgctttggacggaacctttcaaaggaagcccttcggggctatccttaacctggtgccgctggcagagagcgtggtcaagctaacagcagtctgtatggagtgtttccgcgaggcagcgtatactaagcggttaggcaccgaaaaggaagttgaggtgataggaggcgctgataagtatcactctgtctgtaggctgtgttactttaagaaggcatcagggcagcccgcaggtcccgacaataaggagaactgtcctgtccccggtaaaccaggagaagctgtagcagcccgaaaattgttcgcccctcagcagatactccagtgcagccccgctaattag

SEQ ID NO: 136818 - DNA, 1624 bp, Artificial Sequence
  derived and/or modified sequence
cctgatttccaggccctcccagtccctgggcgcacgtcccggattcctcccacgagggggcgggctgcggccaaatctcccgccaggtcagcggccgggcgctgattggccccatggcggcggggccggctcgtgattggccagcacgccgtggtttaaagcggtcggcgcgggaaccaggggcttactgcgggacggccttggagagtactcgggttcgtgaacttcccggaggcgcaatgagctgcattaacctgcccactgtgctgcctggctcccccagcaagacccgggggcagatccaggtgattctcgggccgatgttctcaggaaaaagcacagagttgatgagacgcgtccgtcgcttccagattgctcagtacaagtgcctggtgatcaagtatgccaaagacactcgctacagcagcagcttctgcacacatgaccggaacaccatggaggcactgcccgcctgcctgctccgagacgtggcccaggaggccctgggcgtggctgtcataggcatcgacgaggggcagtttttccctgacatcgtggagttctgcgaggccatggccaacgccgggaagaccgtaattgtggctgcactggatgggaccttccagaggaagccatttggggccatcctgaacctggtgccgctggccgagagcgtggtgaagctgacggcggtgtgcatggagtgcttccgggaagccgcctataccaagaggctcggcacagagaaggaggtcgaggtgattgggggagcagacaagtaccactccgtgtgtcggctctgctacttcaagaaggcctcaggccagcctgccgggccggacaacaaagagaactgcccagtgccaggaaagccaggggaagccgtggctgccaggaagctctttgccccacagcagattctgcaatgcagccctgccaactgagggacctgcgagggccgcccgctcccttcctgccactgccgcctactggacgctgccctgcatgctgcccagccactccaggaggaagtcgggaggcgtggagggtgaccacaccttggccttctgggaactctcctttgtgtggctgccccacctgccgcatgctccctcctctcctacccactggtctgcttaaagcttccctctcagctgctgggacgatcgcccaggctggagctggccccgcttggtggcctgggatctggcacactccctctccttggggtgagggacagagccccacgctgttgacatcagcctgcttcttcccctctgcggctttcactgctgagtttctgttctccctgggaagcctgtgccagcacctttgagccttggcccacactgaggcttaggcctctctgcctgggatgggctcccaccctcccctgaggatggcctggattcacgccctcttgtttccttttgggctcaaagcccttcctacctctggtgatggtttccacaggaacaacagcatctttcaccaagatgggtggcaccaaccttgctgggacttggatcccaggggcttatctcttcaagtgtggagagggcagggtccacgcctctgctgtagcttatgaaattaactaattgaaaattcactggttggtgga

SEQ ID NO: 136819 - DNA, 1028 bp, Artificial Sequence
  derived and/or modified sequence
gagagtactcgggttcgtgaacttcccggaggcgcaatgagctgcattaacctgcccactgtgctgcctggctcccccagcaagacccgggggcagatccaggtgattctcgggccgatgttctcaggaaaaagcacagagttgatgagacgcgtccgtcgcttccagattgctcagtacaagtgcctggtgatcaagtatgccaaagacactcgctacagcagcagcttctgcacacatgaccggaacaccatggaggcactgcccgcctgcctgctccgagacgtggcccaggaggccctgggcgtggctgtcataggcatcgacgaggggcagtttttccctgacatcgtggagttctgcgaggccatggccaacgccgggaagaccgtaattgtggctgcactggatgggaccttccagaggaagccatttggggccatcctgaacctggtgccgctggccgagagcgtggtgaagctgacggcggtgtgcatggagtgcttccgggaagccgcctataccaagaggctcggcacagagaaggaggtcgaggtgattgggggagcagacaagtaccactccgtgtgtcggctctgctacttcaagaaggcctcaggccagcctgccgggccggacaacaaagagaactgcccagtgccaggaaagccaggggaagccgtggctgccaggaagctctttgccccacagcagattctgcaatgcagccctgccaactgagggacctgcgagggccgcccgctcccttcctgccactgccgcctactggacgctgccctgcatgctgccctgaggatggcctggattcacgccctcttgtttccttttgggctcaaagcccttcctacctctggtgatggtttccacaggaacaacagcatctttcaccaagatgggtggcaccaaccttgctgggacttggatcccaggggcttatctcttcaagtgtggagagggcagggtccacgcctctgctgtagcttatgaaattaactaattgaaaattc

SEQ ID NO: 136820 - protein, 924 aa, Artificial Sequence
  derived and/or modified sequence
MPGPSPGLRRALLGLWAALGLGLFGLSAVSQEPFWADLQPRVAFVERGGSLWLNCSTNCPRPERGGLETSLRRNGTQRGLRWLARQLVDIREPETQPVCFFRCARRTLQARGLIRTFQRPDRVELMPLPPWQPVGENFTLSCRVPGAGPRASLTLTLLRGAQELIRRSFAGEPPRARGAVLTATVLARREDHGANFSCRAELDLRPHGLGLFENSSAPRELRTFSLSPDAPRLAAPRLLEVGSERPVSCTLDGLFPASEARVYLALGDQNLSPDVTLEGDAFVATATATASAEQEGARQLVCNVTLGGENRETRENVTIYSFPAPLLTLSEPSVSEGQMVTVTCAAGAQALVTLEGVPAAVPGQPAQLQLNATENDDRRSFFCDATLDVDGETLIKNRSAELRVLYAPRLDDSDCPRSWTWPEGPEQTLRCEARGNPEPSVHCARSDGGAVLALGLLGPVTRALSGTYRCKAANDQGEAVKDVTLTVEYAPALDSVGCPERITWLEGTEASLSCVAHGVPPPDVICVRSGELGAVIEGLLRVAREHAGTYRCEATNPRGSAAKNVAVTVEYGPRFEEPSCPSNWTWVEGSGRLFSCEVDGKPQPSVKCVGSGGATEGVLLPLAPPDPSPRAPRIPRVLAPGIYVCNATNRHGSVAKTVVVSAESPPEMDESTCPSHQTWLEGAEASALACAARGRPSPGVRCSREGIPWPEQQRVSREDAGTYHCVATNAHGTDSRTVTVGVEYRPVVAELAASPPGGVRPGGNFTLTCRAEAWPPAQISWRAPPGALNIGLSSNNSTLSVAGAMGSHGGEYECAATNAHGRHARRITVRVAGPWLWVAVGGAAGGAALLAAGAGLAFYVQSTACKKGEYNVQEAESSGEAVCLNGAGGGAGGAAGAEGGPEAAGGAAESPAEGEVFAIQLTSA

SEQ ID NO: 136821 - DNA, 2775 bp, Artificial Sequence
  derived and/or modified sequence
atgcccggcccctcgccaggactgaggcgggccctgctcgggctctgggcagcactgggccttggactctttggactatccgccgtctctcaggagcccttttgggcggatctgcagcctcgtgtggcttttgtggagcggggaggcagcttgtggcttaattgcagcactaactgtcccagaccagaacgtggtggcctcgaaacgtctttgagacgcaacggaacccaacgaggcttaagatggttggcacggcagctggtggacatccgcgaaccggagactcagcctgtgtgttttttcagatgtgccaggaggactctccaagccaggggcttaatcaggactttccagagaccagaccgggtggagctgatgccccttcccccatggcaaccggtcggtgaaaatttcactctgtcatgtagagtacctggtgctgggccacgagcttctctgaccttaacacttctgaggggggcacaagaactcatcagacgctcatttgcgggcgagccgccacgggcacggggagctgtgctgactgccaccgtcttagcgcgcagggaagatcacggcgcaaacttcagttgcagagccgagctggatttaagaccacatggcctcggactgttcgagaacagctcagccccccgggagctcaggacgttttccttgtccccggacgccccgaggctcgccgctcctaggctgcttgaagtgggcagtgagagacctgtgagctgcacactggacggcctatttcctgcgagtgaggcccgggtttatttagcactcggggatcagaacctgtcccccgatgtcacactggagggggacgcctttgttgcaacggcaacagctactgcaagtgctgagcaggagggtgcaagacaactggtctgcaatgtgactctgggaggcgagaacagggagactcgtgagaacgttacgatatacagttttcctgccccactgttaaccctaagcgagccatctgtgtccgagggtcagatggtgacggtaacatgtgctgctggagctcaagccctagtgactttagagggagttccagctgcggtgccagggcagcccgctcagcttcaactcaatgcaaccgagaacgatgatcggcggtcctttttttgcgatgcgactttagacgtggatggagagactctgattaaaaacaggtcagccgaactgcgggttctgtatgccccgaggctggatgacagtgactgcccgcggagttggacttggcctgagggccccgagcagacgcttaggtgcgaagccagaggaaaccccgaaccttctgttcactgtgcaaggtctgacgggggagcagtcctggcgctcgggcttttggggccggtgactcgtgcactgagcggaacgtatcggtgcaaagctgccaacgaccagggcgaggctgtcaaggatgtgaccctgacggtggaatacgccccagccttggactccgtgggatgccccgaacgaattacctggctcgagggaaccgaggcgtcattatcttgtgtggcccacggggtgcctcccccagacgtcatctgtgtgcggtccggtgaactgggggctgtgatcgaaggtttactaagagtggcccgggagcacgccggcacctaccggtgcgaggccacaaatccccgggggtctgcagccaaaaacgtggcagtgaccgtagagtacgggccacgatttgaagaaccaagctgtccatcaaactggacttgggtggagggaagcgggcgcctcttcagctgcgaggttgacggcaaaccgcagccatcagtaaagtgcgtgggcagtgggggcgcgacagagggagtgttactccccctcgctcccccggatccctccccccgggccccccgcatcccacgagtgctggcccctggtatctacgtctgcaatgccactaacagacacggcagcgtggccaagactgtagttgtcagcgccgagtcaccacccgaaatggatgagtctacctgcccatcccaccagacctggttggagggagccgaagctagcgccctggcctgtgccgcgcggggcagaccctcccccggagtgagatgctccagggaagggatcccttggcccgagcagcagcgcgtgagtcgtgaggacgcaggcacataccattgcgtagcgactaacgctcatggtaccgacagtagaactgtaaccgttggagtagagtaccggcctgtcgtggccgaactggcagcttctccgcccgggggggtgagaccaggaggaaattttaccctgacttgcagggctgaagcatggcctccagcccagatctcgtggcgggccccacccggagcactaaatattggtctgtcttccaataactcgaccctctccgttgccggggccatgggatcgcacgggggcgagtatgaatgtgcagccaccaatgcccacgggcggcacgcgcgacgcatcactgtgagggttgctggaccctggctatgggttgctgtcggcggcgccgccggtggagccgctttgctcgcagccggcgctggtcttgccttctacgtccagtctacagcatgcaagaagggggagtacaacgtgcaagaagctgagtcgagcggagaagccgtttgcctgaatggcgcaggcggcggcgccggaggcgcagcgggggccgaaggaggtcccgaggcagccggcggcgccgcggagtctcccgccgagggggaggtgttcgctatccaattgactagcgcttag

SEQ ID NO: 136822 - DNA, 2775 bp, Artificial Sequence
  derived and/or modified sequence
atgcctggccccagccctggcctgcggcgggccctgctgggcctgtgggccgccctgggcctgggcctgtttggcctgtctgctgtgtcccaggagcccttctgggccgacctgcagccccgggtggcctttgtggagcggggcggcagcctgtggctgaactgcagcaccaactgccccaggcctgagcggggcggcctggagaccagcctgcggagaaatggcacccagaggggcctgcgctggctggcccggcagctggtggacatccgggagcctgagacccagcctgtgtgcttcttccgctgtgcccggaggaccctgcaggcccggggcctcatccgcaccttccagaggccagacagagtggagctgatgcccctgcccccctggcagcctgtgggggagaacttcaccctgagctgccgggtgcctggagctggcccccgggccagcctgaccctgaccctgctgcggggggcccaggagctgatccgccgcagctttgctggggagcccccccgggcccggggagctgtgctgacagccaccgtgctggcccggcgggaggaccacggggccaacttcagctgcagagctgagctggacctgcggccccacggcctgggcctgtttgagaacagcagcgccccccgggagctgcggaccttcagcctgagcccagatgccccccggctggccgccccccggctgctggaggtgggcagcgagaggcctgtgtcctgcaccctggatggcctcttccctgccagcgaggcccgggtgtacctggccctgggggaccagaacctgagcccagatgtgaccctggagggagatgcctttgtggccacagccacagccacagccagcgctgagcaggagggcgcccggcagctggtgtgcaatgtgaccctgggcggagaaaatcgggagaccagagaaaatgtgaccatctacagcttccctgcccccctgctgaccctgtctgagcccagcgtgtctgagggccagatggtgacagtgacctgtgccgccggggcccaggccctggtgaccctggagggcgtgcctgctgctgtgcccggccagcctgcccagctgcagctgaatgccacagaaaatgatgaccggcgctccttcttctgtgatgccaccctggatgtggatggagagaccctcatcaagaacagatctgctgagctgcgggtgctgtatgccccccggctggatgacagcgactgccccaggtcctggacctggccagagggccctgagcagaccctgcgctgtgaggcccggggcaaccctgagcccagcgtgcactgtgcccggagtgatggaggagctgtgctggccctgggcctgctgggccctgtgacccgggccctgagcggcacctaccgctgcaaggccgccaatgaccagggcgaggccgtgaaggatgtgaccctgactgtggagtatgccccagccctggacagcgtgggctgcccagagcgcatcacctggctggagggcacagaggccagcctgagctgtgtggcccatggagtgcccccaccagatgtgatctgtgtgcgctctggagagctgggcgccgtcatcgagggcctgctgcgggtggcccgggagcacgccggcacctaccgctgtgaggccaccaacccccggggcagcgctgccaagaatgtggccgtgacagtggagtatggccccaggtttgaggagcccagctgccccagcaactggacctgggtggagggcagcggccgcctcttcagctgtgaggtggatggcaagccccagcccagcgtgaagtgtgtgggcagcggcggggccacagaaggagtgctgctgcccctggcccccccagaccccagcccccgggccccccgcatcccccgggtgctggcccctggcatctacgtgtgcaatgccaccaacagacatggctctgtggccaagacagtggtggtgtctgctgagagccccccagagatggatgagagcacctgccccagccaccagacctggctggagggcgctgaggccagcgccctggcctgtgccgcccggggccggcccagccctggggtgcgctgcagccgggagggcatcccctggccagagcagcagagggtgtcccgggaggatgctggcacctaccactgtgtggccaccaatgcccatggaacagacagcaggacagtgacagtgggcgtggagtacagacctgtggtggccgagctggccgccagccccccaggcggcgtgcggcctgggggcaacttcaccctgacctgcagagctgaggcctggcccccagcccagatctcctggagggcccctcctggggccctgaacatcggcctgagcagcaacaacagcaccctgtctgtggccggggccatgggcagccacggcggggagtatgaatgtgccgccaccaatgcccacggcagacatgcccggcgcatcaccgtgcgggtggccggcccctggctgtgggtggccgtgggcggggccgccggcggggccgccctgctggccgccggggccggcctggccttctacgtgcagagcacagcctgcaagaagggggagtacaacgtgcaggaggccgagagcagcggggaggccgtgtgcctgaatggagctgggggcggggccggcggcgctgctggagctgagggcggccctgaggccgccggcggcgctgctgagagccctgctgagggggaggtgtttgccatccagctgaccagcgcctag

SEQ ID NO: 136823 - DNA, 2775 bp, Artificial Sequence
  derived and/or modified sequence
atgcccggccccagccccggcctgcggcgggccctgctgggcctgtgggcagccctggggctgggcctcttcggcttgtccgccgttagccaagagcccttttgggctgacctacagcctagggtggcatttgtggagagaggcggtagcctgtggttaaactgcagcaccaactgtcctcgccccgagaggggagggctagagactagcctgcgtcgaaatggaacacagcggggtcttcgctggctggcaagacagctggtggatataagggaacctgagacgcagcccgtttgcttcttccggtgcgcccgacgaaccctccaggcgcgtgggctgatccggacgttccaaaggcccgacagagttgagctgatgcctttaccgccgtggcagccggtcggcgagaattttacactgtcttgtcgagtgcctggcgcaggcccgagggcttcactcaccttgaccctcctgcggggggctcaggaactgatacggaggagcttcgccggcgaacccccaagggcccgcggagcagtgctgactgcgacggtcctggctcgtagagaagaccatggagctaatttctcctgcagggccgagctagacctccggcctcatggtttgggtttattcgaaaacagctccgcacccagagagctgaggactttttccttgagtcctgatgcaccgcgcctagcagcgccccgactgttggaggtcggctccgagcgtccagtgtcatgcacattggatggcctctttcccgcatcagaggccagggtgtatctggcactcggagaccagaacctgagcccagacgttactttggagggggatgccttcgtggcaacagcgacagccacagcctcggcagagcaggaaggcgcgcggcaactggtgtgtaacgtcactcttggaggggagaatcgtgagacccgggaaaatgttactatctactcatttcccgcccccctcctcaccttgtctgagccgtcggtgtccgaggggcagatggtgacagttacgtgcgccgctggcgctcaagcactcgttaccttggagggcgttccagccgcggttccgggccaacccgcacagctgcagctgaatgctaccgaaaatgacgacaggcgctcctttttctgcgacgctactctggatgtggatggggaaactctcatcaagaatcgcagcgccgagctgcgcgtactgtacgcacccagactggatgactccgattgcccacggtcctggacctggccagagggtcccgagcagactctgcgctgtgaggccaggggcaaccccgagccctcagtacactgtgcccgcagcgacgggggagccgttttggccctcggtttactggggccagtgacacgagcgctgtccgggacatacaggtgtaaagccgctaatgaccaaggcgaggctgtaaaagacgtgaccttgacagtggaatacgcccccgccctcgactcagttggatgtccagagaggatcacgtggcttgagggtacggaagcttccctgtcttgcgtagcccacggggttccccctccagacgtcatatgtgtgaggagtggagaactaggggccgtgatcgaagggctgctgcgcgttgccagggagcacgcggggacatatagatgtgaggccacgaacccgcgggggtccgccgctaagaacgtcgccgttaccgtagagtatggaccccggttcgaggaaccatcttgcccaagcaactggacatgggtggagggatccggccgactgttcagctgtgaagtcgacggcaagccccaacccagcgtgaagtgtgtgggaagtgggggtgcaaccgagggtgtgttgctgcctcttgcaccacctgaccctagccctcgcgctccacgcattccgcgcgttctggcccctggaatttacgtgtgtaacgctaccaacaggcacggcagcgtggcaaagaccgtggtggtcagtgcggaatcaccccccgaaatggacgaatccacgtgtccttcacaccagacgtggcttgagggcgccgaagcaagcgcgctggcctgcgccgcacgcggccgaccctctccaggcgtgcgttgctctcgggaggggataccctggccagaacagcagcgcgtaagtagagaggatgcagggacttaccattgtgtcgccactaacgcccacggtactgattcacggactgtgactgtaggcgttgagtacaggccggtggtcgccgagctggcggcctcgcctcccggtggcgttcgcccaggcggaaattttacgctcacctgtcgtgcagaggcatggccacctgcgcagatttcttggagggcccccccaggtgccctgaatattggcctctcgtcaaacaactcgaccctcagcgttgccggagcaatggggtcccacggaggcgaatacgagtgtgcggccactaacgcacatggccgtcatgctcggaggatcactgtccgcgtggctgggccctggctgtgggtggcggtcggcggtgcagcagggggggccgccctccttgccgccggcgctggtcttgccttctacgtccagtctacagcttgcaagaagggggagtataatgttcaggaagccgagtccagtggcgaggccgtgtgcctgaacggagccgggggaggagccggaggcgcagcaggcgcggagggaggacccgaggcggctggcggcgccgcggaatcgccagccgagggagaggtgtttgccatccagcttactagcgcatag

SEQ ID NO: 136824 - DNA, 2775 bp, Artificial Sequence
  derived and/or modified sequence
atgccaggtccatcccctggccttcggagagccctcctcgggctctgggcagccctcggtctcgggctgtttggcctctcagctgtctcgcaggagcctttctgggccgatctccagccaagagtggcttttgtcgaaagaggtgggtctctctggcttaattgctctacgaactgtcctcggccagaaagaggtggcctcgagaccagcctgcgcaggaatggaacccagcgcggactcaggtggctggcaagacagttggtggacatccgtgaaccagaaacccaacctgtgtgtttttttagatgcgcgagacgaaccctgcaggccagaggactgatccgaacctttcagcgacccgatcgagtcgagcttatgccactgccgccatggcagcccgtcggggaaaactttacactgtcctgccgggtcccaggagcgggaccacgagccagccttactctgacactcttgagaggagctcaagagctgattcggaggagctttgccggagagccaccaagggccaggggagctgtgctgacagcgaccgtcctcgctaggagagaagaccatggcgctaacttttcctgcagagccgaactggatctccgcccacatggcttggggctgttcgagaactcaagcgcacctagggagttacggactttttcactgagccctgatgctcccaggttggccgctcctcggcttttagaagtgggaagtgagagacctgtgtcgtgcaccctcgacgggctgtttcctgcttctgaggcaagagtctacttggccctaggcgatcagaatctgagcccagatgtgaccctggagggggacgccttcgtggcgaccgccaccgcaaccgcctctgcagaacaggaaggcgctcgccaactggtttgtaacgtgacactgggaggagaaaatcgggaaacccgcgagaacgtaaccatttacagcttccccgctccactgttgacgctcagtgagccttccgtgtctgagggtcagatggtgacagtaacctgtgccgcaggcgctcaagctctcgttaccttagaaggggtacctgccgctgtgccaggacagcctgcacagttacagctcaacgcaactgaaaatgatgacagacgtagtttcttttgcgacgcgactctggatgtcgacggggagaccttgattaaaaacaggtccgcagagctgcgtgttttgtacgctcctaggctggacgactctgactgtccaaggagctggacgtggcccgaaggacccgagcagacattaagatgtgaggcacgaggtaacccagagccctctgtgcattgcgcgcgtagcgacgggggtgccgtgttggcactaggcttactcggcccagtgactcgggctctgtccgggacatatagatgtaaggctgccaatgaccaaggagaagccgtgaaagacgtcaccctcacagtggaatatgctccagcacttgacagtgtgggctgtcctgagcggattacttggttggaagggacggaggcgtccctctcttgtgtagcccacggagtgccacccccagacgtcatctgcgttcgaagcggggagctgggcgcagtgatagaaggactgctccgggtggcccgagagcatgctggtacataccgctgtgaggcaacgaaccctcggggatcggctgcgaagaacgtagcagttactgtggagtatggacccaggttcgaggagccttcttgtccatcaaattggacgtgggtggagggatcgggccgtctcttttcctgcgaggtcgatggcaagccacagcccagcgtgaaatgcgtcgggagcgggggagccaccgagggcgtgctgcttccactggctccgccagacccttcaccacgtgcgcctaggattcctcgggtgctggctccgggtatttacgtgtgtaatgcgaccaaccggcatgggtctgtggctaagaccgtcgtggtttcggcagagagcccccctgagatggatgagagcacttgtccttcacatcagacttggctggagggcgcagaagccagtgctcttgcatgcgcagcacgcggacgcccatcacctggggttcggtgctctcgggaaggcatcccctggcctgaacagcagcgggtgtctcgggaggatgccggaacatatcactgcgtcgcaactaacgcccatggcaccgatagtcgtaccgtgactgtgggcgtggagtaccgtcccgttgttgctgaattagccgcttcgcctccaggaggcgttcggcctgggggaaacttcactcttacctgccgcgctgaagcttggccccctgcacaaatttcctggagagcacccccaggggctctgaacatagggctttcatctaataacagcacactaagcgtggcaggcgctatgggctctcacggtggcgaatatgagtgtgcagccaccaatgctcacggcaggcacgctcgacgcatcaccgtaagagtagctgggccatggctgtgggtggctgtggggggagccgctgggggtgctgctctattggcagccggtgctggtttggctttttatgtgcagtcgacagcctgtaagaagggtgaatataacgtccaggaagccgagtcatctggtgaggcagtgtgcctgaacggggctggcggtggagccggaggagccgcaggagctgagggtggaccagaagccgctgggggagctgcggagagccctgccgaaggagaggtgtttgctattcagttgacctctgcttag

SEQ ID NO: 136825 - DNA, 2775 bp, Artificial Sequence
  derived and/or modified sequence
atgcccggccccagccccggcctgagaagagccctgctgggcctgtgggccgccctgggcctgggcctgttcggcctgagcgccgtgagccaggagcccttctgggccgacctgcagcccagagtggccttcgtggagagaggcggcagcctgtggctgaactgcagcaccaactgccccagacccgagagaggcggcctggagaccagcctgagaagaaacggcacccagagaggcctgagatggctggccagacagctggtggacatcagagagcccgagacccagcccgtgtgcttcttcagatgcgccagaagaaccctgcaggccagaggcctgatcagaaccttccagagacccgacagagtggagctgatgcccctgcccccctggcagcccgtgggcgagaacttcaccctgagctgcagagtgcccggcgccggccccagagccagcctgaccctgaccctgctgagaggcgcccaggagctgatcagaagaagcttcgccggcgagccccccagagccagaggcgccgtgctgaccgccaccgtgctggccagaagagaggaccacggcgccaacttcagctgcagagccgagctggacctgagaccccacggcctgggcctgttcgagaacagcagcgcccccagagagctgagaaccttcagcctgagccccgacgcccccagactggccgcccccagactgctggaggtgggcagcgagagacccgtgagctgcaccctggacggcctgttccccgccagcgaggccagagtgtacctggccctgggcgaccagaacctgagccccgacgtgaccctggagggcgacgccttcgtggccaccgccaccgccaccgccagcgccgagcaggagggcgccagacagctggtgtgcaacgtgaccctgggcggcgagaacagagagaccagagagaacgtgaccatctacagcttccccgcccccctgctgaccctgagcgagcccagcgtgagcgagggccagatggtgaccgtgacctgcgccgccggcgcccaggccctggtgaccctggagggcgtgcccgccgccgtgcccggccagcccgcccagctgcagctgaacgccaccgagaacgacgacagaagaagcttcttctgcgacgccaccctggacgtggacggcgagaccctgatcaagaacagaagcgccgagctgagagtgctgtacgcccccagactggacgacagcgactgccccagaagctggacctggcccgagggccccgagcagaccctgagatgcgaggccagaggcaaccccgagcccagcgtgcactgcgccagaagcgacggcggcgccgtgctggccctgggcctgctgggccccgtgaccagagccctgagcggcacctacagatgcaaggccgccaacgaccagggcgaggccgtgaaggacgtgaccctgaccgtggagtacgcccccgccctggacagcgtgggctgccccgagagaatcacctggctggagggcaccgaggccagcctgagctgcgtggcccacggcgtgcccccccccgacgtgatctgcgtgagaagcggcgagctgggcgccgtgatcgagggcctgctgagagtggccagagagcacgccggcacctacagatgcgaggccaccaaccccagaggcagcgccgccaagaacgtggccgtgaccgtggagtacggccccagattcgaggagcccagctgccccagcaactggacctgggtggagggcagcggcagactgttcagctgcgaggtggacggcaagccccagcccagcgtgaagtgcgtgggcagcggcggcgccaccgagggcgtgctgctgcccctggccccccccgaccccagccccagagcccccagaatccccagagtgctggcccccggcatctacgtgtgcaacgccaccaacagacacggcagcgtggccaagaccgtggtggtgagcgccgagagcccccccgagatggacgagagcacctgccccagccaccagacctggctggagggcgccgaggccagcgccctggcctgcgccgccagaggcagacccagccccggcgtgagatgcagcagagagggcatcccctggcccgagcagcagagagtgagcagagaggacgccggcacctaccactgcgtggccaccaacgcccacggcaccgacagcagaaccgtgaccgtgggcgtggagtacagacccgtggtggccgagctggccgccagcccccccggcggcgtgagacccggcggcaacttcaccctgacctgcagagccgaggcctggccccccgcccagatcagctggagagccccccccggcgccctgaacatcggcctgagcagcaacaacagcaccctgagcgtggccggcgccatgggcagccacggcggcgagtacgagtgcgccgccaccaacgcccacggcagacacgccagaagaatcaccgtgagagtggccggcccctggctgtgggtggccgtgggcggcgccgccggcggcgccgccctgctggccgccggcgccggcctggccttctacgtgcagagcaccgcctgcaagaagggcgagtacaacgtgcaggaggccgagagcagcggcgaggccgtgtgcctgaacggcgccggcggcggcgccggcggcgccgccggcgccgagggcggccccgaggccgccggcggcgccgccgagagccccgccgagggcgaggtgttcgccatccagctgaccagcgcctag

SEQ ID NO: 136826 - DNA, 3001 bp, Artificial Sequence
  derived and/or modified sequence
ccgtcctctagcccagctcctcggctcgcgctctcctcgcctcctgtgctttccccgccgcggcgatgccagggccttcgccagggctgcgccgggcgctactcggcctctgggctgctctgggcctggggctcttcggcctctcagcggtctcgcaggagcccttctgggcggacctgcagcctcgcgtggcgttcgtggagcgcgggggctcgctgtggctgaattgcagcaccaactgccctcggccggagcgcggtggcctggagacctcgctgcgccgaaacgggacccagaggggtttgcgttggttggcgcggcagctggtggacattcgcgagccggagactcagcccgtctgcttcttccgctgcgcgcggcgcacactacaggcgcgtgggctcattcgcactttccagcgaccagatcgcgtagagctgatgccgctgcctccctggcagccggtgggcgagaacttcaccctgagctgtagggtccccggcgccgggccccgtgcgagcctcacgctgaccctgctgcggggcgcccaggagctgatccgccgcagcttcgccggtgaaccaccccgagcgcggggcgcggtgctcacagccacggtactggctcggagggaggaccatggagccaatttctcgtgtcgcgccgagctggacctgcggccgcacggactgggactgtttgaaaacagctcggcccccagagagctccgaaccttctccctgtctccggatgccccgcgcctcgctgctccccggctcttggaagttggctcggaaaggcccgtgagctgcactctggacggactgtttccagcctcagaggccagggtctacctcgcactgggggaccagaatctgagtcctgatgtcaccctcgaaggggacgcattcgtggccactgccacagccacagctagcgcagagcaggagggtgccaggcagctggtctgcaacgtcaccctggggggcgaaaaccgggagacccgggagaacgtgaccatctacagcttcccggcaccactcctgaccctgagcgaacccagcgtctccgaggggcagatggtgacagtaacctgcgcagctggggcccaagctctggtcacactggagggagttccagccgcggtcccggggcagcccgcccagcttcagctaaatgccaccgagaacgacgacagacgcagcttcttctgcgacgccaccctcgatgtggacggggagaccctgatcaagaacaggagcgcagagcttcgtgtcctatacgctccccggctagacgattcggactgccccaggagttggacgtggcccgagggcccagagcagacgctgcgctgcgaggcccgcgggaacccagaaccctcagtgcactgtgcgcgctccgacggcggggccgtgctggctctgggcctgctgggtccagtcactcgggcgctctcaggcacttaccgctgcaaggcggccaatgatcaaggcgaggcggtcaaggacgtaacgctaacggtggagtacgcaccagcgctggacagcgtgggctgcccagaacgcattacttggctggagggaacagaagcctcgctgagctgtgtggcgcacggggtaccgccgcctgatgtgatctgcgtgcgctctggagaactcggggccgtcatcgaggggctgttgcgtgtggcccgggagcatgcgggcacttaccgctgcgaagccaccaaccctcggggctctgcggccaaaaatgtggccgtcacggtggaatatggccccaggtttgaggagccgagctgccccagcaattggacatgggtggaaggatctgggcgcctgttttcctgtgaggtcgatgggaagccacagccaagcgtgaagtgcgtgggctccgggggcgccactgagggggtgctgctgccgctggcacccccagaccctagtcccagagctcccagaatccctagagtcctggcacccggtatctacgtctgcaacgccaccaaccgccacggctccgtggccaaaacagtcgtcgtgagcgcggagtcgccaccggagatggatgaatctacctgcccaagtcaccagacgtggctggaaggggctgaggcttccgcgctggcctgcgccgcccggggtcgcccttccccaggagtgcgctgctctcgggaaggcatcccatggcctgagcagcagcgcgtgtcccgagaggacgcgggcacttaccactgtgtggccaccaatgcgcatggcacggactcccggaccgtcactgtgggcgtggaataccggccagtggtggccgaacttgctgcctcgccccctggaggcgtgcgcccaggaggaaacttcacgttgacctgccgcgcggaggcctggcctccagcccagatcagctggcgcgcgcccccgggggccctcaacatcggcctgtcgagcaacaacagcacactgagcgtggcaggcgccatgggaagccacggcggcgagtacgagtgcgcagccaccaacgcgcacgggcgccacgcgcggcgcatcacggtgcgcgtggccggtccgtggctatgggtcgccgtgggcggcgcggcggggggcgcggcgctgctggccgcgggggccggcctggccttctacgtgcagtccaccgcctgcaagaagggcgagtacaacgtgcaggaggccgagagctcaggcgaggccgtgtgtctgaacggagcgggcggcggcgctggcggggcggcaggcgcggagggcggacccgaggcggcggggggcgcggccgagtcgccggcggagggcgaggtcttcgccatacagctgacatcggcgtgagcccgctcccctctccccgcgggccgggggacgccccccagactcacacgggggcttatttattgctttatttatttacttattcatttatttatgtattcaactccaagggcgtcacccccattttctacccatcccctcaataaagtttttataaagga

SEQ ID NO: 136827 - protein, 743 aa, Artificial Sequence
  derived and/or modified sequence
MYPQGRHPTPLQSGQPFKFSILEICDRIKEEFQFLQAQYHSLKLECEKLASEKTEMQRHYVMYYEMSYGLNIEMHKQAEIVKRLSGICAQIIPFLTQEHQQQVLQAVERAKQVTVGELNSLIGQQLQPLSHHAPPVPLTPRPAGLVGGSATGLLALSGALAAQAQLAAAVKEDRAGVEAEGSRVERAPSRSASPSPPESLVEEERPSGPGGGGKQRADEKEPSGPYESDEDKSDYNLVVDEDQPSEPPSPATTPCGKVPICIPARRDLVDSPASLASSLGSPLPRAKELILNDLPASTPASKSCDSSPPQDASTPGPSSASHLCQLAAKPAPSTDSVALRSPLTLSSPFTTSFSLGSHSTLNGDLSVPSSYVSLHLSPQVSSSVVYGRSPVMAFESHPHLRGSSVSSSLPSIPGGKPAYSFHVSADGQMQPVPFPSDALVGAGIPRHARQLHTLAHGEVVCAVTISGSTQHVYTGGKGCVKVWDVGQPGAKTPVAQLDCLNRDNYIRSCKLLPDGRSLIVGGEASTLSIWDLAAPTPRIKAELTSSAPACYALAVSPDAKVCFSCCSDGNIVVWDLQNQTMVRQFQGHTDGASCIDISDYGTRLWTGGLDNTVRCWDLREGRQLQQHDFSSQIFSLGHCPNQDWLAVGMESSNVEILHVRKPEKYQLHLHESCVLSLKFASCGRWFVSTGKDNLLNAWRTPYGASIFQSKESSSVLSCDISRNNKYIVTGSGDKKATVYEVVY

SEQ ID NO: 136828 - protein, 292 aa, Artificial Sequence
  derived and/or modified sequence
LAHGEVVCAVTISGSTQHVYTGGKGCVKVWDVDGAVFAGQRGGAHQPIRNRDNYIRSCKLLPDGRSLIVGGEASTLSIWDLAAPTPRIKAELTSSAPACYALAVSPDAKVCFSCCSDGNIVVWDLQNQTMVRQFQGHTDGASCIDISDYGTRLWTGGLDNTVRCWDLREGRQLQQHDFSSQIFSLGHCPNQDWLAVGMESSNVEILHVRKPEKYQLHLHESCVLSLKFASCGRWFVSTGKDNLLNAWRTPYGASIFQSKESSSVLSCDISRNNKYIVTGSGDKKATVYEVVY

SEQ ID NO: 136829 - DNA, 2232 bp, Artificial Sequence
  derived and/or modified sequence
atgtacccccagggcagacaccccacccccctgcagagcggccagcccttcaagttcagcatcctggagatctgcgacagaatcaaggaggagttccagttcctgcaggcccagtaccacagcctgaagctggagtgcgagaagctggccagcgagaagaccgagatgcagagacactacgtgatgtactacgagatgagctacggcctgaacatcgagatgcacaagcaggccgagatcgtgaagagactgagcggcatctgcgcccagatcatccccttcctgacccaggagcaccagcagcaggtgctgcaggccgtggagagagccaagcaggtgaccgtgggcgagctgaacagcctgatcggccagcagctgcagcccctgagccaccacgccccccccgtgcccctgacccccagacccgccggcctggtgggcggcagcgccaccggcctgctggccctgagcggcgccctggccgcccaggcccagctggccgccgccgtgaaggaggacagagccggcgtggaggccgagggcagcagagtggagagagcccccagcagaagcgccagccccagcccccccgagagcctggtggaggaggagagacccagcggccccggcggcggcggcaagcagagagccgacgagaaggagcccagcggcccctacgagagcgacgaggacaagagcgactacaacctggtggtggacgaggaccagcccagcgagccccccagccccgccaccaccccctgcggcaaggtgcccatctgcatccccgccagaagagacctggtggacagccccgccagcctggccagcagcctgggcagccccctgcccagagccaaggagctgatcctgaacgacctgcccgccagcacccccgccagcaagagctgcgacagcagccccccccaggacgccagcacccccggccccagcagcgccagccacctgtgccagctggccgccaagcccgcccccagcaccgacagcgtggccctgagaagccccctgaccctgagcagccccttcaccaccagcttcagcctgggcagccacagcaccctgaacggcgacctgagcgtgcccagcagctacgtgagcctgcacctgagcccccaggtgagcagcagcgtggtgtacggcagaagccccgtgatggccttcgagagccacccccacctgagaggcagcagcgtgagcagcagcctgcccagcatccccggcggcaagcccgcctacagcttccacgtgagcgccgacggccagatgcagcccgtgcccttccccagcgacgccctggtgggcgccggcatccccagacacgccagacagctgcacaccctggcccacggcgaggtggtgtgcgccgtgaccatcagcggcagcacccagcacgtgtacaccggcggcaagggctgcgtgaaggtgtgggacgtgggccagcccggcgccaagacccccgtggcccagctggactgcctgaacagagacaactacatcagaagctgcaagctgctgcccgacggcagaagcctgatcgtgggcggcgaggccagcaccctgagcatctgggacctggccgcccccacccccagaatcaaggccgagctgaccagcagcgcccccgcctgctacgccctggccgtgagccccgacgccaaggtgtgcttcagctgctgcagcgacggcaacatcgtggtgtgggacctgcagaaccagaccatggtgagacagttccagggccacaccgacggcgccagctgcatcgacatcagcgactacggcaccagactgtggaccggcggcctggacaacaccgtgagatgctgggacctgagagagggcagacagctgcagcagcacgacttcagcagccagatcttcagcctgggccactgccccaaccaggactggctggccgtgggcatggagagcagcaacgtggagatcctgcacgtgagaaagcccgagaagtaccagctgcacctgcacgagagctgcgtgctgagcctgaagttcgccagctgcggcagatggttcgtgagcaccggcaaggacaacctgctgaacgcctggagaaccccctacggcgccagcatcttccagagcaaggagagcagcagcgtgctgagctgcgacatcagcagaaacaacaagtacatcgtgaccggcagcggcgacaagaaggccaccgtgtacgaggtggtgtactag

SEQ ID NO: 136830 - DNA, 2232 bp, Artificial Sequence
  derived and/or modified sequence
atgtacccacaaggccggcacccaaccccactacagtcaggacaaccttttaaattcagcatcctggagatctgcgacaggatcaaggaggagttccagttcctccaggcccaatatcattccctaaaactggagtgtgaaaagctcgcatccgagaaaacagagatgcaaaggcactatgttatgtattacgaaatgagttacggcctgaacattgagatgcacaaacaagcagagatcgtgaagcgcctctctggaatctgcgctcaaatcattccatttctcactcaggagcatcaacagcaggtactgcaggcagtggagcgagcgaaacaggtgaccgtgggcgaactgaattcactgatcggccaacagctccaaccgcttagccatcatgccccccccgtgccactgacccccagaccagccggactggtcggcggttctgctacaggcctgctagctctgtcaggggccctggcagcacaagcacagctggctgctgcagtcaaggaggatcgcgctggcgtcgaggccgaagggtccagggtagagagagcaccatccagaagcgccagcccttctcctcctgagtctctggtggaggaagagaggccctccgggccgggaggcggcggcaaacagagggcagacgaaaaagagccttccggcccctatgaatccgacgaggataagtcagattataatcttgtggtcgacgaggatcagccctccgagcctccttcccccgccacaacgccctgcggcaaggtcccaatttgcatccccgccagaagggatctggtagacagccctgccagccttgcttcctctctcggaagtccactccctcgggcgaaagaactcattttaaacgatctccctgccagcactcctgcgagcaagtcctgtgactcctcacccccccaggacgcctccacccctggaccaagtagtgctagccacctgtgccagctggctgcaaagcccgcgccctcaaccgatagcgtggccttaaggtcacctctgacgttaagttcccctttcacaactagcttcagcctgggatctcactccacactaaatggtgatctgagcgtgccatcatcctacgttagtctgcacctctctccgcaggtctcttcgagcgttgtatatggcagatcaccagtgatggccttcgagtcccaccctcacctcagaggctcttcagtttcctcatccctacccagtatcccgggaggcaaaccggcttatagcttccatgtgtccgctgatggccagatgcagccggtaccattcccttccgatgccctcgtgggggctggcatcccacgacacgccaggcagctgcatacactcgctcatggtgaggtcgtgtgcgcggttacaatctctggctcaacacaacacgtgtatacaggaggaaaaggttgcgtgaaagtttgggatgttggccagccaggagccaaaacccctgtggctcaattggactgcctcaatcgggataactatattcggagctgtaagttactgcctgacggacgctcactgatagtcggcggcgaagcatctacactttctatttgggacctagctgctccaactcctaggattaaagccgagctcaccagttccgcacccgcctgttacgcattagccgtatcgccagacgcgaaagtctgtttcagctgttgcagtgatggaaacatagtagtatgggatttacagaatcagaccatggtgagacaattccagggacacaccgacggggctagttgcatagatatttccgattacggaacccgtctttggaccggtggactggataacaccgtgcgctgttgggacctgagggaagggaggcaactccaacaacatgatttctccagccagatcttcagtctgggacattgtccgaaccaagactggctggctgttggaatggaatcctccaatgtcgaaatcctgcacgtgagaaagcctgagaagtatcagctgcatcttcatgagtcctgcgtcctgtctctgaaatttgctagctgcggtcgatggttcgtttccaccggcaaagacaaccttctcaacgcttggagaactccttacggagcatccatctttcagagcaaggaatcctctagcgtgctgtcatgcgatatttctcgcaacaataagtacatcgtcaccggctccggagataagaaagccactgtgtatgaggtagtgtactag

SEQ ID NO: 136831 - DNA, 2232 bp, Artificial Sequence
  derived and/or modified sequence
atgtacccccagggccgccaccccacccccctgcagagcggccagcccttcaagttcagcatcctggagatctgtgaccgcatcaaggaggagttccagttcctgcaggcccagtaccacagcctgaagctggagtgtgagaagctggccagcgagaagacagagatgcagaggcactacgtgatgtactatgagatgtcctatggcctgaacatcgagatgcacaagcaggccgagatcgtgaagaggctgagcggcatctgtgcccagatcatccccttcctgacccaggagcaccagcagcaggtgctgcaggccgtggagcgggccaagcaggtgacagtgggggagctgaacagcctcatcggccagcagctgcagcccctgagccaccacgcccctcctgtgcccctgacccccaggcctgctggcctggtgggcggcagcgccaccggcctgctggccctgagcggggccctggccgcccaggcccagctggccgctgctgtgaaggaggacagagctggggtggaggccgagggcagccgggtggagcgggcccccagccgcagcgccagccccagccccccagagagcctggtggaggaggagcggcccagcggccctgggggcggcggcaagcagagagcagatgagaaggagcccagcggcccctatgaaagtgatgaggacaagagtgactacaacctggtggtggatgaggaccagcccagcgagccccccagccctgccaccaccccctgtgggaaggtgcccatctgcatcccagcccggcgggacctggtggacagccctgccagcctggccagcagcctgggcagccccctgccccgggccaaggagctgatcctgaatgacctgcctgccagcaccccagccagcaagagctgtgacagcagccccccccaggatgccagcaccccaggccccagcagcgccagccacctgtgccagctggccgccaagccagcccccagcacagacagcgtggccctgcggagccccctgaccctgagcagccccttcaccaccagcttcagcctgggcagccacagcaccctgaatggagacctgtctgtgcccagcagctatgtgtccctgcacctgagcccccaggtgagcagctctgtggtgtatggccgcagccctgtgatggcctttgagagccacccccacctgcggggcagctctgtgagcagcagcctgcccagcatccctgggggcaagccagcctacagcttccacgtgtctgcagatggccagatgcagcctgtgcccttccccagtgatgccctggtgggcgccggcatccccaggcatgcccggcagctgcacaccctggcccacggggaggtggtgtgtgctgtgaccatcagcggcagcacccagcacgtgtacacaggaggcaagggctgtgtgaaggtgtgggatgtgggccagcccggggccaagacccctgtggcccagctggactgcctgaacagagacaactacatccgcagctgcaagctgctgcctgatggccgcagcctgattgtgggcggggaggccagcaccctgagcatctgggacctggccgcccccaccccccgcatcaaggccgagctgaccagcagcgccccagcctgctacgccctggccgtgtccccagatgccaaggtgtgcttcagctgctgcagtgatggcaacatcgtggtgtgggacctgcagaaccagaccatggtgcggcagttccagggccacacagatggagccagctgcatcgacatcagtgactatggcacccggctgtggacaggaggcctggacaacacagtgcgctgctgggacctgcgggagggccggcagctgcagcagcacgacttcagcagccagatcttcagcctgggccactgccccaaccaggactggctggccgtgggcatggagagcagcaatgtggagatcctgcacgtgaggaagccagagaagtaccagctgcacctgcacgagagctgtgtgctgagcctgaagtttgccagctgtggccgctggtttgtgtccacaggcaaggacaacctgctgaatgcctggaggaccccctacggggccagcatcttccagagcaaggagagcagctctgtgctgagctgtgacatcagcaggaacaacaagtacatcgtgactggaagtggggacaagaaggccaccgtgtatgaggtggtgtactag

SEQ ID NO: 136832 - DNA, 2232 bp, Artificial Sequence
  derived and/or modified sequence
atgtacccccagggccggcaccccacccccctgcagagcggccagccctttaagttctctattctggaaatctgcgatcgcattaaggaagaattccagttccttcaggcccagtatcattcacttaagctcgaatgtgagaagttggcctcagagaaaacggagatgcagcgtcattacgtgatgtactacgaaatgtcttatggattgaatatagagatgcataaacaggcggaaattgtaaaaagactcagtggtatttgcgctcagattattccctttctgactcaggagcaccagcaacaggttctgcaagcggtggagcgggctaagcaggtgacagtgggggagttgaattccttgatcgggcaacaactgcaaccgttgtcacaccacgccccccccgtgcctctgacacctcgccctgctgggttggtgggtggatctgcaaccgggctcctggccctgtcaggcgctctcgccgctcaggctcaactggcagcagctgtgaaagaagatagggctggtgtggaggctgagggctcccgcgtggagcgtgccccctcacgtagcgctagcccaagccctcctgaatcacttgtggaggaagagaggccttcagggcccggaggggggggaaaacagagagcggatgagaaagagccctccggaccttatgaatcagatgaggacaagagtgactacaacctagtcgttgatgaggaccagccctccgagccccctagtcccgccactaccccatgcggcaaagtgccgatctgtattccagccagacgcgacttagttgacagtccagcctctttagcatcaagcctgggcagtcctctacctagagcaaaagaattgatcctgaatgatctacctgcatctacgcccgccagcaaatcgtgtgatagtagtcccccgcaagatgcttctactccaggcccctctagtgcctcccacctgtgtcagcttgccgcaaaaccggcccctagcaccgactccgtggccctccggtccccactgacgctctcttccccattcacaacttccttttccctgggttcccatagcaccctgaatggggacctgtcggtgccaagcagctacgtgtctctgcacctcagcccacaagtctcaagctccgtagtgtacggcaggtccccagttatggcgtttgagagtcacccacacctgagggggagttccgtcagctcaagcctcccatccataccagggggcaaacccgcctatagttttcatgtgtccgccgacggccaaatgcagccagtgccctttccgtcagatgctctggtgggtgccggaataccgcgtcacgcccgtcaacttcacacactggcacatggcgaagttgtctgcgctgtgaccatcagtggatcgacacagcacgtgtatacagggggaaagggctgcgtgaaagtttgggatgtggggcagcccggtgctaagactcccgtcgcccaattagactgtctgaacagggacaattatatccgctcatgcaagctactccctgacgggcgtagtcttatcgtgggcggggaagcctctaccctgtccatttgggatctggccgctccgacaccacgtattaaggctgaattaacatcctccgcacctgcatgttacgcattggcagtcagtcccgatgcgaaagtgtgtttcagctgttgcagcgatgggaatattgtggtatgggatcttcagaaccagacgatggtcaggcaattccagggccataccgacggtgcctcctgcattgacatcagcgactatgggacacgcctgtggacagggggcttagacaataccgtgagatgttgggacttgcgcgaaggtcgccaacttcagcagcatgacttcagttcacagatcttcagtttgggacattgcccgaaccaggactggctggctgtcggcatggagtccagcaacgtggagattctgcacgttcggaagcctgagaagtatcaactccatctgcatgaatcatgtgttttgagcctgaagtttgcctcttgcggacgttggtttgtctccactggcaaggataacttgctgaacgcctggcgtactccatatggcgctagcatattccagtcaaaggagagctcgtccgtcctctcgtgtgatattagtcgcaataacaagtatattgtgacaggctccggagacaagaaggctaccgtttacgaagtggtatactag

SEQ ID NO: 136833 - DNA, 2232 bp, Artificial Sequence
  derived and/or modified sequence
atgtacccgcaggggagacacccaactccattgcagtctggccagccatttaagttttcgattctagagatatgcgataggatcaaagaggaattccagttcctgcaagctcagtatcattccctcaagctcgaatgtgagaaactggcctcagaaaagactgagatgcaacggcactacgtcatgtactatgagatgtcatacggtttgaacatagagatgcacaaacaggcagagattgtgaaacgactctccggcatttgcgcacagattatcccgttcctgacacaggaacaccagcagcaggtcctccaagctgtcgaacgggcaaaacaggttacagtcggtgaactcaatagcttgatcggacaacagctgcagcctctcagccaccacgctccgcctgtccccctcacccctagaccagcgggtttggttgggggtagcgcaacggggctgttggccctgtccggcgctcttgccgcacaggcacagctcgcagcagcagtaaaggaagacagggctggagtggaggctgaaggaagtagagtcgagcgcgctccgtctcgatccgccagtccgagccccccagaaagcctcgtggaagaggaacgtccttccggaccagggggaggagggaaacagcgcgctgatgagaaagaacccagcggtccatacgagagcgacgaagataaatccgactataatctggtggtagatgaagatcaaccttccgagcctccctcccccgcaaccacaccttgcgggaaagttcccatctgcatcccagccagacgggacctggttgattctccggcatcgttagcatcctccctggggtcaccattaccaagagccaaagaactaattcttaacgatttaccagcctctacacctgcgagtaaatcatgcgacagctcacctccacaagacgcaagcaccccagggccttcctcagcatctcacctctgccagctggctgccaaacctgcacccagtacagacagcgtcgctctgaggtccccattgactctgtcttccccatttacaacttctttttctctgggctcccattcaacactgaatggcgatttgagcgtgcccagcagctatgtgtctctacacctgagcccacaggtatctagctcagtggtctacggccgtagtccggttatggcattcgagagtcatcctcaccttaggggaagctcggtatccagctcactgcctagcatccccggaggtaaaccagcatattcctttcacgtgtcagcagatggacagatgcagccggtgccttttcctagcgacgcattggtgggggctggcatccctcgccacgcacgtcagttgcacacgttggcacatggagaagtcgtgtgcgccgttaccatttcaggctcgacacagcatgtgtacacgggcggtaaggggtgtgttaaagtgtgggacgtcggccagccaggtgctaagaccccagtggcccaactggactgtctcaatcgcgataactatattaggagttgtaagttgcttcctgacggacgtagtctgattgtgggcggagaggccagcaccctgagcatttgggatctcgcagcgcctaccccgagaattaaggctgaactgacttcttctgcacctgcctgctatgctctcgctgtgagtcctgacgcaaaagtgtgttttagctgctgctcggatggcaacatcgtggtctgggacctgcagaaccaaaccatggtccgacagttccagggacataccgacggggcatcttgcatcgacataagcgactacgggacccggttatggaccggagggttagacaacacagtgaggtgctgggacttacgggaaggccgtcagctacagcagcatgattttagcagccagatcttttccctgggccactgccccaaccaggattggctcgcggttggcatggagagtagcaatgtggagattcttcacgtgaggaagcctgagaaataccagctgcacctccatgagagctgtgtactgtctcttaagttcgcatcgtgtggtagatggtttgtatcaaccggtaaggacaatctgcttaacgcttggcggactccatacggggcttccatctttcagtccaaggaatccagttccgtgctgtcatgtgacatctctaggaataataagtatatcgtcactggtagcggtgataaaaaagccacagtctatgaagtagtttactag

SEQ ID NO: 136834 - DNA, 2704 bp, Artificial Sequence
  derived and/or modified sequence
tcgccgcgctcccgccccggccgctgcccctgcccgccccgctcgccccgcgcaccccaacccggggaggggctcccacgaccccgggcgcgcgcgcttgggggcgcgccagggactccagggtcccttgccccgcgccgcttctccctcctccctctttcttcgggcagcctccccaccaccccacttcagcctcccccactcttgccgcctccatatcatcaagctctggtggcgcctggggggcttttcggatcggcaggatgtacccccagggaaggcacccgaccccgctccagtccggccagcccttcaagttctcgatcttggagatctgcgaccgcatcaaagaagaattccagtttcttcaggctcaataccacagcctcaagctagaatgtgagaagctggccagcgagaagacggaaatgcagcgacattatgtcatgtattatgagatgtcgtacgggctcaacattgaaatgcataagcaggcggagattgtgaagcgtctgagcggtatctgcgctcagattatccccttcctgacccaggagcatcagcagcaggtgctccaggccgtagaacgcgccaagcaggtcaccgtgggggagctgaacagcctcatcgggcagcagctccagccgctgtcccaccacgcaccccctgtgcccctcaccccccgcccagccgggctggtgggcggcagtgctacggggctgcttgctctgtctggagccctggctgcccaggctcagctggcggcggctgtcaaggaggaccgtgcgggcgtggaggccgaggggtccagagtggagagagccccgagcaggagtgcatctccctcgccccctgagagtctcgtggaggaggagcgaccgagtggccctggtggtggcgggaagcagagagcagatgagaaggagccatcaggaccttatgaaagcgacgaagacaagagtgattacaatctggtggtggacgaggaccaaccctcagagccccccagcccggctaccaccccctgcggaaaggtacccatctgcattcctgcccgtcgggacctggtggacagtccagcctccttggcctctagccttggctcaccgctgcctagagccaaggagctcatcctgaatgaccttcccgccagcactcctgcctccaaatcctgtgactcctccccgccccaggacgcttccacccccgggcccagctcggccagtcacctctgccagcttgctgccaagccagcaccttccacggacagcgtcgccctgaggagccccctgactctgtccagtcccttcaccacgtccttcagcctgggctcccacagcactctcaacggagacctctccgtgcccagctcctacgtcagcctccacctgtccccccaggtcagcagctctgtggtgtacggacgctcccccgtgatggcatttgagtctcatccccatctccgagggtcatccgtctcttcctccctacccagcatccctgggggaaagccggcctactccttccacgtgtctgcggacgggcagatgcagccggttcccttcccctcggatgcactggtaggcgcgggcatcccgcggcacgcccggcagctgcacacgctggcccatggcgaggtggtctgcgcggtcaccatcagcggctccacacagcatgtgtacacgggcggcaagggctgtgtgaaggtgtgggacgtgggccagcctggggccaagacgcccgtggcccagctcgactgcctgaaccgagacaactacattcgttcctgcaagttgctgccggatggccggagtctgatcgtgggcggtgaggccagcaccttgtccatttgggacctggcggcgcccaccccccgtatcaaggccgagctgacttcctcagccccagcctgctacgccctggccgtcagccccgacgccaaggtttgcttctcctgctgcagcgatggcaacattgtggtctgggacctgcagaatcagactatggtcaggcagttccagggccacacggacggcgccagctgcattgatatttccgattacggcactcggctctggacagggggcctggacaacacggtgcgctgctgggacctgcgggagggccgccagctgcagcagcatgacttcagctcccagattttctccctgggccactgccctaaccaggactggctggcggtcggaatggagagtagcaacgtggagatcctgcacgtccgcaagccggagaaataccagctgcacctccacgagagctgcgtgctgtccctgaagtttgcctcctgcggacggtggtttgtgagcaccgggaaggacaacctgctcaacgcctggaggacgccgtacggggccagcattttccagtccaaggagtcgtcctcagtcctgagttgtgacatctccagaaataacaaatacatcgtgacaggctcgggggacaagaaggccaccgtgtatgaggtggtctactgagacatgaccccccttcctgtacccgaagtccagactcccaggggaatcagcagccaggacagacatcctagcagccgcctcccagccctgcctaggaaccgtacatcccatctgctctctggccaacggcttcacaccttcccctgctgcatgtgggggccgatgggcaggggacctcggtggaaataaaatgtatctatcacatccgc

SEQ ID NO: 136835 - protein, 399 aa, Artificial Sequence
  derived and/or modified sequence
MAERRRHKKRIQEVGEPSKEEKAVAKYLRFNCPTKSTNMMGHRVDYFIASKAVDCLLDSKWAKAKKGEEALFTTRESVVDYCNRLLKKQFFHRALKVMKMKYDKDIKKEKDKGKAESGKEEDKKSKKENIKDEKTKKEKEKKKDGEKEESKKEETPGTPKKKETKKKFKLEPHDDQVFLDGNEVYVWIYDPVHFKTFVMGLILVIAVIAATLFPLWPAEMRVGVYYLSVGAGCFVASILLLAVARCILFLIIWLITGGRHHFWFLPNLTADVGFIDSFRPLYTHEYKGPKADLKKDEKSETKKQQKSDSEEKSDSEKKEDEEGKVGPGNHGTEGSGGERHSDTDSDRREDDRSQHSSGNGNDFEMITKEELEQQTDGDCEEDEEEENDGETPKSSHEKS

SEQ ID NO: 136836 - protein, 786 aa, Artificial Sequence
  derived and/or modified sequence
MTSIFHFAIIFMLILQIRIQLSEESEFLVDRSKNGLIHVPKDLSQKTTILNISQNYISELWTSDILSLSKLRILIISHNRIQYLDISVFKFNQELEYLDLSHNKLVKISCHPTVNLKHLDLSFNAFDALPICKEFGNMSQLKFLGLSTTHLEKSSVLPIAHLNISKVLLVLGETYGEKEDPEGLQDFNTESLHIVFPTNKEFHFILDVSVKTVANLELSNIKCVLEDNKCSYFLSILAKLQTNPKLSNLTLNNIETTWNSFIRILQLVWHTTVWYFSISNVKLQGQLDFRDFDYSGTSLKALSIHQVVSDVFGFPQSYIYEIFSNMNIKNFTVSGTRMVHMLCPSKISPFLHLDFSNNLLTDTVFENCGHLTELETLILQMNQLKELSKIAEMTTQMKSLQQLDISQNSVSYDEKKGDCSWTKSLLSLNMSSNILTDTIFRCLPPRIKVLDLHSNKIKSIPKQVVKLEALQELNVAFNSLTDLPGCGSFSSLSVLIIDHNSVSHPSADFFQSCQKMRSIKAGDNPFQCTCELGEFVKNIDQVSSEVLEGWPDSYKCDYPESYRGTLLKDFHMSELSCNITLLIVTIVATMLVLAVTVTSLCSYLDLPWYLRMVCQWTQTRRRARNIPLEELQRNLQFHAFISYSGHDSFWVKNELLPNLEKEGMQICLHERNFVPGKSIVENIITCIEKSYKSIFVLSPNFVQSEWCHYELYFAHHNLFHEGSNSLILILLEPIPQYSIPSSYHKLKSLMARRTYLEWPKEKSKRGLFWANLRAAINIKLTEQAKK

SEQ ID NO: 136837 - protein, 161 aa, Artificial Sequence
  derived and/or modified sequence
MTSIFHFAIIFMLILQIRIQLSEESEFLVDRSKNGLIHVPKDLSQKTTILNISQNYISELWTSDILSLSKLRILIISHNRIQYLDISVFKFNQELEYLDLSHNKLVKISCHPTVNLKHLDLSFNAFDALPICKEFGNMSQLKFLGLSTTHLEKSSVLPIAH

SEQ ID NO: 136838 - protein, 48 aa, Artificial Sequence
  derived and/or modified sequence
MTSIFHFAIIFMLILQIRIQLSEESEFLVDRSKNGLIHVPKDLSQKTT

SEQ ID NO: 136839 - protein, 23 aa, Artificial Sequence
  derived and/or modified sequence
MTSIFHFAIIFMLILQIRIQLSE

SEQ ID NO: 136840 - protein, 90 aa, Artificial Sequence
  derived and/or modified sequence
MTSIFHFAIIFMLILQIRIQLSEESEFLVDRSKNGLIHVPKDLSQKTTILNISQNYISELWTSDILSLSKLRILIISHNRIQYLDISVFK

SEQ ID NO: 136841 - DNA, 2361 bp, Artificial Sequence
  derived and/or modified sequence
atgaccagcatcttccacttcgccatcatcttcatgctgatcctgcagatcagaatccagctgagcgaggagagcgagttcctggtggacagaagcaagaacggcctgatccacgtgcccaaggacctgagccagaagaccaccatcctgaacatcagccagaactacatcagcgagctgtggaccagcgacatcctgagcctgagcaagctgagaatcctgatcatcagccacaacagaatccagtacctggacatcagcgtgttcaagttcaaccaggagctggagtacctggacctgagccacaacaagctggtgaagatcagctgccaccccaccgtgaacctgaagcacctggacctgagcttcaacgccttcgacgccctgcccatctgcaaggagttcggcaacatgagccagctgaagttcctgggcctgagcaccacccacctggagaagagcagcgtgctgcccatcgcccacctgaacatcagcaaggtgctgctggtgctgggcgagacctacggcgagaaggaggaccccgagggcctgcaggacttcaacaccgagagcctgcacatcgtgttccccaccaacaaggagttccacttcatcctggacgtgagcgtgaagaccgtggccaacctggagctgagcaacatcaagtgcgtgctggaggacaacaagtgcagctacttcctgagcatcctggccaagctgcagaccaaccccaagctgagcaacctgaccctgaacaacatcgagaccacctggaacagcttcatcagaatcctgcagctggtgtggcacaccaccgtgtggtacttcagcatcagcaacgtgaagctgcagggccagctggacttcagagacttcgactacagcggcaccagcctgaaggccctgagcatccaccaggtggtgagcgacgtgttcggcttcccccagagctacatctacgagatcttcagcaacatgaacatcaagaacttcaccgtgagcggcaccagaatggtgcacatgctgtgccccagcaagatcagccccttcctgcacctggacttcagcaacaacctgctgaccgacaccgtgttcgagaactgcggccacctgaccgagctggagaccctgatcctgcagatgaaccagctgaaggagctgagcaagatcgccgagatgaccacccagatgaagagcctgcagcagctggacatcagccagaacagcgtgagctacgacgagaagaagggcgactgcagctggaccaagagcctgctgagcctgaacatgagcagcaacatcctgaccgacaccatcttcagatgcctgccccccagaatcaaggtgctggacctgcacagcaacaagatcaagagcatccccaagcaggtggtgaagctggaggccctgcaggagctgaacgtggccttcaacagcctgaccgacctgcccggctgcggcagcttcagcagcctgagcgtgctgatcatcgaccacaacagcgtgagccaccccagcgccgacttcttccagagctgccagaagatgagaagcatcaaggccggcgacaaccccttccagtgcacctgcgagctgggcgagttcgtgaagaacatcgaccaggtgagcagcgaggtgctggagggctggcccgacagctacaagtgcgactaccccgagagctacagaggcaccctgctgaaggacttccacatgagcgagctgagctgcaacatcaccctgctgatcgtgaccatcgtggccaccatgctggtgctggccgtgaccgtgaccagcctgtgcagctacctggacctgccctggtacctgagaatggtgtgccagtggacccagaccagaagaagagccagaaacatccccctggaggagctgcagagaaacctgcagttccacgccttcatcagctacagcggccacgacagcttctgggtgaagaacgagctgctgcccaacctggagaaggagggcatgcagatctgcctgcacgagagaaacttcgtgcccggcaagagcatcgtggagaacatcatcacctgcatcgagaagagctacaagagcatcttcgtgctgagccccaacttcgtgcagagcgagtggtgccactacgagctgtacttcgcccaccacaacctgttccacgagggcagcaacagcctgatcctgatcctgctggagcccatcccccagtacagcatccccagcagctaccacaagctgaagagcctgatggccagaagaacctacctggagtggcccaaggagaagagcaagagaggcctgttctgggccaacctgagagccgccatcaacatcaagctgaccgagcaggccaagaagtag

SEQ ID NO: 136842 - DNA, 486 bp, Artificial Sequence
  derived and/or modified sequence
atgaccagcatcttccacttcgccatcatcttcatgctgatcctgcagatcagaatccagctgagcgaggagagcgagttcctggtggacagaagcaagaacggcctgatccacgtgcccaaggacctgagccagaagaccaccatcctgaacatcagccagaactacatcagcgagctgtggaccagcgacatcctgagcctgagcaagctgagaatcctgatcatcagccacaacagaatccagtacctggacatcagcgtgttcaagttcaaccaggagctggagtacctggacctgagccacaacaagctggtgaagatcagctgccaccccaccgtgaacctgaagcacctggacctgagcttcaacgccttcgacgccctgcccatctgcaaggagttcggcaacatgagccagctgaagttcctgggcctgagcaccacccacctggagaagagcagcgtgctgcccatcgcccactag

SEQ ID NO: 136843 - DNA, 147 bp, Artificial Sequence
  derived and/or modified sequence
atgaccagcatcttccacttcgccatcatcttcatgctgatcctgcagatcagaatccagctgagcgaggagagcgagttcctggtggacagaagcaagaacggcctgatccacgtgcccaaggacctgagccagaagaccacctag

SEQ ID NO: 136844 - DNA, 72 bp, Artificial Sequence
  derived and/or modified sequence
atgaccagcatcttccacttcgccatcatcttcatgctgatcctgcagatcagaatccagctgagcgagtag

SEQ ID NO: 136845 - DNA, 273 bp, Artificial Sequence
  derived and/or modified sequence
atgaccagcatcttccacttcgccatcatcttcatgctgatcctgcagatcagaatccagctgagcgaggagagcgagttcctggtggacagaagcaagaacggcctgatccacgtgcccaaggacctgagccagaagaccaccatcctgaacatcagccagaactacatcagcgagctgtggaccagcgacatcctgagcctgagcaagctgagaatcctgatcatcagccacaacagaatccagtacctggacatcagcgtgttcaagtag

SEQ ID NO: 136846 - DNA, 2361 bp, Artificial Sequence
  derived and/or modified sequence
atgacaagcatattccacttcgccataatttttatgcttatcttacagataagaattcagctctcagaggaatccgaatttctggttgacagaagcaagaatgggctcatccacgtccctaaagacttgtcccagaaaactacaattctaaatatatcccaaaactatatcagcgaactgtggacctcagacatcctttcactaagtaagttaaggatcttgatcatctcgcataaccgcatccaatatcttgatataagcgtgtttaagtttaaccaagaactggagtacctggatctatcacataacaaactggttaagataagttgtcaccccacagtgaacttaaaacatctggacctgagcttcaatgccttcgacgccctgccaatctgcaaagaattcggtaatatgagtcagctgaagttcctgggcctgagtactacccacttagagaaatcatccgtcctccctattgcacacttaaacattagcaaagtgcttctggttctcggggaaacctacggagaaaaagaagatccggagggcttacaagactttaacactgaaagcctccatattgtctttccaacgaataaagaattccactttatcctggatgtgtcagtcaagaccgtcgccaatctggagctgagcaacatcaaatgtgtgctcgaggacaacaaatgtagctacttcctctcaattctggccaaactccagaccaatccaaaactctccaatctgacccttaacaatatagagacaacatggaactcattcatacgcatcctgcaactagtttggcacaccacagtgtggtacttctcgatcagtaatgtaaagctacaaggtcaattagacttcagggactttgactactctggaacttctctaaaagccctctctatccatcaggtggtgtccgacgtgttcgggtttccgcagagctacatctacgagatcttctcgaatatgaacatcaaaaatttcaccgtgtcagggacgcggatggtgcacatgctgtgcccaagtaaaatcagcccattcctacatttagacttttccaataatctcctgacagacacagtgtttgagaactgtgggcatctcaccgagctggagacccttatcctacagatgaaccagctcaaggagttgtccaagatcgccgagatgacgacacagatgaagtccctgcagcagctggatataagccagaactcagtctcctatgatgagaagaagggcgattgtagttggactaaatcgctcctgtcccttaacatgagctctaatattctcaccgacaccatcttccgttgtcttccccccaggattaaggtattagacctccactccaacaagattaaaagcatccccaaacaagtcgttaagctggaggccttacaagagctcaatgtggccttcaacagccttacagatctccccggctgcggttccttctcaagcctctcagtcttgatcatcgatcacaattcagtctcacacccaagcgctgacttttttcagagctgccagaagatgcgatcaattaaggccggagacaatccgttccagtgcacatgtgaattgggcgaattcgtcaagaacatcgatcaggtgtccagcgaagtgcttgagggctggccggactcctacaagtgtgattacccagagtcataccgtggaacactgcttaaggatttccatatgagcgaactgtcttgtaatatcaccctgctgattgtcacaattgtggccaccatgctcgtgctggccgtgaccgtcactagtttgtgctcatacctggatctcccatggtatttacgcatggtgtgccagtggacgcagacccgacgaagggcgaggaacatcccactggaggagctgcaacgaaacctgcagtttcacgcgttcattagctacagtggccacgatagtttctgggttaagaatgagctgctgccaaacctagagaaagaagggatgcagatttgcctgcacgaacgcaacttcgttcccggcaaaagtatcgtagaaaacatcattacctgcatcgagaagtcttacaaatccatcttcgtgctgagcccaaacttcgtgcagagcgaatggtgtcattacgaactctactttgctcaccacaacctatttcatgaaggcagcaactctttgatcctgatcctgctggaaccaatcccccagtattcgatcccctccagctatcacaaactgaagtctctcatggcaaggagaacatatctcgagtggccaaaagagaaatctaaacggggattgttctgggctaatcttagagccgctattaatataaagctgacagaacaggcaaaaaaatag

SEQ ID NO: 136847 - DNA, 2361 bp, Artificial Sequence
  derived and/or modified sequence
atgacatctatattccattttgctattatattcatgctgatactgcagattaggatccagctgtcagaggagtccgagtttctggtcgacagatcgaagaatgggctaattcacgtcccaaaggatctcagccaaaagactacgattctgaacatttcacagaactatattagtgaattatggactagcgatatccttagcctgtccaagctgcgaatactgatcattagccacaaccgaatccagtacctcgacattagcgtcttcaagttcaaccaggaacttgagtacctggatctctcgcataacaaactagtgaaaatcagctgtcacccaacagttaacctgaaacacctcgatctgtcattcaacgctttcgacgcactgccaatctgcaaagaattcggcaatatgtcacagctcaagtttctcggtctgagcactacacacctggaaaaatccagtgtcttacctatagctcacctcaatatatcgaaggtcctgttggtgttgggcgagacttacggcgagaaggaggacccagagggattgcaggatttcaataccgaatctctgcacatcgtattcccaactaataaagaatttcatttcatcctggatgtgtctgtgaagacagttgccaatctcgagctctcaaatatcaagtgcgtgctcgaggataataaatgtagttactttttaagtattctggctaaactgcagacaaatcccaagctttccaatctcacgctcaacaatatcgagaccacctggaattctttcatccgcatacttcagctcgtgtggcataccacggtctggtacttctcgatatctaacgtgaagctccagggacagttggatttccgcgattttgactatagcggcacctccctgaaagctttgtctatccaccaggtggtctccgatgtgttcggctttccgcagtcatatatatatgaaatattctcaaacatgaacataaagaactttactgtcagcggcacccggatggtacatatgctatgtccatctaagatttcaccatttctgcatcttgacttcagcaataaccttcttaccgacactgtgtttgaaaattgtggacacctgactgagctcgagaccctgatcctccaaatgaaccagctgaaagaattgtccaaaatcgctgagatgacaacccagatgaagtctctgcagcagctggatatatctcaaaactcagtgtcgtacgatgagaaaaagggcgattgctcgtggacgaagtcactgttgagcctcaatatgagctctaatattttgacggataccatttttaggtgtctgccaccccgcattaaggtgcttgacctgcattcaaataagataaagtccattcctaaacaagtggtcaagctggaagcactgcaggagctcaatgtagccttcaactccttgacagacctgcccggatgcggatcattctcttccctcagtgtcctgatcatcgaccacaactcagtgtctcatcctagtgccgacttttttcagagctgccaaaagatgcggtctatcaaagccggtgataacccctttcagtgcacctgcgagctgggtgaatttgtaaagaacattgaccaagtctcatccgaggtactcgagggatggcctgatagttacaaatgcgactatcctgagtcctatagaggtacacttctgaaggacttccatatgagcgagctctcctgtaacatcacattgcttatcgtaaccatcgtggcaaccatgttagtgctggccgtgacagtgacaagcctttgctcttatctggaccttccatggtacctgaggatggtctgtcagtggacacagactaggcggagagcccgaaacattcctctggaagaactgcagagaaaccttcagtttcacgcattcatatcttatagtggacacgattcattctgggttaaaaacgaacttcttcccaatttggagaaggagggaatgcagatctgtctccatgaacgtaatttcgttcccggtaagtccattgtggaaaacataataacctgcattgagaagtcttacaaatccatattcgtcctttctccaaactttgtgcagtcagagtggtgccactatgagctgtattttgcccatcacaacctgtttcacgaaggtagtaactcccttatactgatccttttggaacctataccccagtactctattccgtccagctaccacaagcttaagagccttatggcccgtcgcacttacctggagtggcccaaggagaagagcaagcgtggtttgttctgggcaaacctgcgtgccgcgatcaatataaagctgacagaacaagccaaaaaatag

SEQ ID NO: 136848 - DNA, 486 bp, Artificial Sequence
  derived and/or modified sequence
atgactagcattttccactttgccatcattttcatgctcattcttcagatccgcatacagctttcagaagaatccgagtttcttgtagacaggagtaagaacggcctcattcatgtcccaaaagacttgtcccagaaaacaacaattctcaacatctcccagaattacatttccgagctctggactagcgacattctgtctctttctaagctgcgtattctgatcatatctcacaataggatccagtaccttgatatctctgtgtttaagttcaaccaggagctggaatatttggacctgagccataataaattggtgaagattagttgccacccaacagtgaacctgaaacacctcgatctgagtttcaacgcattcgacgccctgccaatctgcaaggagtttggtaatatgagccaactaaagttcttaggtctaagcactacacacctggaaaaatcatcagtactcccgatcgcacactag

SEQ ID NO: 136849 - DNA, 147 bp, Artificial Sequence
  derived and/or modified sequence
atgacttctatttttcacttcgccatcattttcatgctgatccttcagatcaggattcagctctcggaggagtctgagttcctggttgacaggtctaaaaacggactgattcatgtaccaaaggatcttagtcagaaaactacgtag

SEQ ID NO: 136850 - DNA, 72 bp, Artificial Sequence
  derived and/or modified sequence
atgactagtatttttcacttcgctataatctttatgctcatcctgcagataaggatccagctgtcagagtag

SEQ ID NO: 136851 - DNA, 273 bp, Artificial Sequence
  derived and/or modified sequence
atgacgagcatttttcactttgcaatcatctttatgttgattctgcagattcgtatacagttatcagaggagagtgagtttctggttgataggtctaagaacggactgatccacgtaccaaaggatctgtcacagaaaacaacaatccttaatatcagccagaactacatcagcgagctgtggacgagcgacatcttgtcactttctaaactgcgaatcctgataataagtcacaacagaatccagtacttggatatatccgtgttcaaatag

SEQ ID NO: 136852 - DNA, 2361 bp, Artificial Sequence
  derived and/or modified sequence
atgaccagcatcttccactttgccatcatcttcatgctgatcctgcagatccgcatccagctgtctgaggagagcgagttcctggtggacaggagcaagaatggcctcatccacgtgcccaaggacctgagccagaagaccaccatcctgaacatcagccagaactacatcagcgagctgtggaccagtgacatcctgagcctgagcaagctgcgcatcctgatcatcagccacaaccgcatccagtacctggacatctctgtgttcaagttcaaccaggagctggagtacctggacctgagccacaacaagctggtgaagatcagctgccaccccaccgtgaacctgaagcacctggacctgtccttcaatgcctttgatgccctgcccatctgcaaggagtttggaaacatgagccagctgaagttcctgggcctgagcaccacccacctggagaagagctctgtgctgcccatcgcccacctgaacatcagcaaggtgctgctggtgctgggggagacctatggagagaaggaggaccctgagggcctgcaggacttcaacacagagagcctgcacatcgtgttccccaccaacaaggagttccacttcatcctggatgtgtctgtgaagacagtggccaacctggagctgagcaacatcaagtgtgtgctggaggacaacaagtgcagctacttcctgagcatcctggccaagctgcagaccaaccccaagctgagcaacctgaccctgaacaacatcgagaccacctggaacagcttcatccgcatcctgcagctggtgtggcacaccaccgtgtggtacttcagcatcagcaatgtgaagctgcagggccagctggacttccgggactttgactacagcggcaccagcctgaaggccctgagcatccaccaggtggtgtctgatgtgtttggcttcccccagagctacatctatgagatcttcagcaacatgaacatcaagaacttcaccgtgtctggcaccaggatggtgcacatgctgtgccccagcaagatcagccccttcctgcacctggacttcagcaacaacctgctgacagacacagtgtttgagaactgtggccacctgacagagctggagaccctcatcctgcagatgaaccagctgaaggagctgagcaagattgctgagatgaccacccagatgaagagcctgcagcagctggacatcagccagaacagcgtgtcctatgatgagaagaagggggactgctcctggaccaagagcctgctgagcctgaacatgagcagcaacatcctgacagacaccatcttccgctgcctgcccccacgcatcaaggtgctggacctgcacagcaacaagatcaagagcatccccaagcaggtggtgaagctggaggccctgcaggagctgaatgtggccttcaacagcctgacagacctgcccggctgcggcagcttcagcagcctgtctgtgctgatcatcgaccacaacagcgtgagccaccccagcgctgacttcttccagagctgccagaagatgaggagcatcaaggccggggacaaccccttccagtgcacctgtgagctgggggagtttgtgaagaacatcgaccaggtgagcagcgaggtgctggagggctggccagacagctacaagtgtgactacccagagagctaccggggcaccctgctgaaggacttccacatgtctgagctgagctgcaacatcaccctgctgattgtgaccatcgtggccaccatgctggtgctggccgtgacagtgaccagcctgtgcagctacctggacctgccctggtacctgaggatggtgtgccagtggacccagaccaggagaagagccaggaacatccccctggaggagctgcagaggaacctgcagttccacgccttcatctcctacagcggccatgacagcttctgggtgaagaatgagctgctgcccaacctggagaaggagggcatgcagatctgcctgcatgaaagaaactttgtgcctgggaagagcatcgtggagaacatcatcacctgcatcgagaagagctacaagagcatctttgtgctgagccccaactttgtgcagagcgagtggtgccactatgagctgtactttgcccaccacaacctcttccacgagggcagcaacagcctcatcctgatcctgctggagcccatcccccagtacagcatccccagcagctaccacaagctgaagagcctgatggcccggaggacctacctggagtggcccaaggagaagagcaagaggggcctcttctgggccaacctgcgggccgccatcaacatcaagctgacagagcaggccaagaagtag

SEQ ID NO: 136853 - DNA, 486 bp, Artificial Sequence
  derived and/or modified sequence
atgaccagcatcttccactttgccatcatcttcatgctgatcctgcagatccgcatccagctgtctgaggagagcgagttcctggtggacaggagcaagaatggcctcatccacgtgcccaaggacctgagccagaagaccaccatcctgaacatcagccagaactacatcagcgagctgtggaccagtgacatcctgagcctgagcaagctgcgcatcctgatcatcagccacaaccgcatccagtacctggacatctctgtgttcaagttcaaccaggagctggagtacctggacctgagccacaacaagctggtgaagatcagctgccaccccaccgtgaacctgaagcacctggacctgtccttcaatgcctttgatgccctgcccatctgcaaggagtttggaaacatgagccagctgaagttcctgggcctgagcaccacccacctggagaagagctctgtgctgcccatcgcccactag

SEQ ID NO: 136854 - DNA, 147 bp, Artificial Sequence
  derived and/or modified sequence
atgaccagcatcttccactttgccatcatcttcatgctgatcctgcagatccgcatccagctgtctgaggagagcgagttcctggtggacaggagcaagaatggcctcatccacgtgcccaaggacctgagccagaagaccacctag

SEQ ID NO: 136855 - DNA, 72 bp, Artificial Sequence
  derived and/or modified sequence
atgaccagcatcttccactttgccatcatcttcatgctgatcctgcagatccgcatccagctgtctgagtag

SEQ ID NO: 136856 - DNA, 273 bp, Artificial Sequence
  derived and/or modified sequence
atgaccagcatcttccactttgccatcatcttcatgctgatcctgcagatccgcatccagctgtctgaggagagcgagttcctggtggacaggagcaagaatggcctcatccacgtgcccaaggacctgagccagaagaccaccatcctgaacatcagccagaactacatcagcgagctgtggaccagtgacatcctgagcctgagcaagctgcgcatcctgatcatcagccacaaccgcatccagtacctggacatctctgtgttcaagtag

SEQ ID NO: 136857 - DNA, 2361 bp, Artificial Sequence
  derived and/or modified sequence
atgaccagcatcttccacttcgccatcatcttcatgctgatcctgcaaataagaatccagctaagtgaagaaagcgagttcctggtcgaccggtctaagaacggcctgatccacgtccctaaagatctgagccagaaaacaactattctcaatatttcacaaaactatatttctgagctgtggacgtcagatattctctcactgtcaaagctgaggatcctgatcattagtcacaacagaattcagtacctggacattagcgtgttcaagttcaaccaagagctagagtatctggatctcagtcataataaactggtgaaaatttcgtgtcaccctactgtaaacctgaaacacctggatctgtcgtttaatgcctttgacgcactgccaatctgcaaagagttcgggaatatgtctcaactcaagttcctcggcctttccacaacccatctcgagaaatctagtgtgttgccaattgcccaccttaatatctcaaaggtcctcctggtcctcggcgagacctatggtgagaaggaagaccccgagggtttacaggacttcaacaccgagagcctacacatcgtgttcccgacaaataaagagtttcattttatcctcgatgtgtccgtgaagaccgtggccaatctcgagctctctaacatcaagtgcgtcctggaagataacaaatgctcatacttcctgtccattctcgcgaagctgcagacgaacccgaaattgtctaaccttacgctgaataacattgaaacaacttggaacagcttcatcaggattctgcaattagtgtggcacaccactgtgtggtacttctctatctccaacgtgaagctgcagggacagcttgatttcagggattttgattattctggcacctccctcaaagccctttcgatccaccaggtggtgtcagacgtatttggtttccctcagtcatacatttacgagatttttagcaatatgaacatcaagaactttaccgtctccggaacccgcatggttcacatgctttgtccttcaaagatctcccctttcctgcacttagattttagcaacaacctgttaactgataccgtattcgaaaattgtgggcacctgacagagcttgaaaccctgatcctgcagatgaatcagttaaaagagctttcaaagattgctgaaatgaccacccaaatgaagagtcttcaacagctggatatcagtcaaaactcagtgtcttatgatgaaaaaaagggggactgttcctggaccaagtccttattatcactcaatatgtcaagtaacatcctgaccgataccatctttcgctgcctacccccaaggattaaggttcttgacctgcatagcaataagattaaatccattcccaagcaggttgtcaagctagaagccctacaggagctgaatgttgcttttaatagcctgactgaccttcccggttgtggcagtttctcttccctgtcagttctcataatcgatcacaattcagtgtcccatccctcggcggatttcttccagtcgtgccagaagatgcgtagtatcaaagctggcgacaacccatttcagtgtacctgcgaactgggtgaattcgtgaagaatatcgaccaggtatcatccgaggtgctcgaaggctggcccgatagctacaagtgcgactaccctgaatcctaccgcggaacactgcttaaggacttccatatgtctgagcttagctgtaacattacactcctcatcgtgacaatcgtggctaccatgctggtgcttgccgttactgtgactagcctttgtagttatctggacctcccgtggtacctgaggatggtgtgtcagtggacccagactcgccggcgagcccggaatattccactggaagagctccagcggaatctgcagtttcacgcattcatctcatacagcggtcatgacagcttttgggtgaaaaacgaactgctgccaaacttggagaaggaaggaatgcagatctgtctgcacgagagaaatttcgtgcctggcaagtccatagtagagaacatcatcacttgtatagagaagagctacaaaagcattttcgttttaagcccgaactttgtacagagcgaatggtgccactatgagctgtattttgctcaccacaacctctttcacgaagggagcaattcgctgattctcattctgcttgaacccatcccacagtactcaattccgtcctcttaccacaaactcaagtcacttatggccagacgcacatacctcgaatggccgaaggagaagtccaagcggggcttgttctgggcgaatctgagagctgcaatcaacatcaaactcaccgaacaggcgaagaagtag

SEQ ID NO: 136858 - DNA, 2361 bp, Artificial Sequence
  derived and/or modified sequence
atgaccagcatcttccacttcgccatcatcttcatgctgatcctgcaaatccgcattcagctgtccgaagagtcagagttccttgttgataggtctaagaatggactgatccacgtgcctaaagacctctctcaaaagacaactatcctgaacatcagtcagaattacataagcgaactctggacttctgatattctcagcctgtccaaactgagaatcttgattataagtcataaccgcatccagtacctggatatcagcgtgttcaaattcaaccaggagctggaatatttggacctgagtcacaataaacttgtcaaaatctcctgtcaccctacagtgaatctcaagcacctcgacctgagttttaacgcctttgacgcattgcccatctgcaaggaattcggaaacatgtcacaactgaaatttctgggactttctactacccaccttgaaaagtcttcggtgcttcctattgcacacctgaacatatcgaaggtcttgctggtactgggggagacctacggcgagaaggaagatccagaaggtttacaggactttaacaccgagtcactgcatattgtctttcctacgaacaaagaatttcattttattctggacgtctctgtcaagacagtagcaaatctggagctcagcaacatcaagtgcgtgctagaagacaacaagtgctcatattttctgtccattcttgccaaactgcagactaatccgaagctgtcaaatctgacactgaataatatcgagacaacatggaacagcttcatacggattctgcagcttgtatggcatactaccgtttggtacttctccatatctaacgtaaagctccagggacagctggactttcgggacttcgattactccgggacctccctgaaggccttgtctatccatcaggtggtcagcgatgtgttcggcttcccccagagctacatttatgaaatcttttcaaatatgaatattaagaactttactgtaagtggtaccagaatggtgcatatgctgtgtccgtccaagatttctcctttcttgcatttggattttagtaataacctgctcactgataccgtgttcgaaaattgtggtcatttgacagagctggagaccctcattttgcaaatgaatcagctgaaggagctttctaaaattgcagagatgaccactcagatgaagtcccttcagcagctggacattagtcagaatagcgttagctatgatgaaaaaaaaggagactgtagctggaccaagtccctcctgtcactgaatatgtcttccaatatcctcacagacaccatcttccggtgcttaccacctaggattaaggtactggacctgcattctaacaagatcaaaagcataccaaagcaggtggtaaaattggaggcgctacaggagctgaatgtcgcctttaactccctaactgatctaccgggctgcggatccttcagcagtctcagtgtccttataatagaccacaattccgtgtcccatccttccgccgactttttccagtcttgccaaaagatgcggtccattaaggcaggtgataaccccttccagtgcacctgtgagctgggagaattcgtgaagaacattgaccaagtctcctctgaggtgctggagggttggcctgactcttacaaatgcgactatccagagtcctatcggggaacacttctcaaggatttccacatgagcgaattaagctgcaacatcacgctgctgatcgtcactattgtagcaaccatgctggtgcttgctgtgacggttaccagcctctgctcataccttgacctgccctggtatctgagaatggtgtgccagtggacacagacaaggcgtcgggctcgaaatatccccctggaggagttacagcgtaatttgcaattccacgcatttatctcctatagcggtcacgactccttttgggttaagaacgagctcttgcccaatctggagaaggaaggcatgcagatctgtctgcacgagagaaattttgttcccggcaagtccattgtcgagaatattatcacctgcatcgagaaatcatataaatctatcttcgtactctcccccaactttgtgcaatccgagtggtgtcactacgagctgtacttcgcccatcataatcttttccatgaaggaagcaacagcctgattcttatcctactggaaccaattccacagtactcaatcccctcgtcctaccacaagttaaagagcctgatggcccgtcggacctacttagaatggccgaaagagaaatccaaacgaggactattctgggcaaacctgagagccgctatcaacatcaagctcacagagcaggccaaaaagtag

SEQ ID NO: 136859 - DNA, 486 bp, Artificial Sequence
  derived and/or modified sequence
atgaccagcatcttccacttcgccatcatcttcatgctgatcctgcagatcagaattcaactctctgaagaaagtgagtttctcgtagaccggtctaagaatgggctgatccacgtaccaaaagacctgtctcagaaaaccactatcctcaacatcagccagaactatataagcgagctatggacatccgatattctgtccttgtccaaattgcggattctcatcatcagtcacaaccgaatccagtatctagatataagcgtgttcaaatttaaccaggagttagagtatttggacctctctcataataaactggtcaagattagttgtcaccctaccgttaatcttaaacacctcgacttgtcattcaacgccttcgacgccctccctatatgcaaggagtttggcaacatgagccagctgaaattccttggactttccaccacacatctcgaaaagagcagcgtgctgcccatcgcccactag

SEQ ID NO: 136860 - DNA, 147 bp, Artificial Sequence
  derived and/or modified sequence
atgaccagcatcttccacttcgccatcatcttcatgctgatcctgcagattagaattcaattgtccgaagagagcgagtttttagtggacagatctaagaatggactgattcacgtacctaaagatcttagccagaaaaccacttag

SEQ ID NO: 136861 - DNA, 72 bp, Artificial Sequence
  derived and/or modified sequence
atgaccagcatcttccacttcgccatcatcttcatgctgatcctgcaaatcagaatccaactgagtgaatag

SEQ ID NO: 136862 - DNA, 273 bp, Artificial Sequence
  derived and/or modified sequence
atgaccagcatcttccacttcgccatcatcttcatgctgatcctgcaaatcagaatccagctttccgaagagtccgagtttctggtggaccggagcaagaatggcctgatacatgtcccaaaagacctcagccaaaagaccacaatcctgaacataagccagaattacattagcgagttgtggacgtccgacatactgtcgctctctaagttacgaattctgattatctctcataatcgaatacagtacctggacatttccgtgttcaaatag

SEQ ID NO: 136863 - DNA, 2361 bp, Artificial Sequence
  derived and/or modified sequence
atgaccagcatcttccatttcgctattatattcatgctgattctgcagatcagaatccagctgtccgaggaaagcgagtttctcgtagacagatctaagaatgggctgattcatgttccaaaggacttgtcacaaaaaactaccattctgaacatttctcagaactacatcagtgagctttggacctcagatatattgtctctcagcaagttgcgcattctgattatctctcacaatcgtatccagtatttagatatctctgtgttcaagttcaaccaggagctggaatacctggatctttcccataataaactggtaaaaatctcgtgccatcccaccgtgaacttgaaacatctcgatctgtccttcaacgccttcgacgcccttcctatctgcaaggagttcgggaacatgtcccaactgaagttcctgggactgagtaccacccatcttgaaaagagctcagtcttgcccatcgcacatcttaacatctcaaaggtccttcttgtcctcggcgagacgtacggcgaaaaggaagatccggaagggctgcaggacttcaacaccgagtccctgcacatcgtattcccaacaaataaggaattccattttattctggacgtgagtgtgaagaccgtagccaacctggagctttcaaacatcaaatgtgtcctcgaggacaacaagtgtagttattttctgtctattctggcaaaactacagacaaatcctaagttgagcaatctgaccctgaacaatatcgaaaccacttggaattcattcattcgcatcctacagctggtctggcacacaacagtctggtatttctctattagcaacgtgaagctgcagggccagctcgacttccgcgactttgattactcgggaacgtctttgaaagcgctgtctatccaccaggtggtatctgacgtattcggtttcccacagtcgtacatctacgaaattttctcaaatatgaatatcaagaactttacagttagtgggactcggatggtgcacatgttgtgcccttctaagatttcacccttcctacacctcgacttttctaataacttgctcaccgatactgtgttcgagaactgcggccatctcaccgagctggagactttgattctccagatgaatcagttaaaggaactcagcaaaatcgctgagatgactacccagatgaaatctctgcagcagttggatatctctcagaactcagtttcgtatgacgagaaaaagggcgattgcagttggaccaagtctcttctgtctctcaatatgtcctcaaacatcttaacagatacgatttttcgatgtttgcccccaagaataaaggtgttagacctccatagtaataaaatcaaaagcattcctaagcaagtggttaagctcgaagctctccaggagttgaatgtggcctttaatagcctcaccgacctgccaggatgcggctctttcagtagcttaagcgtgctcatcattgatcacaactcagtcagtcaccccagcgcagatttttttcagtcatgtcagaagatgcggtctatcaaagcgggtgacaatcctttccaatgtacttgtgagctcggggaattcgttaaaaacatcgaccaggttagctcagaggtgctggaagggtggccggattcgtacaagtgtgactaccccgagtcctaccgtggaacgttactaaaggactttcatatgagcgagctctcctgcaatatcacgctcctcattgtgactatcgtagccaccatgctagtgttggctgtcaccgtcacctccctgtgcagttacctcgatctcccatggtacctcagaatggtttgccagtggactcagacgaggcgtcgtgccagaaatatcccgctggaggaactccagagaaaccttcaattccacgcattcatcagttacagtgggcatgatagcttctgggtgaagaatgagcttttgccaaacctcgaaaaggaaggaatgcagatttgtttacacgaaaggaacttcgtccctggaaagtccatcgtggagaatattatcacctgcattgagaaatcatacaagtcaatatttgtgctatcacccaactttgttcagtctgaatggtgtcattatgaactgtactttgctcatcacaatcttttccacgaaggttctaacagccttatcctaatactccttgaacctatccctcagtatagcatacctagtagttaccacaagctgaagagccttatggctaggaggacctatctggagtggcctaaagagaaatcaaagaggggcctattttgggctaacctcagggcggcaattaatattaaattgactgaacaagccaagaagtag

SEQ ID NO: 136864 - DNA, 2361 bp, Artificial Sequence
  derived and/or modified sequence
atgactagtatcttccatttcgcaatcatttttatgctcatccttcaaattcggatccaactcagtgaggaatccgagtttttagtggaccgctccaaaaatggcctgatacatgtgccaaaggatctcagtcagaagaccaccatacttaatataagtcagaattacattagcgaactttggacatcagatattctgagcctgtcgaagttacggatccttattatctcacacaaccgcattcaatatctggacattagcgtctttaagttcaaccaggaactcgagtacttagatttgtcccataacaaactcgttaagatctcatgccaccccactgttaacctgaaacatttagatttaagcttcaacgcctttgacgccctccccatctgtaaggaattcgggaatatgtcccagctgaagttcttgggactgagcaccacgcatttggagaagtcatccgtgctccccatagcgcacttgaacataagcaaagtcctgctggtcctcggagaaacctatggagagaaggaggaccccgaggggttacaagacttcaatacggagtcgctgcatatagtgttccctaccaacaaggaattccactttatactcgatgttagcgtgaagactgtggcgaacctagaactctcaaacataaagtgcgtgctggaagacaataagtgctcttacttcctgtcaattctggctaagctgcagacaaaccccaagctgagcaatcttacacttaataatatcgagactacctggaacagttttatcaggatcctccagctcgtttggcacactaccgtctggtatttttcaatctccaatgtaaagttacagggccagctggactttagggacttcgattactcaggaacatctctgaaagcactgagcatccaccaggtggtgagtgatgtgttcggctttccacaatcctacatttatgagatcttctccaatatgaacattaagaacttcaccgtttcgggaactcggatggttcatatgctatgtccctcaaagatttctccatttctgcatctcgatttctctaacaaccttttgacagacaccgtgttcgagaattgtgggcatctgacagaactggagactctcatcctgcagatgaatcagctgaaggaactgtccaagatcgccgaaatgaccacgcagatgaagagcctacagcagttggacatcagccaaaacagcgtgtcctacgatgaaaaaaagggtgactgctcctggacaaaatctttgctgtcactgaacatgagctccaatattctgacagacactattttcagatgtctcccacccagaataaaggtactagatttgcacagcaataaaatcaaatctataccaaagcaggtggttaaattagaagctttgcaggaactgaatgtcgcattcaactctctgactgatctgccagggtgcggaagtttttcgtccctgtctgtcttaattatcgaccataattccgtgagtcatcccagtgcggacttttttcaatcctgtcaaaagatgagaagcataaaggcaggggacaaccctttccaatgcacctgcgagctgggcgagtttgtgaagaacatcgaccaggttagtagcgaagttttggaaggctggccagatagttacaaatgcgattaccctgaatcctatcgcggtacattactgaaagactttcacatgagtgaactgtcatgtaacattaccctgctaattgtcacaattgtagcgaccatgctcgtactggccgtgactgtgacatctctgtgtagttaccttgatctgccctggtacctgaggatggtatgccagtggacccagactcgtcggcgtgcaagaaatattccactagaggaacttcaaaggaatctgcaattccacgccttcataagttactccggccacgatagtttctgggtcaagaacgagctgctgcccaatctcgagaaggaaggcatgcaaatttgtttgcacgagcggaactttgtccccggaaaatcgattgtggagaacattatcacctgtatcgaaaaatcctataagtcaatctttgtgttgagtcctaatttcgtgcagtcagagtggtgtcactacgaattatactttgcccaccacaatctcttccatgaaggcagcaacagtcttatattgatattactcgagccaattccccagtatagcattccctcctcttaccacaagttgaagtcactcatggcacgtaggacttatctggagtggccgaaggagaaatctaaaagaggcttattctgggctaatctccgcgctgccattaacattaagctgactgagcaagccaaaaagtag

SEQ ID NO: 136865 - DNA, 486 bp, Artificial Sequence
  derived and/or modified sequence
atgacaagcatcttccattttgccataatcttcatgctcatcttgcagatccgtattcaactttctgaggaatccgagtttctggtggatagaagtaaaaatgggctcatccacgtgccaaaagacctgtcacaaaagacaactattctaaatatctcccaaaactatatttccgagctctggaccagtgatatactatctctaagtaaactgcgtatcctgatcatctcccacaatcggatacagtacctagacatcagtgtcttcaagtttaatcaggagttggaatatctggatctgtctcataacaaattagttaaaatcagttgccaccccactgtgaatctgaagcacctggatctgtcattcaatgcctttgacgcgctgccaatctgtaaggagtttggaaacatgtctcagttaaagttcctaggactgtctaccacgcatctggaaaaatctagcgtccttcccatcgcgcactag

SEQ ID NO: 136866 - DNA, 147 bp, Artificial Sequence
  derived and/or modified sequence
atgaccagtatattccacttcgctatcatcttcatgttaattttgcagatcagaatccagctttccgaagaaagcgagtttctggtggaccgcagcaaaaatgggctcatacacgttcccaaggacctaagccagaagactacctag

SEQ ID NO: 136867 - DNA, 72 bp, Artificial Sequence
  derived and/or modified sequence
atgacatcaatcttccacttcgcgatcattttcatgctcatactgcaaatcaggatccaactctccgagtag

SEQ ID NO: 136868 - DNA, 273 bp, Artificial Sequence
  derived and/or modified sequence
atgaccagtatattccatttcgccatcatatttatgctgatcctccaaatccgcatacagctctcggaagagtcagagtttttggtggacaggtcaaagaatggcctcattcatgttcccaaagacctctcccagaagacgacgatcctcaacatttctcagaattatattagcgaactgtggacatcagacattctcagtctgtcaaaactgcggatactcatcatctcccataatcggatccaatacctggatatttctgttttcaagtag

SEQ ID NO: 136869 - DNA, 2847 bp, Artificial Sequence
  derived and/or modified sequence
acagactgccaaatggaacagacaagcaggttgtcttgtgttaaagaaaatgagatataagtcagttactcccggaggcaatgctgctgttcagctcttctgtttttgtggccagggtcttcatgaacactaataggggtaccaggccctcttcctcgttagaagaaatcaggataacaaaggcatattgggcacccctacaaaaggaatctgtatctgtatcaagatgatctgaagaacagcttctacctttaggaatgtctagtgttccaaaatgactagcatcttccattttgccattatcttcatgttaatacttcagatcagaatacaattatctgaagaaagtgaatttttagttgataggtcaaaaaacggtctcatccacgttcctaaagacctatcccagaaaacaacaatcttaaatatatcgcaaaattatatatctgagctttggacttctgacatcttatcactgtcaaaactgaggattttgataatttctcataatagaatccagtatcttgatatcagtgttttcaaattcaaccaggaattggaatacttggatttgtcccacaacaagttggtgaagatttcttgccaccctactgtgaacctcaagcacttggacctgtcatttaatgcatttgatgccctgcctatatgcaaagagtttggcaatatgtctcaactaaaatttctggggttgagcaccacacacttagaaaaatctagtgtgctgccaattgctcatttgaatatcagcaaggtcttgctggtcttaggagagacttatggggaaaaagaagaccctgagggccttcaagactttaacactgagagtctgcacattgtgttccccacaaacaaagaattccattttattttggatgtgtcagtcaagactgtagcaaatctggaactatctaatatcaaatgtgtgctagaagataacaaatgttcttacttcctaagtattctggcgaaacttcaaacaaatccaaagttatcaaatcttaccttaaacaacattgaaacaacttggaattctttcattaggatcctccagctggtttggcatacaactgtatggtatttctcaatttcaaacgtgaagctacagggtcagctggacttcagagattttgattattctggcacttccttgaaggccttgtctatacaccaagttgtcagcgatgtgttcggttttccgcaaagttatatctatgaaatcttttcgaatatgaacatcaaaaatttcacagtgtctggtacacgcatggtccacatgctttgcccatccaaaattagcccgttcctgcatttggatttttccaataatctcttaacagacacggtttttgaaaattgtgggcaccttactgagttggagacacttattttacaaatgaatcaattaaaagaactttcaaaaatagctgaaatgactacacagatgaagtctctgcaacaattggatattagccagaattctgtaagctatgatgaaaagaaaggagactgttcttggactaaaagtttattaagtttaaatatgtcttcaaatatacttactgacactattttcagatgtttacctcccaggatcaaggtacttgatcttcacagcaataaaataaagagcattcctaaacaagtcgtaaaactggaagctttgcaagaactcaatgttgctttcaattctttaactgaccttcctggatgtggcagctttagcagcctttctgtattgatcattgatcacaattcagtttcccacccatcggctgatttcttccagagctgccagaagatgaggtcaataaaagcaggggacaatccattccaatgtacctgtgagctaggagaatttgtcaaaaatatagaccaagtatcaagtgaagtgttagagggctggcctgattcttataagtgtgactacccggaaagttatagaggaaccctactaaaggactttcacatgtctgaattatcctgcaacataactctgctgatcgtcaccatcgttgccaccatgctggtgttggctgtgactgtgacctccctctgcagctacttggatctgccctggtatctcaggatggtgtgccagtggacccagacccggcgcagggccaggaacatacccttagaagaactccaaagaaatctccagtttcatgcatttatttcatatagtgggcacgattctttctgggtgaagaatgaattattgccaaacctagagaaagaaggtatgcagatttgccttcatgagagaaactttgttcctggcaagagcattgtggaaaatatcatcacctgcattgagaagagttacaagtccatctttgttttgtctcccaactttgtccagagtgaatggtgccattatgaactctactttgcccatcacaatctctttcatgaaggatctaatagcttaatcctgatcttgctggaacccattccgcagtactccattcctagcagttatcacaagctcaaaagtctcatggccaggaggacttatttggaatggcccaaggaaaagagcaaacgtggccttttttgggctaacttaagggcagccattaatattaagctgacagagcaagcaaagaaatagattacacatcaagtgaaaaatattcctcctgttgatattgctgcttttggaagttccaacaatgactttattttgcatcagcatagatgtaaacacaattgtgagtgtatgatgtaggtaaaaatatataccttcgggtcgcagttcaccatttatatgtggtattaaaaattaatgaaatgatataactttgatttaaacagttctgacac

SEQ ID NO: 136870 - DNA, 2779 bp, Artificial Sequence
  derived and/or modified sequence
agaaaatgagatataagtcagttactcccggaggcaatgctgctgttcagctcttctgtttttgtggccagggtcttcatgaacactaataggggtaccaggccctcttcctcgttagaagaaatcaggataacaaaggcatattgggcacccctacaaaaggaatctgtatctgtatcaagatgatctgaagaacagcttctacctttaggaatgtctagtgttccaaaatgactagcatcttccattttgccattatcttcatgttaatacttcagatcagaatacaattatctgaagaaagtgaatttttagttgataggtcaaaaaacggtctcatccacgttcctaaagacctatcccagaaaacaacaatcttaaatatatcgcaaaattatatatctgagctttggacttctgacatcttatcactgtcaaaactgaggattttgataatttctcataatagaatccagtatcttgatatcagtgttttcaaattcaaccaggaattggaatacttggatttgtcccacaacaagttggtgaagatttcttgccaccctactgtgaacctcaagcacttggacctgtcatttaatgcatttgatgccctgcctatatgcaaagagtttggcaatatgtctcaactaaaatttctggggttgagcaccacacacttagaaaaatctagtgtgctgccaattgctcatttgaatatcagcaaggtcttgctggtcttaggagagacttatggggaaaaagaagaccctgagggccttcaagactttaacactgagagtctgcacattgtgttccccacaaacaaagaattccattttattttggatgtgtcagtcaagactgtagcaaatctggaactatctaatatcaaatgtgtgctagaagataacaaatgttcttacttcctaagtattctggcgaaacttcaaacaaatccaaagttatcaaatcttaccttaaacaacattgaaacaacttggaattctttcattaggatcctccagctggtttggcatacaactgtatggtatttctcaatttcaaacgtgaagctacagggtcagctggacttcagagattttgattattctggcacttccttgaaggccttgtctatacaccaagttgtcagcgatgtgttcggttttccgcaaagttatatctatgaaatcttttcgaatatgaacatcaaaaatttcacagtgtctggtacacgcatggtccacatgctttgcccatccaaaattagcccgttcctgcatttggatttttccaataatctcttaacagacacggtttttgaaaattgtgggcaccttactgagttggagacacttattttacaaatgaatcaattaaaagaactttcaaaaatagctgaaatgactacacagatgaagtctctgcaacaattggatattagccagaattctgtaagctatgatgaaaagaaaggagactgttcttggactaaaagtttattaagtttaaatatgtcttcaaatatacttactgacactattttcagatgtttacctcccaggatcaaggtacttgatcttcacagcaataaaataaagagcattcctaaacaagtcgtaaaactggaagctttgcaagaactcaatgttgctttcaattctttaactgaccttcctggatgtggcagctttagcagcctttctgtattgatcattgatcacaattcagtttcccacccatcggctgatttcttccagagctgccagaagatgaggtcaataaaagcaggggacaatccattccaatgtacctgtgagctaggagaatttgtcaaaaatatagaccaagtatcaagtgaagtgttagagggctggcctgattcttataagtgtgactacccggaaagttatagaggaaccctactaaaggactttcacatgtctgaattatcctgcaacataactctgctgatcgtcaccatcgttgccaccatgctggtgttggctgtgactgtgacctccctctgcagctacttggatctgccctggtatctcaggatggtgtgccagtggacccagacccggcgcagggccaggaacatacccttagaagaactccaaagaaatctccagtttcatgcatttatttcatatagtgggcacgattctttctgggtgaagaatgaattattgccaaacctagagaaagaaggtatgcagatttgccttcatgagagaaactttgttcctggcaagagcattgtggaaaatatcatcacctgcattgagaagagttacaagtccatctttgttttgtctcccaactttgtccagagtgaatggtgccattatgaactctactttgcccatcacaatctctttcatgaaggatctaatagcttaatcctgatcttgctggaacccattccgcagtactccattcctagcagttatcacaagctcaaaagtctcatggccaggaggacttatttggaatggcccaaggaaaagagcaaacgtggccttttttgggctaacttaagggcagccattaatattaagctgacagagcaagcaaagaaatagattacacatcaagtgaaaaatattcctcctgttgatattgctgcttttggaagttccaacaatgactttattttgcatcagcatagatgtaaacacaattgtgagtgtatgatgtaggtaaaaatatataccttcgggtcgcagttcaccatttatatgtggtattaaaaattaatgaaatgatataa

SEQ ID NO: 136871 - DNA, 648 bp, Artificial Sequence
  derived and/or modified sequence
gttttcaacaccaaatgtggttaacagtgaaataaattcaaggaagtgcttgaatttcttacagactgccaaatggaacagacaagcaggttgtcttgaatctgtatctgtatcaagatgatctgaagaacagcttctacctttaggaatgtctagtgttccaaaatgactagcatcttccattttgccattatcttcatgttaatacttcagatcagaatacaattatctgaagaaagtgaatttttagttgataggtcaaaaaacggtctcatccacgttcctaaagacctatcccagaaaacaacaatcttaaatatatcgcaaaattatatatctgagctttggacttctgacatcttatcactgtcaaaactgaggattttgataatttctcataatagaatccagtatcttgatatcagtgttttcaaattcaaccaggaattggaatacttggatttgtcccacaacaagttggtgaagatttcttgccaccctactgtgaacctcaagcacttggacctgtcatttaatgcatttgatgccctgcctatatgcaaagagtttggcaatatgtctcaactaaaatttctggggttgagcaccacacacttagaaaaatctagtgtgctgccaattgctcat

SEQ ID NO: 136872 - DNA, 555 bp, Artificial Sequence
  derived and/or modified sequence
aattgtatttccgttcatttacaagttattttctcttcttctgaaaaagagatcttgtggatggatgaaaaggcaagaggaaaaacaaagcagccgaaacacacccagacgcacacttctgccaagcatagccaccacgactgccaaatggaacagacaagcaggttgtcttgtgttaaagaaaatgagatataagtcagttactcccggaggcaatgctgctgttcagctcttctgtttttgtggccagggtcttcatgaacactaataggggtaccaggccctcttcctcgttagaagaaatcaggataacaaaggcatattgggcacccctacaaaaggaatctgtatctgtatcaagatgatctgaagaacagcttctacctttaggaatgtctagtgttccaaaatgactagcatcttccattttgccattatcttcatgttaatacttcagatcagaatacaattatctgaagaaagtgaatttttagttgataggtcaaaaaacggtctcatccacgttcctaaagacctatcccagaaaacaacaat

SEQ ID NO: 136873 - DNA, 605 bp, Artificial Sequence
  derived and/or modified sequence
atagctttatttgcccatttattgtgttgttattttgttgttgtcattactggaaaaggcaagagtagagctatcagaatgtcttccttgaacatgctgtcaacaaaccccaggatttttataaaccctatgtgaaaaacacgctaagaatctcttttcttcttagcatatttttcacttagggtttacaaaaatatgttttgaagaaagcttgaaaagatcagtggaaaaaaattcagcaccaaattttctctgaaaatcaacttgtcaaaaaagacgtgattaacatccatcctgtaaccagcacatgaatgatcttccctctttacgagtgtgcttcagcaaaactttaatctcgacccctccctctttccacttttaatagtggatggatgaaaaggcaagaggaaaaacaaagcagccgaaacacacccagacgcacacttctgccaagcatagccaccacgaatctgtatctgtatcaagatgatctgaagaacagcttctacctttaggaatgtctagtgttccaaaatgactagcatcttccattttgccattatcttcatgttaatacttcagatcagaatacaattatctgaaga

SEQ ID NO: 136874 - DNA, 578 bp, Artificial Sequence
  derived and/or modified sequence
aactatgtaatgtaattccagtggaattcggtaggtggcataaaacagcctttttgttttgttttgttttcaacaccaaatgtggttaacagtgaaataaattcaaggaagtgcttgaatttcttacagactgccaaatggaacagacaagcaggttgtcttgtgttaaagaaaatgagatataagtcagttactcccggaggcaatgctgctgttcagctcttctgtttttgtggccagaatctgtatctgtatcaagatgatctgaagaacagcttctacctttaggaatgtctagtgttccaaaatgactagcatcttccattttgccattatcttcatgttaatacttcagatcagaatacaattatctgaagaaagtgaatttttagttgataggtcaaaaaacggtctcatccacgttcctaaagacctatcccagaaaacaacaatcttaaatatatcgcaaaattatatatctgagctttggacttctgacatcttatcactgtcaaaactgaggattttgataatttctcataatagaatccagtatcttgatatcagtgttttcaaat

SEQ ID NO: 136875 - protein, 904 aa, Artificial Sequence
  derived and/or modified sequence
MRQTLPCIYFWGGLLPFGMLCASSTTKCTVSHEVADCSHLKLTQVPDDLPTNITVLNLTHNQLRRLPAANFTRYSQLTSLDVGFNTISKLEPELCQKLPMLKVLNLQHNELSQLSDKTFAFCTNLTELHLMSNSIQKIKNNPFVKQKNLITLDLSHNGLSSTKLGTQVQLENLQELLLSNNKIQALKSEELDIFANSSLKKLELSSNQIKEFSPGCFHAIGRLFGLFLNNVQLGPSLTEKLCLELANTSIRNLSLSNSQLSTTSNTTFLGLKWTNLTMLDLSYNNLNVVGNDSFAWLPQLEYFFLEYNNIQHLFSHSLHGLFNVRYLNLKRSFTKQSISLASLPKIDDFSFQWLKCLEHLNMEDNDIPGIKSNMFTGLINLKYLSLSNSFTSLRTLTNETFVSLAHSPLHILNLTKNKISKIESDAFSWLGHLEVLDLGLNEIGQELTGQEWRGLENIFEIYLSYNKYLQLTRNSFALVPSLQRLMLRRVALKNVDSSPSPFQPLRNLTILDLSNNNIANINDDMLEGLEKLEILDLQHNNLARLWKHANPGGPIYFLKGLSHLHILNLESNGFDEIPVEVFKDLFELKIIDLGLNNLNTLPASVFNNQVSLKSLNLQKNLITSVEKKVFGPAFRNLTELDMRFNPFDCTCESIAWFVNWINETHTNIPELSSHYLCNTPPHYHGFPVRLFDTSSCKDSAPFELFFMINTSILLIFIFIVLLIHFEGWRISFYWNVSVHRVLGFKEIDRQTEQFEYAAYIIHAYKDKDWVWEHFSSMEKEDQSLKFCLEERDFEAGVFELEAIVNSIKRSRKIIFVITHHLLKDPLCKRFKVHHAVQQAIEQNLDSIILVFLEEIPDYKLNHALCLRRGMFKSHCILNWPVQKERIGAFRHKLQVALGSKNSVH

SEQ ID NO: 136876 - protein, 627 aa, Artificial Sequence
  derived and/or modified sequence
MLDLSYNNLNVVGNDSFAWLPQLEYFFLEYNNIQHLFSHSLHGLFNVRYLNLKRSFTKQSISLASLPKIDDFSFQWLKCLEHLNMEDNDIPGIKSNMFTGLINLKYLSLSNSFTSLRTLTNETFVSLAHSPLHILNLTKNKISKIESDAFSWLGHLEVLDLGLNEIGQELTGQEWRGLENIFEIYLSYNKYLQLTRNSFALVPSLQRLMLRRVALKNVDSSPSPFQPLRNLTILDLSNNNIANINDDMLEGLEKLEILDLQHNNLARLWKHANPGGPIYFLKGLSHLHILNLESNGFDEIPVEVFKDLFELKIIDLGLNNLNTLPASVFNNQVSLKSLNLQKNLITSVEKKVFGPAFRNLTELDMRFNPFDCTCESIAWFVNWINETHTNIPELSSHYLCNTPPHYHGFPVRLFDTSSCKDSAPFELFFMINTSILLIFIFIVLLIHFEGWRISFYWNVSVHRVLGFKEIDRQTEQFEYAAYIIHAYKDKDWVWEHFSSMEKEDQSLKFCLEERDFEAGVFELEAIVNSIKRSRKIIFVITHHLLKDPLCKRFKVHHAVQQAIEQNLDSIILVFLEEIPDYKLNHALCLRRGMFKSHCILNWPVQKERIGAFRHKLQVALGSKNSVH

SEQ ID NO: 136877 - protein, 870 aa, Artificial Sequence
  derived and/or modified sequence
MRQTLPCIYFWGGLLPFGMLCASSTTKCTVSHEVADCSHLKLTQVPDDLPTNITVLNLTHNQLRRLPAANFTRYSQLTSLDVGFNTISKLEPELCQKLPMLKVLNLQHNELSQLSDKTFAFCTNLTELHLMSNSIQKIKNNPFVKQKNLITLDLSHNGLSSTKLGTQVQLENLQELLLSNNKIQALKSEELDIFANSSLKKLELSSNQIKEFSPGCFHAIGRLFGLFLNNVQLGPSLTEKLCLELANTSIRNLSLSNSQLSTTSNTTFLGLKWTNLTMLDLSYNNLNVVGNDSFAWLPQLEYFFLEYNNIQHLFSHSLHGLFNVRYLNLKRSFTKQSISLASLPKIDDFSFQWLKCLEHLNMEDNDIPGIKSNMFTGLINLKYLSLSNSFTSLRTLTNETFVSLAHSPLHILNLTKNKISKIESDAFSWLGHLEVLDLGLNEIGQELTGQEWRGLENIFEIYLSYNKYLQLTRNSFALVPSLQRLMLRRVALKNVDSSPSPFQPLRNLTILDLSNNNIANINDDMLEGLEKLEILDLQHNNLARLWKHANPGGPIYFLKGLSHLHILNLESNGFDEIPVEVFKDLFELKIIDLGLNNLNTLPASVFNNQVSLKSLNLQKNLITSVEKKVFGPAFRNLTELDMRFNPFDCTCESIAWFVNWINETHTNIPELSSHYLCNTPPHYHGFPVRLFDTSSCKDSAPFELFFMINTSILLIFIFIVLLIHFEGWRISFYWNVSVHRVLGFKEIDRQTEQFEYAAYIIHAYKDKDWVWEHFSSMEKEDQSLKFCLEERDFEAGVFELEAIVNSIKRSRKIIFVITHHLLKDPLCKRFKVHHAVQQAIEQNLDSIILVFLEEIPDYKLNHALCLRRAK

SEQ ID NO: 136878 - DNA, 2715 bp, Artificial Sequence
  derived and/or modified sequence
atgagacagaccctgccctgcatctacttctggggcggcctgctgcccttcggcatgctgtgcgccagcagcaccaccaagtgcaccgtgagccacgaggtggccgactgcagccacctgaagctgacccaggtgcccgacgacctgcccaccaacatcaccgtgctgaacctgacccacaaccagctgagaagactgcccgccgccaacttcaccagatacagccagctgaccagcctggacgtgggcttcaacaccatcagcaagctggagcccgagctgtgccagaagctgcccatgctgaaggtgctgaacctgcagcacaacgagctgagccagctgagcgacaagaccttcgccttctgcaccaacctgaccgagctgcacctgatgagcaacagcatccagaagatcaagaacaaccccttcgtgaagcagaagaacctgatcaccctggacctgagccacaacggcctgagcagcaccaagctgggcacccaggtgcagctggagaacctgcaggagctgctgctgagcaacaacaagatccaggccctgaagagcgaggagctggacatcttcgccaacagcagcctgaagaagctggagctgagcagcaaccagatcaaggagttcagccccggctgcttccacgccatcggcagactgttcggcctgttcctgaacaacgtgcagctgggccccagcctgaccgagaagctgtgcctggagctggccaacaccagcatcagaaacctgagcctgagcaacagccagctgagcaccaccagcaacaccaccttcctgggcctgaagtggaccaacctgaccatgctggacctgagctacaacaacctgaacgtggtgggcaacgacagcttcgcctggctgccccagctggagtacttcttcctggagtacaacaacatccagcacctgttcagccacagcctgcacggcctgttcaacgtgagatacctgaacctgaagagaagcttcaccaagcagagcatcagcctggccagcctgcccaagatcgacgacttcagcttccagtggctgaagtgcctggagcacctgaacatggaggacaacgacatccccggcatcaagagcaacatgttcaccggcctgatcaacctgaagtacctgagcctgagcaacagcttcaccagcctgagaaccctgaccaacgagaccttcgtgagcctggcccacagccccctgcacatcctgaacctgaccaagaacaagatcagcaagatcgagagcgacgccttcagctggctgggccacctggaggtgctggacctgggcctgaacgagatcggccaggagctgaccggccaggagtggagaggcctggagaacatcttcgagatctacctgagctacaacaagtacctgcagctgaccagaaacagcttcgccctggtgcccagcctgcagagactgatgctgagaagagtggccctgaagaacgtggacagcagccccagccccttccagcccctgagaaacctgaccatcctggacctgagcaacaacaacatcgccaacatcaacgacgacatgctggagggcctggagaagctggagatcctggacctgcagcacaacaacctggccagactgtggaagcacgccaaccccggcggccccatctacttcctgaagggcctgagccacctgcacatcctgaacctggagagcaacggcttcgacgagatccccgtggaggtgttcaaggacctgttcgagctgaagatcatcgacctgggcctgaacaacctgaacaccctgcccgccagcgtgttcaacaaccaggtgagcctgaagagcctgaacctgcagaagaacctgatcaccagcgtggagaagaaggtgttcggccccgccttcagaaacctgaccgagctggacatgagattcaaccccttcgactgcacctgcgagagcatcgcctggttcgtgaactggatcaacgagacccacaccaacatccccgagctgagcagccactacctgtgcaacacccccccccactaccacggcttccccgtgagactgttcgacaccagcagctgcaaggacagcgcccccttcgagctgttcttcatgatcaacaccagcatcctgctgatcttcatcttcatcgtgctgctgatccacttcgagggctggagaatcagcttctactggaacgtgagcgtgcacagagtgctgggcttcaaggagatcgacagacagaccgagcagttcgagtacgccgcctacatcatccacgcctacaaggacaaggactgggtgtgggagcacttcagcagcatggagaaggaggaccagagcctgaagttctgcctggaggagagagacttcgaggccggcgtgttcgagctggaggccatcgtgaacagcatcaagagaagcagaaagatcatcttcgtgatcacccaccacctgctgaaggaccccctgtgcaagagattcaaggtgcaccacgccgtgcagcaggccatcgagcagaacctggacagcatcatcctggtgttcctggaggagatccccgactacaagctgaaccacgccctgtgcctgagaagaggcatgttcaagagccactgcatcctgaactggcccgtgcagaaggagagaatcggcgccttcagacacaagctgcaggtggccctgggcagcaagaacagcgtgcactag

SEQ ID NO: 136879 - DNA, 1884 bp, Artificial Sequence
  derived and/or modified sequence
atgctggacctgagctacaacaacctgaacgtggtgggcaacgacagcttcgcctggctgccccagctggagtacttcttcctggagtacaacaacatccagcacctgttcagccacagcctgcacggcctgttcaacgtgagatacctgaacctgaagagaagcttcaccaagcagagcatcagcctggccagcctgcccaagatcgacgacttcagcttccagtggctgaagtgcctggagcacctgaacatggaggacaacgacatccccggcatcaagagcaacatgttcaccggcctgatcaacctgaagtacctgagcctgagcaacagcttcaccagcctgagaaccctgaccaacgagaccttcgtgagcctggcccacagccccctgcacatcctgaacctgaccaagaacaagatcagcaagatcgagagcgacgccttcagctggctgggccacctggaggtgctggacctgggcctgaacgagatcggccaggagctgaccggccaggagtggagaggcctggagaacatcttcgagatctacctgagctacaacaagtacctgcagctgaccagaaacagcttcgccctggtgcccagcctgcagagactgatgctgagaagagtggccctgaagaacgtggacagcagccccagccccttccagcccctgagaaacctgaccatcctggacctgagcaacaacaacatcgccaacatcaacgacgacatgctggagggcctggagaagctggagatcctggacctgcagcacaacaacctggccagactgtggaagcacgccaaccccggcggccccatctacttcctgaagggcctgagccacctgcacatcctgaacctggagagcaacggcttcgacgagatccccgtggaggtgttcaaggacctgttcgagctgaagatcatcgacctgggcctgaacaacctgaacaccctgcccgccagcgtgttcaacaaccaggtgagcctgaagagcctgaacctgcagaagaacctgatcaccagcgtggagaagaaggtgttcggccccgccttcagaaacctgaccgagctggacatgagattcaaccccttcgactgcacctgcgagagcatcgcctggttcgtgaactggatcaacgagacccacaccaacatccccgagctgagcagccactacctgtgcaacacccccccccactaccacggcttccccgtgagactgttcgacaccagcagctgcaaggacagcgcccccttcgagctgttcttcatgatcaacaccagcatcctgctgatcttcatcttcatcgtgctgctgatccacttcgagggctggagaatcagcttctactggaacgtgagcgtgcacagagtgctgggcttcaaggagatcgacagacagaccgagcagttcgagtacgccgcctacatcatccacgcctacaaggacaaggactgggtgtgggagcacttcagcagcatggagaaggaggaccagagcctgaagttctgcctggaggagagagacttcgaggccggcgtgttcgagctggaggccatcgtgaacagcatcaagagaagcagaaagatcatcttcgtgatcacccaccacctgctgaaggaccccctgtgcaagagattcaaggtgcaccacgccgtgcagcaggccatcgagcagaacctggacagcatcatcctggtgttcctggaggagatccccgactacaagctgaaccacgccctgtgcctgagaagaggcatgttcaagagccactgcatcctgaactggcccgtgcagaaggagagaatcggcgccttcagacacaagctgcaggtggccctgggcagcaagaacagcgtgcactag

SEQ ID NO: 136880 - DNA, 2613 bp, Artificial Sequence
  derived and/or modified sequence
atgagacagaccctgccctgcatctacttctggggcggcctgctgcccttcggcatgctgtgcgccagcagcaccaccaagtgcaccgtgagccacgaggtggccgactgcagccacctgaagctgacccaggtgcccgacgacctgcccaccaacatcaccgtgctgaacctgacccacaaccagctgagaagactgcccgccgccaacttcaccagatacagccagctgaccagcctggacgtgggcttcaacaccatcagcaagctggagcccgagctgtgccagaagctgcccatgctgaaggtgctgaacctgcagcacaacgagctgagccagctgagcgacaagaccttcgccttctgcaccaacctgaccgagctgcacctgatgagcaacagcatccagaagatcaagaacaaccccttcgtgaagcagaagaacctgatcaccctggacctgagccacaacggcctgagcagcaccaagctgggcacccaggtgcagctggagaacctgcaggagctgctgctgagcaacaacaagatccaggccctgaagagcgaggagctggacatcttcgccaacagcagcctgaagaagctggagctgagcagcaaccagatcaaggagttcagccccggctgcttccacgccatcggcagactgttcggcctgttcctgaacaacgtgcagctgggccccagcctgaccgagaagctgtgcctggagctggccaacaccagcatcagaaacctgagcctgagcaacagccagctgagcaccaccagcaacaccaccttcctgggcctgaagtggaccaacctgaccatgctggacctgagctacaacaacctgaacgtggtgggcaacgacagcttcgcctggctgccccagctggagtacttcttcctggagtacaacaacatccagcacctgttcagccacagcctgcacggcctgttcaacgtgagatacctgaacctgaagagaagcttcaccaagcagagcatcagcctggccagcctgcccaagatcgacgacttcagcttccagtggctgaagtgcctggagcacctgaacatggaggacaacgacatccccggcatcaagagcaacatgttcaccggcctgatcaacctgaagtacctgagcctgagcaacagcttcaccagcctgagaaccctgaccaacgagaccttcgtgagcctggcccacagccccctgcacatcctgaacctgaccaagaacaagatcagcaagatcgagagcgacgccttcagctggctgggccacctggaggtgctggacctgggcctgaacgagatcggccaggagctgaccggccaggagtggagaggcctggagaacatcttcgagatctacctgagctacaacaagtacctgcagctgaccagaaacagcttcgccctggtgcccagcctgcagagactgatgctgagaagagtggccctgaagaacgtggacagcagccccagccccttccagcccctgagaaacctgaccatcctggacctgagcaacaacaacatcgccaacatcaacgacgacatgctggagggcctggagaagctggagatcctggacctgcagcacaacaacctggccagactgtggaagcacgccaaccccggcggccccatctacttcctgaagggcctgagccacctgcacatcctgaacctggagagcaacggcttcgacgagatccccgtggaggtgttcaaggacctgttcgagctgaagatcatcgacctgggcctgaacaacctgaacaccctgcccgccagcgtgttcaacaaccaggtgagcctgaagagcctgaacctgcagaagaacctgatcaccagcgtggagaagaaggtgttcggccccgccttcagaaacctgaccgagctggacatgagattcaaccccttcgactgcacctgcgagagcatcgcctggttcgtgaactggatcaacgagacccacaccaacatccccgagctgagcagccactacctgtgcaacacccccccccactaccacggcttccccgtgagactgttcgacaccagcagctgcaaggacagcgcccccttcgagctgttcttcatgatcaacaccagcatcctgctgatcttcatcttcatcgtgctgctgatccacttcgagggctggagaatcagcttctactggaacgtgagcgtgcacagagtgctgggcttcaaggagatcgacagacagaccgagcagttcgagtacgccgcctacatcatccacgcctacaaggacaaggactgggtgtgggagcacttcagcagcatggagaaggaggaccagagcctgaagttctgcctggaggagagagacttcgaggccggcgtgttcgagctggaggccatcgtgaacagcatcaagagaagcagaaagatcatcttcgtgatcacccaccacctgctgaaggaccccctgtgcaagagattcaaggtgcaccacgccgtgcagcaggccatcgagcagaacctggacagcatcatcctggtgttcctggaggagatccccgactacaagctgaaccacgccctgtgcctgagaagagccaagtag

SEQ ID NO: 136881 - DNA, 2715 bp, Artificial Sequence
  derived and/or modified sequence
atgcgccagactcttccctgtatttacttctggggcggcctcctaccatttgggatgctttgtgccagctctacaacaaagtgtacagtgtcccacgaagtggcagactgctctcaccttaaactcacacaggtgccagacgacctgccaactaatatcactgtcctgaatctgacccataatcagctacgcagactacccgctgccaatttcacacggtatagccagctaacttcacttgatgtgggattcaacaccatttcaaaactggaacctgagctctgccagaagctgccgatgctgaaggttctgaatcttcagcacaacgagcttagccagctgtccgacaagacctttgccttttgtacaaatttaacagagctccacctgatgtctaattcaattcagaagataaaaaataatcctttcgtgaaacaaaaaaatcttatcacccttgacctctcacacaatggcctgagttccaccaagctgggcacccaagtccagctggagaacttacaggagcttctgctgagcaacaacaagatccaggcgttaaaaagcgaggaactagacatatttgctaactcgtccctaaagaagttggaactgtcctcgaaccaaattaaagagttttcccctggctgttttcacgcaatcggacgtctgttcgggctctttttgaacaatgtccagctgggtccatccttgactgaaaagttgtgcctagagcttgccaacacttcgatacggaacttatccctgagtaactcacagctcagtacgacctcaaataccacctttctggggctgaagtggactaaccttacgatgttagacctatcctacaataaccttaatgtggtcggtaacgatagctttgcctggcttcctcagctcgagtatttcttcctggagtacaacaatattcaacacctcttcagtcacagtctacatggccttttcaacgttcgctatctgaacttaaagagaagcttcactaaacagagtatctcccttgcatctcttcctaaaattgacgatttttccttccagtggcttaagtgtctcgaacacctcaatatggaagacaacgacatccctggcataaagtccaacatgttcactggcctcattaacctcaagtatctctcattgtctaactcattcacctctctgcggacactcacaaatgagacctttgtgagtcttgcccactctcccctgcacatcttaaacctcacaaaaaacaagatttccaagatcgaaagtgatgcgttttcctggctggggcatttggaagtcctggacctcggacttaacgaaatcgggcaggagcttaccgggcaggagtggcggggtctggaaaacatcttcgagatctacctctcttacaacaaataccttcaattgacacgcaattcattcgccctggtacccagcttacagaggctcatgttgaggcgcgttgctctcaaaaatgtggacagcagcccatcccctttccagcctttgcgaaacttgacgatactagatctgtcaaacaacaacatagccaatattaatgatgacatgcttgaggggctggaaaagctggaaatcctcgatctgcagcataacaatctggcccgcctttggaaacatgcaaatcctggtggaccgatctatttcctgaagggcttatctcatctccacatcctgaacctagaaagcaacggcttcgatgagataccagtggaggtattcaaagacctgtttgagctcaagatcattgaccttggtttgaacaatctcaacaccctgcctgcctccgtgtttaataatcaggtgagcttgaagtcactgaacttacagaaaaaccttatcacaagcgtggaaaaaaaggtgttcgggcccgcttttaggaacctcacagagctcgacatgcgctttaaccccttcgactgtacatgcgagtctattgcctggttcgtcaactggatcaatgagactcacaccaatattcctgagctatccagccactatctctgcaacaccccaccacactatcatggattccccgtgagattgtttgatacatccagttgcaaggatagcgctccattcgagctgttctttatgatcaatacaagcatactgcttatctttatctttatcgtcctactcattcacttcgagggatggcgcatatctttttactggaatgtcagcgttcacagggttctagggtttaaggagatcgaccggcagaccgagcagttcgagtacgctgcctacataatccacgcctacaaggataaggactgggtgtgggagcatttctcgtccatggaaaaggaagatcagtctcttaaattttgtctggaggaacgtgacttcgaagctggcgtctttgagcttgaggcaatcgttaatagtataaagcgctctcggaagatcatatttgtaataacgcaccatctccttaaggaccccctctgtaagcggtttaaggtgcaccatgccgtgcagcaggccatcgagcagaaccttgacagtatcatcctagtcttcctcgaggaaatccctgactacaagctcaatcatgccttatgtcttaggcgaggtatgttcaagagccactgcattttgaattggccggtgcagaaggagcggatcggtgctttccgacacaaactgcaggttgcactggggtctaaaaattcggtccattag

SEQ ID NO: 136882 - DNA, 1884 bp, Artificial Sequence
  derived and/or modified sequence
atgctggacctttcttacaataatttaaacgtcgttggtaacgatagttttgcttggttgccgcagctggagtacttcttcttggaatacaacaatatacagcacttgttctctcacagtctgcacgggctgtttaatgtgaggtatctaaatttgaagagatcttttaccaagcagtctatcagtctcgcatctctgccgaagatagatgattttagctttcagtggctcaagtgtctggaacacctgaatatggaggacaacgacatacccgggataaagagcaacatgtttactggcctgattaacttgaagtatctctctctatccaatagtttcacatccctgcggacattgacaaacgagacatttgtttcactcgcccactcacccctacacatactcaatctgacaaagaacaaaatttcgaagattgagagtgacgcttttagctggctaggccacctcgaggtccttgatctcgggcttaacgagatcggccaggaacttaccgggcaagaatggcggggtttggagaatattttcgaaatttacctatcttacaacaagtatctacagttgactcggaattcattcgcactggtaccctctttgcagcgcctgatgcttcgccgagtggccctcaaaaacgtggacagctccccaagccccttccagccattacgtaacctcaccatcttggatctttccaacaacaatattgccaatattaatgacgacatgctggagggcctggagaagttagagattctggatctgcagcacaacaacctggcccgcttatggaagcatgctaatcccgggggaccgatctatttcctcaaaggtctcagtcaccttcacatcttaaacctcgaaagcaacggattcgacgaaataccagtcgaagtgtttaaggacctgttcgaactgaagatcatcgatctgggcttaaacaatctgaataccctgcccgctagtgtgttcaacaatcaggtgagtcttaaaagcctgaacctccagaagaatctgataacctccgtagagaagaaagtctttggtcccgcctttcggaatcttaccgaactggacatgaggtttaatcctttcgattgtacctgcgaatcaatcgcctggttcgtgaactggatcaatgaaacccacactaacatccccgagctatcatctcactacctgtgcaatactccaccccattaccacggtttccccgtcagactgttcgacacatcttcatgcaaggacagtgctccgttcgaactgtttttcatgatcaatacatctatcctgctgatcttcatctttatcgtcctgctgatccacttcgaagggtggcggatttcattctactggaatgtctccgtgcatagagtgctcgggtttaaagagatcgaccgccagactgagcaatttgagtatgcggcatacatcatccacgcatataaagataaggactgggtgtgggagcatttcagctcaatggagaaggaagatcagtccctaaaattctgtttagaggaaagagatttcgaagctggagtttttgaactggaggccatagtaaatagtatcaagcgttcaaggaaaataatttttgttattactcaccacttgttaaaggatccgctttgtaagcggttcaaggtgcaccatgctgtgcagcaggccatcgaacaaaatctcgattccattatcctagtgttcttagaggagatccccgactacaaactgaaccacgccctgtgccttcggagaggtatgtttaagtcacattgcatcctgaattggccggttcagaaagagaggattggggctttccgccataaactgcaagtcgctcttggctcaaagaacagtgtgcattag

SEQ ID NO: 136883 - DNA, 2613 bp, Artificial Sequence
  derived and/or modified sequence
atgcggcagacactgccatgtatctacttctggggagggttactgcctttcggcatgctctgtgcctcctctacgaccaaatgtacagtcagccacgaagtggccgattgtagccatcttaaactgactcaagtcccagacgatctgccaacaaatatcactgtcctcaatctgacacacaaccaactgagacgactgcctgcagccaacttcacaaggtatagtcagcttacttctttggatgtgggatttaacacaatcagcaaactggaacccgagctttgccaaaaactgcctatgcttaaggtgctcaatcttcagcacaatgaactctcccaattgagcgacaagaccttcgcattctgcacaaatttgaccgagctgcatctcatgagcaatagtatccagaagattaaaaataatccatttgtgaagcagaagaatcttattactttggatttgagccacaacggactcagctctacgaagctgggtacccaggttcaactcgaaaacctacaggagctccttctgagcaacaacaaaattcaggctctgaaatcagaagagctagatattttcgcaaactcatctttaaagaagcttgaactgtcctctaaccagatcaaggagttttctccgggatgttttcatgcgattgggaggttgttcggcctcttcctcaataacgtacagctcggcccttctttgaccgaaaagctgtgtcttgaacttgccaacacatctattcgcaacctgtccctgagtaatagccaactctcaaccacttccaacacgacttttctcgggcttaaatggaccaacctgaccatgctcgacctttcttataataacctgaacgtagtcgggaatgacagctttgcatggctgccccagctggaatactttttcctggaatacaataacattcagcacctgttctcccattctctgcacgggctatttaacgttagatatctgaatctgaaaaggtcatttaccaagcagagcataagtctcgcttctctacctaaaatcgatgacttctcttttcagtggctcaaatgcctagagcacctcaatatggaggataatgacataccaggcattaagtcgaacatgttcaccgggcttattaatttaaaatatctaagtctctctaactcatttacatccctccggacactcacgaacgagacatttgtgtccttggctcacagtcctctccacatcctgaatttgactaaaaataagatctccaaaatcgagtccgatgccttttcttggttggggcacttggaggtgctggacctgggactgaacgagatcggccaggaactgaccggccaggaatggagaggactggagaatatctttgagatctatctgagttacaacaagtacctgcagctcacccgcaacagctttgctctagtccccagtctacagcgtctgatgctcaggcgggtcgcccttaagaatgtcgattctagtccatccccctttcagcctcttcgcaacttaactatcttggacttgtccaataacaatattgccaacatcaatgacgatatgcttgaaggactggagaaattggaaatcttagacttacagcacaacaacctggctaggctgtggaagcacgcaaaccccggcggtcccatctatttccttaaagggctaagccacctccacatcctgaatctcgagagtaacgggtttgatgagatacctgtcgaagtgtttaaagatctttttgaactgaagattattgaccttggactcaataatcttaacactctgcctgcatctgtcttcaacaaccaggtgtctctgaaatccctcaatcttcagaagaatctgatcacatccgtggaaaagaaagtctttggacccgcctttagaaacttaacggaactcgatatgagattcaatccttttgattgcacatgtgagtccatcgcttggttcgtgaactggattaatgaaacccacactaacattccagagctcagctcacattatctctgcaatacccccccacactatcatggatttccggtacggctcttcgatacatcatcttgtaaggacagtgccccttttgaactgtttttcatgataaacacaagcatacttctgatcttcatatttattgtcctcctcatccattttgagggctggcgcatcagtttctactggaatgttagcgtgcatcgcgtgctcggctttaaagaaatcgaccgacagacggagcagttcgagtacgcagcttacataattcacgcctataaggataaggattgggtctgggagcacttctcgagcatggaaaaagaggatcagtcactgaagttttgccttgaagagagagattttgaggccggagtcttcgaacttgaggcgatagtgaacagtatcaagcgatctagaaagattatctttgtaatcactcatcatctgttgaaggaccctctttgtaagcgatttaaagtgcaccatgcggtccagcaggccatcgagcagaacctcgacagtatcatcttggtgtttctggaagagatccctgactacaaactgaaccacgccttatgcctgcgccgggccaagtag

SEQ ID NO: 136884 - DNA, 2715 bp, Artificial Sequence
  derived and/or modified sequence
atgaggcagaccctgccctgcatctacttctggggcggcctgctgcccttcggcatgctgtgtgccagcagcaccaccaagtgcaccgtgtcccatgaggtggccgactgcagccacctgaagctgacccaggtgcctgatgacctgcccaccaacatcaccgtgctgaacctgacccacaaccagctgcggcggctgcctgctgccaacttcacccgctacagccagctgaccagcctggatgtgggcttcaacaccatcagcaagctggagcctgagctgtgccagaagctgcccatgctgaaggtgctgaacctgcagcacaatgagctgagccagctgagtgacaagacctttgccttctgcaccaacctgacagagctgcacctgatgagcaacagcatccagaagatcaagaacaacccctttgtgaagcagaagaacctgatcaccctggacctgagccacaacggcctgagcagcaccaagctgggcacccaggtgcagctggagaacctgcaggagctgctgctgagcaacaacaagatccaggccctgaagtctgaggagctggacatctttgccaacagcagcctgaagaagctggagctgagcagcaaccagatcaaggagttcagccctggctgcttccacgccatcggccgcctgtttggcctcttcctgaacaacgtgcagctgggccccagcctgacagagaagctgtgcctggagctggccaacaccagcatccggaacctgagcctgagcaacagccagctgagcaccaccagcaacaccaccttcctgggcctgaagtggaccaacctgaccatgctggacctgagctacaacaacctgaatgtggtgggcaatgacagctttgcctggctgccccagctggagtacttcttcctggagtacaacaacatccagcacctgttcagccacagcctgcacggcctcttcaacgtgcgctacctgaacctgaagaggagcttcaccaagcagagcatcagcctggccagcctgcccaagattgatgacttctccttccagtggctgaagtgcctggagcacctgaacatggaggacaatgacatccctggcatcaagagcaacatgttcaccggcctcatcaacctgaagtacctgagcctgagcaacagcttcaccagcctgcggaccctgaccaatgagacctttgtgtccctggcccacagccccctgcacatcctgaacctgaccaagaacaagatcagcaagattgaaagtgatgccttctcctggctgggccacctggaggtgctggacctgggcctgaatgaaattggccaggagctgaccggccaggagtggaggggcctggagaacatctttgagatctacctgagctacaacaagtacctgcagctgaccagaaattcctttgccctggtgcccagcctgcagaggctgatgctgcggcgggtggccctgaagaatgtggacagcagccccagccccttccagcccctgaggaacctgaccatcctggacctgagcaacaacaacatcgccaacatcaatgatgacatgctggagggcctggagaagctggagatcctggacctgcagcacaacaacctggcccggctgtggaagcacgccaaccctgggggccccatctacttcctgaagggcctgagccacctgcacatcctgaacctggagagcaatggatttgatgagatccctgtggaggtgttcaaggacctgtttgagctgaagatcatcgacctgggcctgaacaacctgaacaccctgcctgccagcgtcttcaacaaccaggtgtccctgaagagcctgaacctgcagaagaacctgatcacctctgtggagaagaaggtgtttggacctgccttcaggaacctgacagagctggacatgaggttcaacccctttgactgcacctgtgagagcatcgcctggtttgtgaactggatcaatgagacccacaccaacatccctgagctgagcagccactacctgtgcaacaccccaccccactaccacggcttccctgtgcggctgtttgacaccagcagctgcaaggacagcgccccctttgagctgttcttcatgatcaacaccagcatcctgctgatcttcatcttcatcgtgctgctgatccactttgagggctggaggatctccttctactggaatgtgtctgtgcaccgggtgctgggcttcaaggagattgaccggcagacagagcagtttgaatatgctgcctacatcatccacgcctacaaggacaaggactgggtgtgggagcacttcagctccatggagaaggaggaccagagcctgaagttctgcctggaggagcgggactttgaagctggggtgtttgagctggaggccatcgtgaacagcatcaagaggagcaggaagatcatctttgtgatcacccaccacctgctgaaggaccccctgtgcaagcgcttcaaggtgcaccacgctgtgcagcaggccatcgagcagaacctggacagcatcatcctggtgttcctggaggagatcccagactacaagctgaaccacgccctgtgcctgcggcggggcatgttcaagagccactgcatcctgaactggcctgtgcagaaggagcgcatcggggccttccgccacaagctgcaggtggccctgggcagcaagaacagcgtgcactag

SEQ ID NO: 136885 - DNA, 1884 bp, Artificial Sequence
  derived and/or modified sequence
atgctggacctgagctacaacaacctgaatgtggtgggcaatgacagctttgcctggctgccccagctggagtacttcttcctggagtacaacaacatccagcacctgttcagccacagcctgcacggcctcttcaacgtgcgctacctgaacctgaagaggagcttcaccaagcagagcatcagcctggccagcctgcccaagattgatgacttctccttccagtggctgaagtgcctggagcacctgaacatggaggacaatgacatccctggcatcaagagcaacatgttcaccggcctcatcaacctgaagtacctgagcctgagcaacagcttcaccagcctgcggaccctgaccaatgagacctttgtgtccctggcccacagccccctgcacatcctgaacctgaccaagaacaagatcagcaagattgaaagtgatgccttctcctggctgggccacctggaggtgctggacctgggcctgaatgagatcggccaggagctgaccggccaggagtggaggggcctggagaacatctttgagatctacctgagctacaacaagtacctgcagctgaccaggaacagctttgccctggtgcccagcctgcagaggctgatgctgcggcgggtggccctgaagaatgtggacagcagccccagccccttccagcccctgaggaacctgaccatcctggacctgagcaacaacaacatcgccaacatcaatgatgacatgctggagggcctggagaagctggagatcctggacctgcagcacaacaacctggcccggctgtggaagcacgccaaccctgggggccccatctacttcctgaagggcctgagccacctgcacatcctgaacctggagagcaatggatttgatgagatccctgtggaggtgttcaaggacctgtttgagctgaagatcatcgacctgggcctgaacaacctgaacaccctgcctgcctctgtgttcaacaaccaggtgtccctgaagagcctgaacctgcagaagaacctgatcacctctgtggagaagaaggtgtttggacctgccttcaggaacctgacagagctggacatgaggttcaacccctttgactgcacctgtgagagcatcgcctggtttgtgaactggatcaatgagacccacaccaacatccctgagctgagcagccactacctgtgcaacaccccaccccactaccacggcttccctgtgcggctgtttgacaccagcagctgcaaggacagcgccccctttgagctgttcttcatgatcaacaccagcatcctgctgatcttcatcttcatcgtgctgctgatccactttgagggctggaggatctccttctactggaatgtgtctgtgcaccgggtgctgggcttcaaggagattgaccggcagacagagcagtttgaatatgctgcctacatcatccacgcctacaaggacaaggactgggtgtgggagcacttcagctccatggagaaggaggaccagagcctgaagttctgcctggaggagcgggactttgaggccggcgtgtttgagctggaggccatcgtgaacagcatcaagaggagcaggaagatcatcttcgtcatcacccaccacctgctgaaggaccccctgtgcaagcgcttcaaggtgcaccacgctgtgcagcaggccatcgagcagaacctggacagcatcatcctggtgttcctggaggagatcccagactacaagctgaaccacgccctgtgcctgcggcggggcatgttcaagagccactgcatcctgaactggcctgtgcagaaggagagaattggagccttccgccacaagctgcaggtggccctgggcagcaagaacagcgtgcactag

SEQ ID NO: 136886 - DNA, 2613 bp, Artificial Sequence
  derived and/or modified sequence
atgaggcagaccctgccctgcatctacttctggggcggcctgctgcccttcggcatgctgtgtgccagcagcaccaccaagtgcaccgtgtcccatgaggtggccgactgcagccacctgaagctgacccaggtgcctgatgacctgcccaccaacatcaccgtgctgaacctgacccacaaccagctgcggcggctgcctgctgccaacttcacccgctacagccagctgaccagcctggatgtgggcttcaacaccatcagcaagctggagcctgagctgtgccagaagctgcccatgctgaaggtgctgaacctgcagcacaatgagctgagccagctgagtgacaagacctttgccttctgcaccaacctgacagagctgcacctgatgagcaacagcatccagaagatcaagaacaacccctttgtgaagcagaagaacctgatcaccctggacctgagccacaacggcctgagcagcaccaagctgggcacccaggtgcagctggagaacctgcaggagctgctgctgagcaacaacaagatccaggccctgaagtctgaggagctggacatctttgccaacagcagcctgaagaagctggagctgagcagcaaccagatcaaggagttcagccctggctgcttccacgccatcggccgcctgtttggcctcttcctgaacaacgtgcagctgggccccagcctgacagagaagctgtgcctggagctggccaacaccagcatccggaacctgagcctgagcaacagccagctgagcaccaccagcaacaccaccttcctgggcctgaagtggaccaacctgaccatgctggacctgagctacaacaacctgaatgtggtgggcaatgacagctttgcctggctgccccagctggagtacttcttcctggagtacaacaacatccagcacctgttcagccacagcctgcacggcctcttcaacgtgcgctacctgaacctgaagaggagcttcaccaagcagagcatcagcctggccagcctgcccaagattgatgacttctccttccagtggctgaagtgcctggagcacctgaacatggaggacaatgacatccctggcatcaagagcaacatgttcaccggcctcatcaacctgaagtacctgagcctgagcaacagcttcaccagcctgcggaccctgaccaatgagacctttgtgtccctggcccacagccccctgcacatcctgaacctgaccaagaacaagatcagcaagattgaaagtgatgccttctcctggctgggccacctggaggtgctggacctgggcctgaatgaaattggccaggagctgaccggccaggagtggaggggcctggagaacatctttgagatctacctgagctacaacaagtacctgcagctgaccagaaattcctttgccctggtgcccagcctgcagaggctgatgctgcggcgggtggccctgaagaatgtggacagcagccccagccccttccagcccctgaggaacctgaccatcctggacctgagcaacaacaacatcgccaacatcaatgatgacatgctggagggcctggagaagctggagatcctggacctgcagcacaacaacctggcccggctgtggaagcacgccaaccctgggggccccatctacttcctgaagggcctgagccacctgcacatcctgaacctggagagcaatggatttgatgagatccctgtggaggtgttcaaggacctgtttgagctgaagatcatcgacctgggcctgaacaacctgaacaccctgcctgccagcgtcttcaacaaccaggtgtccctgaagagcctgaacctgcagaagaacctgatcacctctgtggagaagaaggtgtttggacctgccttcaggaacctgacagagctggacatgaggttcaacccctttgactgcacctgtgagagcatcgcctggtttgtgaactggatcaatgagacccacaccaacatccctgagctgagcagccactacctgtgcaacaccccaccccactaccacggcttccctgtgcggctgtttgacaccagcagctgcaaggacagcgccccctttgagctgttcttcatgatcaacaccagcatcctgctgatcttcatcttcatcgtgctgctgatccactttgagggctggaggatctccttctactggaatgtgtctgtgcaccgggtgctgggcttcaaggagattgaccggcagacagagcagtttgaatatgctgcctacatcatccacgcctacaaggacaaggactgggtgtgggagcacttcagctccatggagaaggaggaccagagcctgaagttctgcctggaggagcgggactttgaagctggggtgtttgagctggaggccatcgtgaacagcatcaagaggagcaggaagatcatctttgtgatcacccaccacctgctgaaggaccccctgtgcaagcgcttcaaggtgcaccacgctgtgcagcaggccatcgagcagaacctggacagcatcatcctggtgttcctggaggagatcccagactacaagctgaaccacgccctgtgcctgcggcgggccaagtag

SEQ ID NO: 136887 - DNA, 2715 bp, Artificial Sequence
  derived and/or modified sequence
atgcggcagaccctgccctgcatctacttctggggcggcctgctgcccttcggcatgctgtgcgcatccagcacaactaaatgtaccgtgagccacgaggttgccgactgcagtcacctcaaacttactcaagtaccagatgatcttcctactaacataaccgtgctgaaccttacgcataatcagctccgtcggctgcctgcagctaacttcacccgatactcccaactgacctctctggacgtgggattcaacactatatctaaactcgaacccgaactatgtcagaaattgcccatgctcaaggttctcaacctgcagcacaacgagctgagccagctgtcagacaagacattcgccttttgcacaaatctgacggagttgcaccttatgtctaactccattcagaagatcaaaaacaacccctttgttaagcagaagaatctgataaccctggacctttctcataacggactatcttcaacaaaacttggaacacaagttcagctagagaacctgcaggaactgctgttgtctaacaacaaaatccaagccttaaaatccgaggagctcgacattttcgcaaactcttctcttaagaaacttgaattgtcttcaaaccagataaaggagttttcacccggctgcttccacgccattgggaggttatttgggctgttcttgaacaatgtccagttggggcccagcctgaccgagaagctttgcttggagttggccaataccagcataagaaatctgtctctcagcaatagtcaattatcgacaacctctaacacgactttcctaggtctgaaatggacaaacttgactatgctcgacctgtcatacaacaatctcaacgtcgtgggcaatgactcctttgcttggcttccacagctggaatactttttcctggagtacaacaatatccagcacctgttttcccattcactgcacgggctgttcaatgtcagatacttgaacctgaagcggtccttcacgaagcagagtatctccttagcttctctccccaaaatagatgacttttccttccagtggctgaaatgcctagaacacttaaacatggaagataacgacatcccaggaatcaaatccaatatgttcacaggtctgatcaaccttaagtatcttagtctgagtaacagctttacctcattgagaaccctaactaacgagacatttgtgtctctggcgcacagccccctacacattttaaaccttacaaaaaataagatttctaaaatcgaatcagacgctttttcgtggctaggtcatctggaggtgctggatcttggactcaacgagattggacaggaacttactggccaggagtggcgaggactcgaaaatatatttgagatctatctcagttacaataaatatctccagctaacacgtaatagcttcgcgctggtaccttctctccaacggcttatgctaagacgcgtcgctctgaaaaatgtggattcatcccccagccctttccaaccactgcggaatctgacaatattggacctcagcaacaacaacattgccaacattaacgacgacatgctggaggggttagagaaactggagatcctggacttacagcacaataatttggcacgcctgtggaaacatgcgaacccgggcggaccaatctactttctgaaaggactgtcccacctacacatcctgaatctggagtccaacggcttcgacgagattcccgttgaagtgtttaaggacttattcgagttaaagattatagacctgggtctgaacaatttgaacacactgccagcaagtgtgttcaacaaccaggtgtctctgaaatcccttaacttgcagaagaatctgatcacttccgtggaaaaaaaagtgtttggaccagccttccgtaacctgacagagctcgacatgagatttaacccttttgattgtacgtgcgaatccatcgcctggttcgtgaactggatcaacgagactcacacaaacataccagagcttagctcacactacctctgtaatacgcctccgcactatcacggtttcccggtgagactgtttgacacctcatcctgtaaggatagcgctccgttcgaattgttctttatgatcaataccagcatactgctgatattcatttttatcgtactgctgatccatttcgagggatggcgaatctctttttattggaatgtgtccgttcatagagtactgggctttaaggaaatcgataggcagacagagcaattcgagtatgcagcttatatcattcatgcttataaagataaggactgggtgtgggagcactttagttcaatggaaaaagaggatcaaagcctcaagttttgcctagaggaaagggacttcgaggcaggagtattcgagctggaggccattgtgaactccattaaacggtcacgcaaaatcatcttcgtgataactcaccatttgctcaaagaccccttgtgtaaaaggtttaaagttcaccacgccgtccagcaggccatcgagcagaatctagacagcataattttagttttcttggaagaaattcccgactataaacttaaccacgctttatgtctgaggcgagggatgtttaagtcacactgtatattaaattggcctgtgcagaaagagcggataggcgccttccggcataagctccaggtggccctcggatccaaaaatagcgtgcactag

SEQ ID NO: 136888 - DNA, 1884 bp, Artificial Sequence
  derived and/or modified sequence
atgctggacctgagctacaacaacctgaacgtggtgggcaacgacagcttcgcctggctcccacaacttgagtattttttcttagaatacaacaacatccaacacctgttctctcactctctgcacggcctctttaatgttcggtatcttaatctcaagaggagttttacaaagcagagcatcagccttgcttcactgcccaagatagacgactttagcttccagtggctaaaatgcctggagcatctaaacatggaggacaatgatatccctgggattaaaagtaacatgtttacaggactcattaacttgaagtatctaagtttaagcaactcgtttacaagcctgcggactcttactaacgagacgttcgtttctttggcacattctccactccacattctcaatctcaccaaaaataagatatccaaaatcgagtctgatgctttttcctggctcggtcatttagaagtgctggatctgggtctcaatgagattggccaggagctgactgggcaggagtggagaggtctggagaacatcttcgagatctatctgtcctacaacaaatacctgcagttaactcggaactcctttgctttggttccatccctacagaggctgatgctgcggcgggtcgccctgaaaaacgtagacagttcaccttcaccttttcagccactgcgcaatctcacgattctggacctctccaataataacatcgccaatatcaacgacgatatgctcgagggtctggaaaaactcgagatactggacctgcagcataataacctcgctaggctgtggaaacacgccaaccctggagggcccatttatttccttaaggggctcagccatctgcacatcttgaacctggaatctaacggctttgacgagatacccgtcgaagttttcaaggacctgtttgaactcaagattatcgacctgggattaaacaatcttaatacgctgcctgctagcgtattcaataatcaagtgtcgctgaaatcgctgaacctgcaaaaaaacctcattacatccgtagagaagaaggtgttcggacccgctttcaggaatttaactgaactggacatgcggttcaacccctttgactgtacttgtgagagcatcgcatggtttgtcaactggataaacgagactcacacaaatattcccgagctgtctagtcactatctgtgcaacacccccccgcattatcacggttttccggtgcggctgtttgacacaagcagctgcaaagatagcgctcccttcgagctcttctttatgatcaatacatctattctcctcattttcattttcatcgtgttgctgatacattttgaaggctggagaattagcttctattggaacgtgagcgtccacagagttctcgggtttaaggagatcgataggcagaccgaacaatttgaatatgcagcttatatcatccatgcttacaaggataaagattgggtgtgggagcacttctcttccatggaaaaggaagatcagtcactgaagttctgcctcgaagagcgagacttcgaggcaggagtgtttgagttggaggccattgtcaattctatcaagcggtcacgcaaaatcatcttcgtcattacccatcacttattgaaggatcctctctgcaaaagatttaaagttcatcacgccgtgcagcaggcaatcgagcagaatctagattctataattctggtattcctggaggagattcccgattacaaactcaaccacgccctttgtctaagaagaggtatgttcaaaagtcactgcattctcaactggcccgtacagaaggaacgcattggcgcctttcggcacaagctccaggtagctttgggaagcaagaactctgtacactag

SEQ ID NO: 136889 - DNA, 2613 bp, Artificial Sequence
  derived and/or modified sequence
atgcggcagaccctgccctgcatctacttctggggcggcctgctgcccttcgggatgttgtgcgctagctcaacaactaaatgtacagtcagccacgaggttgccgactgttcccacctgaaactgacccaggtgcctgatgacttgcccacgaacattacagtactgaaccttacacacaatcaactcaggagactgcctgcggctaactttactcggtactcacagttaacctctctcgacgtcggattcaacactatatctaagctggaacccgagctttgccagaagctcccaatgctcaaagtcctaaaccttcagcacaacgagctgtcacagttaagcgacaaaacttttgcgttttgtactaatctgaccgagctccacctcatgagcaattcaattcagaagatcaaaaacaaccctttcgttaagcaaaaaaacctgattacgctcgacttatcacacaacggattgagcagtaccaaactcggcacccaagttcagctggagaatctgcaggaattgttgctatctaacaataagatccaggctttaaaatccgaggagttagatatcttcgccaactcctctttgaagaagttggagctgtcgtccaaccaaattaaagaatttagccccggctgtttccacgccattggtaggctgtttggcctcttcctcaataatgttcagctgggacccagtctgaccgaaaagctttgccttgaactggccaacacaagcatccgcaacttaagcctcagtaactcacaactgtctaccacaagcaacactacttttcttggtcttaagtggaccaacctgaccatgctcgacctttcttacaataatctgaatgttgtgggcaatgacagcttcgcatggctgccacagcttgagtattttttcttggaatataacaacatacagcatcttttttcccactcgctgcacggtctgtttaacgtgagatacttaaatctcaagcgatcttttacaaagcagagcattagcctcgcctccttgcctaagatcgacgatttctccttccagtggctcaaatgcttggaacatcttaatatggaagacaacgacattcccggtatcaagtctaatatgttcactgggcttatcaacctgaagtacctctccctgagtaatagctttacctccctgagaaccttgacaaatgagacttttgtgtcactcgcccattccccattacacattctcaatctcaccaaaaacaagatttctaaaattgagagcgacgcgtttagttggctgggacatctggaggtgctggacctcggattgaatgagatcgggcaggagctgaccggccaggagtggaggggcctggagaacatcttcgaaatatatctgagctataacaagtacctgcagttgacgaggaactcatttgcactggtgccctccctgcaacgactgatgcttcgcagagtggcattaaaaaacgtggactcctccccatcacccttccagccattgcggaacctgactatcctggacttaagtaacaacaacatcgccaacataaacgacgacatgctggagggcctggaaaaactggagattctcgatctgcaacacaataacctggctaggctgtggaaacatgccaacccgggagggcccatttatttcctcaagggactctcccacctccacatcctgaacttggagtctaatggtttcgacgagatcccggtggaagtcttcaaggatcttttcgagctgaagatcatcgatctgggtctgaataatctgaacacactgcctgcaagcgtgttcaataaccaggtatctctgaagagtctaaacctgcagaagaatctgatcacttctgtcgagaagaaggtattcggacctgcgttcaggaacctgaccgagttagatatgagattcaatcctttcgactgtacctgcgaatccatcgcctggttcgtgaattggattaacgaaacccacacaaatatccccgagttgagcagccactatctctgcaacaccccaccacattaccacggatttcccgttcgcctctttgatacaagtagctgcaaagactctgcccccttcgaactcttcttcatgataaacacgagcatcctactgatttttatcttcatagttctcctgatccactttgagggctggagaatttctttttactggaacgtcagcgtgcatagagtcttaggcttcaaggagatcgacaggcagaccgagcagtttgaatatgccgcttacatcatacatgcctacaaggacaaggactgggtctgggaacacttttcttccatggaaaaagaagatcagagtctgaaattttgtctggaggaacgagattttgaggccggagtgttcgagctcgaagccattgtgaattccatcaaacggtctcgaaaaattatttttgtcataactcaccacctgctaaaggaccccctgtgcaagcggttcaaggtgcaccacgctgtgcagcaagccatcgaacagaacctggatagcatcatcctagtttttctggaggagattcctgattacaagctcaatcacgctctctgcttgaggcgcgcaaaatag

SEQ ID NO: 136890 - DNA, 2715 bp, Artificial Sequence
  derived and/or modified sequence
atgaggcagaccctcccatgcatctatttctggggtggactgctgcccttcggaatgctctgcgcctcgtctactaccaagtgtaccgtgtcacacgaagtggcagattgtagtcatctgaaactgacccaggtgccggatgatctccccaccaacattaccgtgctaaacttgactcacaatcaactgaggaggctccctgccgctaattttaccagatactcacagttaacctcccttgatgtagggtttaatacaatcagcaaactggagcctgaactgtgtcagaagctgcctatgttgaaggttctgaatctgcagcacaacgagctctcccaactctctgataagacattcgcattttgcacaaatcttactgagctccacctcatgtcaaacagcatccagaaaatcaaaaacaatccttttgttaaacagaaaaatttgatcacactagacctttcccataacggcctgtcaagcaccaagttaggaactcaggtgcagttggagaacctccaagagctgctcctttctaacaataagatccaagccctcaaatctgaagaactggacattttcgcaaacagcagtctaaaaaaactggagctctcaagcaaccagatcaaggaattttctcccggatgctttcacgcaatcggaaggctctttggactgtttttgaacaacgttcagctcggtccttctttaactgaaaaactgtgtttggagctggccaatacttccattagaaacctgagcctgagcaactcccagctctcaactacatcgaatactacgttcctcgggctgaagtggacaaatctgaccatgctggatctgtcctataataaccttaacgtcgttgggaatgattcattcgcatggttgccacagctcgaatatttctttctggaatataacaacatccagcatctgttcagtcactccctccacgggttatttaatgtcaggtacctcaacctaaagcggtcttttactaagcaaagtatctctcttgcgagtttgcctaagattgatgacttttctttccagtggcttaagtgcctggagcacttgaacatggaggacaatgatatcccgggaattaagagcaatatgttcacgggcctgattaatctgaaatatctgtccctgtcaaattctttcactagtctaaggacactgaccaatgaaacctttgtaagtctggctcactcccccctccacatcttgaacttaactaagaacaagatttccaagatcgagagtgacgcattttcctggctcggtcacctggaagttctcgacctagggcttaatgaaatcggtcaggaactcactggtcaggagtggaggggattagaaaatatctttgagatttacctgtcttacaacaaatacctgcagctcaccagaaattccttcgctttggtcccatcactgcagaggctgatgctgcgccgagtagctttgaaaaatgttgattcctcccctagccccttccagcccctccggaatcttacaatccttgatctatcaaacaacaatatagccaacatcaatgatgacatgcttgaggggctagaaaaacttgaaattttggacctacagcataataacctggcccgactctggaagcacgccaaccccggtggcccaatctacttcctgaagggcctcagccatctccatattcttaacctagagagcaacgggtttgacgagatccccgtcgaagtgttcaaagacctgtttgaactgaagatcattgacctcggtctgaacaatctaaacacattgcccgcatctgtttttaataatcaggtcagtttgaagtctctgaacttacagaagaaccttatcacctctgttgaaaaaaaagtgttcggccctgcattccgcaatctcacggagctggatatgagatttaacccgtttgattgcacttgtgaaagcattgcctggttcgtgaattggattaacgaaacccataccaacatacccgaactctctagtcactacctgtgtaatacacctcctcattaccatggcttccccgttagactcttcgacacgtccagctgcaaggatagtgcaccctttgagctgttttttatgatcaacacctctatcctgctgatatttatttttatagtacttctgattcacttcgaagggtggagaattagcttctactggaacgtgagcgtgcaccgtgtcctggggttcaaggaaatcgatcggcaaacagagcaatttgaatacgcagcatatatcatacacgcctataaggataaggattgggtctgggaacacttctcttctatggagaaggaagaccaaagtctcaagttctgtctggaagagcgcgatttcgaggccggtgttttcgagctggaggccattgtgaacagtataaaacgatcaaggaaaattattttcgttatcactcatcaccttctgaaggatccactttgtaaacgcttcaaggtgcaccacgcagttcagcaggctatcgaacagaacctggattcaatcattcttgtctttctcgaagagatccctgactacaagctgaatcacgcgttatgccttcgtaggggcatgttcaagagtcactgcatccttaactggcccgttcagaaggagaggatcggggctttccggcataaactgcaggtggctttggggtccaaaaactcggtccattag

SEQ ID NO: 136891 - DNA, 1884 bp, Artificial Sequence
  derived and/or modified sequence
atgcttgatttgtcctacaacaatctaaacgttgtgggcaacgatagttttgcctggctgccacaactggagtatttctttcttgaatacaacaacatacagcatctgtttagccacagtctacacggcctgtttaacgttcggtacctaaatctgaaaaggtccttcaccaaacagagcatatctttggcgtcactacctaagatagacgatttttccttccaatggctgaaatgtttggaacatttgaatatggaagataatgatattccaggtattaagagcaatatgtttaccgggcttatcaacctcaagtatctgtcactttcaaatagtttcaccagcttgcgcactttgactaatgagacatttgtctccctggcacactcaccactccacatcctcaaccttaccaaaaataagattagtaaaattgagtccgacgccttctcatggctgggccatctggaggtgcttgacctaggattgaacgaaattggtcaggaactaactggccaggaatggcggggattagagaatatcttcgagatttatctgtcgtacaataagtatctgcagctaacacgcaacagttttgcgttggtgccatccttacagcggctcatgctgaggagggtcgcactgaaaaacgtcgattcgtccccatcgccatttcaacctctcaggaacctgaccattttggatctctccaataataacatcgctaacatcaatgacgacatgctggaaggccttgaaaagcttgaaatactagacctgcagcacaacaacttggctcgtctatggaagcatgcaaatccaggaggccctatatacttcttgaagggtctgtcacacctacatattttaaatcttgagtccaatggcttcgatgagatcccagtggaagtgttcaaagatctttttgagctcaaaattattgacctcggacttaataacctgaataccctccccgcaagcgtctttaataaccaggtttccttaaaaagcctgaacctgcagaagaacctcattaccagcgtcgagaaaaaggtgttcggcccagcgttccgcaatctcacggagctggatatgagattcaatccctttgactgcacctgcgaaagcattgcttggttcgtgaactggatcaatgagacacacacaaacattccggaattatcaagccactacttgtgtaatacaccaccacactaccacggctttccagtgcgcttatttgatacaagctcttgtaaagacagcgctcccttcgagctgttttttatgattaatactagcattctattaatttttatctttatcgtgctgctcatccactttgaaggttggaggatatcattctattggaacgtatctgttcacagggtgttgggtttcaaggaaattgataggcaaacagaacagtttgaatatgccgcttacatcatccacgcttataaggacaaggactgggtatgggaacattttagtagcatggagaaggaagaccagagtctgaagttttgcctggaggaacgggactttgaggctggcgtgttcgagctagaagctatcgttaactctatcaagagatctcggaaaattattttcgtgataacccatcatctcctgaaagacccactctgcaagcgcttcaaagtgcaccacgccgtgcaacaggctatcgagcagaacctcgattctataatcctagtgttcctggaggaaatccctgattataagctcaatcatgccctgtgtttacggagggggatgtttaaatctcactgcatcctgaactggccagtccaaaaggaacgcattggtgcttttcgccataagctgcaagtggcattaggctctaaaaacagcgtgcattag

SEQ ID NO: 136892 - DNA, 2613 bp, Artificial Sequence
  derived and/or modified sequence
atgcggcaaactctgccgtgtatttacttctggggcggtttgttgccctttggcatgctatgcgccagctctacaaccaaatgtacagttagccatgaagtcgccgactgctctcacctgaaacttactcaggtgcctgatgacctgcctactaatattacggtcctgaaccttacgcataatcagcttcggcgattaccagcagctaactttacacggtatagtcagctgacttctctggacgtgggatttaacaccatctccaagctcgaaccagagctgtgccagaaacttccaatgctgaaggttctgaatctccagcataacgagctcagccagctgtccgataaaaccttcgccttttgcaccaaccttaccgaacttcacctcatgtcgaattcaattcagaagataaaaaataatccctttgtgaaacaaaagaatctgatcactctggatctgtcacacaatggtctgtccagtactaaattagggacgcaggtgcagttggagaacctgcaagagcttttactgtctaataacaagattcaggcattaaaatcagaggaacttgacatcttcgcaaattccagccttaagaaactcgagcttagctcaaatcagattaaagagttctctccaggatgcttccatgctatcggtcgattgtttggtttgtttctgaataacgtgcagttaggcccatccctcactgaaaagctgtgcctggaattggctaacaccagcatacggaacttatcattatcaaacagccagttgtcaaccacttctaacaccacctttcttggcctcaagtggaccaacctgaccatgctcgatctatcctataacaaccttaatgtggtgggtaacgattcttttgcctggctaccccagctcgaatacttttttctcgaatataacaacatacagcacctcttctcccacagcctgcatgggctgttcaacgtgcgatatctgaacctgaaacgttcctttaccaagcagtctatcagccttgcatctcttcccaagatagacgatttttctttccaatggctgaagtgcctcgaacacttaaacatggaagataatgatatccctggtatcaaatcaaacatgtttaccggcctgataaatctgaagtatctatccctgagtaactcattcacttcgctccgaacgctgacaaatgaaacattcgtgtccctggcacattctcccttgcatatattaaatctaaccaaaaacaagatcagtaagattgagtcagatgctttttcctggctgggccaccttgaggtgctcgaccttggcctgaatgagattggacaagagttgaccggccaggagtggcgcggacttgagaatatctttgaaatttacctctcttacaacaagtacttacagctcacaaggaacagtttcgcactggtcccaagcctccagcgcctcatgctaaggagagttgccctgaaaaacgtggacagctccccttcaccttttcagcctcttcggaacctcacaattttggacttgtctaataacaacatcgcaaacattaatgatgatatgctcgagggcctagagaaactggaaatcttagacctgcaacataataacctggcccgactttggaagcacgccaatcccggaggcccaatctacttcctgaaggggctgtctcatttacacatactaaacctggagtcgaatggattcgatgagatccctgtggaagttttcaaggatttattcgaattgaagattatcgacctcggattaaacaatcttaacactctaccggcttctgtctttaacaaccaggttagtctaaagagtcttaatctccagaagaacctaatcacgtcggtcgaaaaaaaagtgtttggacctgccttccggaatttgacagaactggatatgcggttcaacccgtttgactgcacttgtgagagtatcgcctggtttgtaaactggatcaatgaaacccacaccaatatacctgagctctccagccactatctgtgcaacacaccaccgcactatcacggcttcccagttagactgtttgacacctcctcatgtaaagatagcgccccttttgagctgttcttcatgatcaacacttcaatcctgttgatctttatttttattgtactccttatacactttgaaggttggcgtatctcgttctactggaacgtttccgtgcacagggttctgggcttcaaagaaatcgaccgacaaactgagcagtttgaatatgcggcttacatcattcacgcctataaagataaggattgggtgtgggagcatttttcatccatggagaaagaggaccagagcttgaagttttgtttagaagaacgggattttgaggcgggagtgtttgagttggaggccattgtaaatagtattaagcgctctcgcaaaattatctttgtgatcacacaccacctgttgaaagatccgctgtgtaaacgcttcaaagtgcatcacgcagtccaacaggccatcgaacaaaacctggattccatcatcctcgtctttctcgaagagataccagattataagctgaaccacgcactctgcctacgtcgagcgaaatag

SEQ ID NO: 136893 - DNA, 3047 bp, Artificial Sequence
  derived and/or modified sequence
tttcactttcgagagtgccgtctatttgccacacacttccctgatgaaatgtctggatttggactaaagaaaaaaggaaaggctagcagtcatccaacagaatcatgagacagactttgccttgtatctacttttgggggggccttttgccctttgggatgctgtgtgcatcctccaccaccaagtgcactgttagccatgaagttgctgactgcagccacctgaagttgactcaggtacccgatgatctacccacaaacataacagtgttgaaccttacccataatcaactcagaagattaccagccgccaacttcacaaggtatagccagctaactagcttggatgtaggatttaacaccatctcaaaactggagccagaattgtgccagaaacttcccatgttaaaagttttgaacctccagcacaatgagctatctcaactttctgataaaacctttgccttctgcacgaatttgactgaactccatctcatgtccaactcaatccagaaaattaaaaataatccctttgtcaagcagaagaatttaatcacattagatctgtctcataatggcttgtcatctacaaaattaggaactcaggttcagctggaaaatctccaagagcttctattatcaaacaataaaattcaagcgctaaaaagtgaagaactggatatctttgccaattcatctttaaaaaaattagagttgtcatcgaatcaaattaaagagttttctccagggtgttttcacgcaattggaagattatttggcctctttctgaacaatgtccagctgggtcccagccttacagagaagctatgtttggaattagcaaacacaagcattcggaatctgtctctgagtaacagccagctgtccaccaccagcaatacaactttcttgggactaaagtggacaaatctcactatgctcgatctttcctacaacaacttaaatgtggttggtaacgattcctttgcttggcttccacaactagaatatttcttcctagagtataataatatacagcatttgttttctcactctttgcacgggcttttcaatgtgaggtacctgaatttgaaacggtcttttactaaacaaagtatttcccttgcctcactccccaagattgatgatttttcttttcagtggctaaaatgtttggagcaccttaacatggaagataatgatattccaggcataaaaagcaatatgttcacaggattgataaacctgaaatacttaagtctatccaactcctttacaagtttgcgaactttgacaaatgaaacatttgtatcacttgctcattctcccttacacatactcaacctaaccaagaataaaatctcaaaaatagagagtgatgctttctcttggttgggccacctagaagtacttgacctgggccttaatgaaattgggcaagaactcacaggccaggaatggagaggtctagaaaatattttcgaaatctatctttcctacaacaagtacctgcagctgactaggaactcctttgccttggtcccaagccttcaacgactgatgctccgaagggtggcccttaaaaatgtggatagctctccttcaccattccagcctcttcgtaacttgaccattctggatctaagcaacaacaacatagccaacataaatgatgacatgttggagggtcttgagaaactagaaattctcgatttgcagcataacaacttagcacggctctggaaacacgcaaaccctggtggtcccatttatttcctaaagggtctgtctcacctccacatccttaacttggagtccaacggctttgacgagatcccagttgaggtcttcaaggatttatttgaactaaagatcatcgatttaggattgaataatttaaacacacttccagcatctgtctttaataatcaggtgtctctaaagtcattgaaccttcagaagaatctcataacatccgttgagaagaaggttttcgggccagctttcaggaacctgactgagttagatatgcgctttaatccctttgattgcacgtgtgaaagtattgcctggtttgttaattggattaacgagacccataccaacatccctgagctgtcaagccactacctttgcaacactccacctcactatcatgggttcccagtgagactttttgatacatcatcttgcaaagacagtgccccctttgaactctttttcatgatcaataccagtatcctgttgatttttatctttattgtacttctcatccactttgagggctggaggatatctttttattggaatgtttcagtacatcgagttcttggtttcaaagaaatagacagacagacagaacagtttgaatatgcagcatatataattcatgcctataaagataaggattgggtctgggaacatttctcttcaatggaaaaggaagaccaatctctcaaattttgtctggaagaaagggactttgaggcgggtgtttttgaactagaagcaattgttaacagcatcaaaagaagcagaaaaattatttttgttataacacaccatctattaaaagacccattatgcaaaagattcaaggtacatcatgcagttcaacaagctattgaacaaaatctggattccattatattggttttccttgaggagattccagattataaactgaaccatgcactctgtttgcgaagaggaatgtttaaatctcactgcatcttgaactggccagttcagaaagaacggataggtgcctttcgtcataaattgcaagtagcacttggatccaaaaactctgtacattaaatttatttaaatattcaattagcaaaggagaaactttctcaatttaaaaagttctatggcaaatttaagttttccataaaggtgttataatttgtttattcatatttgtaaatgattatattctatcacaattacatctcttctaggaaaatgtgtctccttatttcaggcctatttttgacaattgacttaattttacccaaaataaaacatataagcacgtaagaa

SEQ ID NO: 136894 - DNA, 2310 bp, Artificial Sequence
  derived and/or modified sequence
aagacacaaccaggaactgccccaggagtgacttcacgagcagtttattcattgcaattgttctcatggtgataaagaaaaagtaccaggagatggatcctggactggaaggtcagagaagcctccctgaaaaggtggcatctaagctgaggctgtgaatgctgagcagaagttagcccgtggccaggggaggtcagaggctggagtaagagttttctccagggtgttttcacgcaattggaagattatttggcctctttctgaacaatgtccagctgggtcccagccttacagagaagctatgtttggaattagcaaacacaagcattcggaatctgtctctgagtaacagccagctgtccaccaccagcaatacaactttcttgggactaaagtggacaaatctcactatgctcgatctttcctacaacaacttaaatgtggttggtaacgattcctttgcttggcttccacaactagaatatttcttcctagagtataataatatacagcatttgttttctcactctttgcacgggcttttcaatgtgaggtacctgaatttgaaacggtcttttactaaacaaagtatttcccttgcctcactccccaagattgatgatttttcttttcagtggctaaaatgtttggagcaccttaacatggaagataatgatattccaggcataaaaagcaatatgttcacaggattgataaacctgaaatacttaagtctatccaactcctttacaagtttgcgaactttgacaaatgaaacatttgtatcacttgctcattctcccttacacatactcaacctaaccaagaataaaatctcaaaaatagagagtgatgctttctcttggttgggccacctagaagtacttgacctgggccttaatgaaattgggcaagaactcacaggccaggaatggagaggtctagaaaatattttcgaaatctatctttcctacaacaagtacctgcagctgactaggaactcctttgccttggtcccaagccttcaacgactgatgctccgaagggtggcccttaaaaatgtggatagctctccttcaccattccagcctcttcgtaacttgaccattctggatctaagcaacaacaacatagccaacataaatgatgacatgttggagggtcttgagaaactagaaattctcgatttgcagcataacaacttagcacggctctggaaacacgcaaaccctggtggtcccatttatttcctaaagggtctgtctcacctccacatccttaacttggagtccaacggctttgacgagatcccagttgaggtcttcaaggatttatttgaactaaagatcatcgatttaggattgaataatttaaacacacttccagcatctgtctttaataatcaggtgtctctaaagtcattgaaccttcagaagaatctcataacatccgttgagaagaaggttttcgggccagctttcaggaacctgactgagttagatatgcgctttaatccctttgattgcacgtgtgaaagtattgcctggtttgttaattggattaacgagacccataccaacatccctgagctgtcaagccactacctttgcaacactccacctcactatcatgggttcccagtgagactttttgatacatcatcttgcaaagacagtgccccctttgaactctttttcatgatcaataccagtatcctgttgatttttatctttattgtacttctcatccactttgagggctggaggatatctttttattggaatgtttcagtacatcgagttcttggtttcaaagaaatagacagacagacagaacagtttgaatatgcagcatatataattcatgcctataaagataaggattgggtctgggaacatttctcttcaatggaaaaggaagaccaatctctcaaattttgtctggaagaaagggactttgaggcgggtgtttttgaactagaagcaattgttaacagcatcaaaagaagcagaaaaattatttttgttataacacaccatctattaaaagacccattatgcaaaagattcaaggtacatcatgcagttcaacaagctattgaacaaaatctggattccattatattggttttccttgaggagattccagattataaactgaaccatgcactctgtttgcgaagaggaatgtttaaatctcactgcatcttgaactggccagttcagaaagaacggataggtgcctttcgtcataaattgcaagtagcacttggatccaaaaactctgtacattaaatttatttaaatattc

SEQ ID NO: 136895 - DNA, 2711 bp, Artificial Sequence
  derived and/or modified sequence
cactttcgagagtgccgtctatttgccacacacttccctgatgaaatgtctggatttggactaaagaaaaaaggaaaggctagcagtcatccaacagaatcatgagacagactttgccttgtatctacttttgggggggccttttgccctttgggatgctgtgtgcatcctccaccaccaagtgcactgttagccatgaagttgctgactgcagccacctgaagttgactcaggtacccgatgatctacccacaaacataacagtgttgaaccttacccataatcaactcagaagattaccagccgccaacttcacaaggtatagccagctaactagcttggatgtaggatttaacaccatctcaaaactggagccagaattgtgccagaaacttcccatgttaaaagttttgaacctccagcacaatgagctatctcaactttctgataaaacctttgccttctgcacgaatttgactgaactccatctcatgtccaactcaatccagaaaattaaaaataatccctttgtcaagcagaagaatttaatcacattagatctgtctcataatggcttgtcatctacaaaattaggaactcaggttcagctggaaaatctccaagagcttctattatcaaacaataaaattcaagcgctaaaaagtgaagaactggatatctttgccaattcatctttaaaaaaattagagttgtcatcgaatcaaattaaagagttttctccagggtgttttcacgcaattggaagattatttggcctctttctgaacaatgtccagctgggtcccagccttacagagaagctatgtttggaattagcaaacacaagcattcggaatctgtctctgagtaacagccagctgtccaccaccagcaatacaactttcttgggactaaagtggacaaatctcactatgctcgatctttcctacaacaacttaaatgtggttggtaacgattcctttgcttggcttccacaactagaatatttcttcctagagtataataatatacagcatttgttttctcactctttgcacgggcttttcaatgtgaggtacctgaatttgaaacggtcttttactaaacaaagtatttcccttgcctcactccccaagattgatgatttttcttttcagtggctaaaatgtttggagcaccttaacatggaagataatgatattccaggcataaaaagcaatatgttcacaggattgataaacctgaaatacttaagtctatccaactcctttacaagtttgcgaactttgacaaatgaaacatttgtatcacttgctcattctcccttacacatactcaacctaaccaagaataaaatctcaaaaatagagagtgatgctttctcttggttgggccacctagaagtacttgacctgggccttaatgaaattgggcaagaactcacaggccaggaatggagaggtctagaaaatattttcgaaatctatctttcctacaacaagtacctgcagctgactaggaactcctttgccttggtcccaagccttcaacgactgatgctccgaagggtggcccttaaaaatgtggatagctctccttcaccattccagcctcttcgtaacttgaccattctggatctaagcaacaacaacatagccaacataaatgatgacatgttggagggtcttgagaaactagaaattctcgatttgcagcataacaacttagcacggctctggaaacacgcaaaccctggtggtcccatttatttcctaaagggtctgtctcacctccacatccttaacttggagtccaacggctttgacgagatcccagttgaggtcttcaaggatttatttgaactaaagatcatcgatttaggattgaataatttaaacacacttccagcatctgtctttaataatcaggtgtctctaaagtcattgaaccttcagaagaatctcataacatccgttgagaagaaggttttcgggccagctttcaggaacctgactgagttagatatgcgctttaatccctttgattgcacgtgtgaaagtattgcctggtttgttaattggattaacgagacccataccaacatccctgagctgtcaagccactacctttgcaacactccacctcactatcatgggttcccagtgagactttttgatacatcatcttgcaaagacagtgccccctttgaactctttttcatgatcaataccagtatcctgttgatttttatctttattgtacttctcatccactttgagggctggaggatatctttttattggaatgtttcagtacatcgagttcttggtttcaaagaaatagacagacagacagaacagtttgaatatgcagcatatataattcatgcctataaagataaggattgggtctgggaacatttctcttcaatggaaaaggaagaccaatctctcaaattttgtctggaagaaagggactttgaggcgggtgtttttgaactagaagcaattgttaacagcatcaaaagaagcagaaaaattatttttgttataacacaccatctattaaaagacccattatgcaaaagattcaaggtacatcatgcagttcaacaagctattgaacaaaatctggattccattatattggttttccttgaggagattccagattataaactgaaccatgcactctgtttgcgaagagcaaag

SEQ ID NO: 136896 - protein, 799 aa, Artificial Sequence
  derived and/or modified sequence
MELNFYKIPDNLPFSTKNLDLSFNPLRHLGSYSFFSFPELQVLDLSRCEIQTIEDGAYQSLSHLSTLILTGNPIQSLALGAFSGLSSLQKLVAVETNLASLENFPIGHLKTLKELNVAHNLIQSFKLPEYFSNLTNLEHLDLSSNKIQSIYCTDLRVLHQMPLLNLSLDLSLNPMNFIQPGAFKEIRLHKLTLRNNFDSLNVMKTCIQGLAGLEVHRLVLGEFRNEGNLEKFDKSALEGLCNLTIEEFRLAYLDYYLDDIIDLFNCLTNVSSFSLVSVTIERVKDFSYNFGWQHLELVNCKFGQFPTLKLKSLKRLTFTSNKGGNAFSEVDLPSLEFLDLSRNGLSFKGCCSQSDFGTTSLKYLDLSFNGVITMSSNFLGLEQLEHLDFQHSNLKQMSEFSVFLSLRNLIYLDISHTHTRVAFNGIFNGLSSLEVLKMAGNSFQENFLPDIFTELRNLTFLDLSQCQLEQLSPTAFNSLSSLQVLNMSHNNFFSLDTFPYKCLNSLQVLDYSLNHIMTSKKQELQHFPSSLAFLNLTQNDFACTCEHQSFLQWIKDQRQLLVEVERMECATPSDKQGMPVLSLNITCQMNKTIIGVSVLSVLVVSVVAVLVYKFYFHLMLLAGCIKYGRGENIYDAFVIYSSQDEDWVRNELVKNLEEGVPPFQLCLHYRDFIPGVAIAANIIHEGFHKSRKVIVVVSQHFIQSRWCIFEYEIAQTWQFLSSRAGIIFIVLQKVEKTLLRQQVELYRLLSRNTYLEWEDSVLGRHIFWRRLRKALLDGKSWNPEGTVGTGCNWQEATSI

SEQ ID NO: 136897 - DNA, 2400 bp, Artificial Sequence
  derived and/or modified sequence
atggagctgaacttctacaagatccccgacaacctgcccttcagcaccaagaacctggacctgagcttcaaccccctgagacacctgggcagctacagcttcttcagcttccccgagctgcaggtgctggacctgagcagatgcgagatccagaccatcgaggacggcgcctaccagagcctgagccacctgagcaccctgatcctgaccggcaaccccatccagagcctggccctgggcgccttcagcggcctgagcagcctgcagaagctggtggccgtggagaccaacctggccagcctggagaacttccccatcggccacctgaagaccctgaaggagctgaacgtggcccacaacctgatccagagcttcaagctgcccgagtacttcagcaacctgaccaacctggagcacctggacctgagcagcaacaagatccagagcatctactgcaccgacctgagagtgctgcaccagatgcccctgctgaacctgagcctggacctgagcctgaaccccatgaacttcatccagcccggcgccttcaaggagatcagactgcacaagctgaccctgagaaacaacttcgacagcctgaacgtgatgaagacctgcatccagggcctggccggcctggaggtgcacagactggtgctgggcgagttcagaaacgagggcaacctggagaagttcgacaagagcgccctggagggcctgtgcaacctgaccatcgaggagttcagactggcctacctggactactacctggacgacatcatcgacctgttcaactgcctgaccaacgtgagcagcttcagcctggtgagcgtgaccatcgagagagtgaaggacttcagctacaacttcggctggcagcacctggagctggtgaactgcaagttcggccagttccccaccctgaagctgaagagcctgaagagactgaccttcaccagcaacaagggcggcaacgccttcagcgaggtggacctgcccagcctggagttcctggacctgagcagaaacggcctgagcttcaagggctgctgcagccagagcgacttcggcaccaccagcctgaagtacctggacctgagcttcaacggcgtgatcaccatgagcagcaacttcctgggcctggagcagctggagcacctggacttccagcacagcaacctgaagcagatgagcgagttcagcgtgttcctgagcctgagaaacctgatctacctggacatcagccacacccacaccagagtggccttcaacggcatcttcaacggcctgagcagcctggaggtgctgaagatggccggcaacagcttccaggagaacttcctgcccgacatcttcaccgagctgagaaacctgaccttcctggacctgagccagtgccagctggagcagctgagccccaccgccttcaacagcctgagcagcctgcaggtgctgaacatgagccacaacaacttcttcagcctggacaccttcccctacaagtgcctgaacagcctgcaggtgctggactacagcctgaaccacatcatgaccagcaagaagcaggagctgcagcacttccccagcagcctggccttcctgaacctgacccagaacgacttcgcctgcacctgcgagcaccagagcttcctgcagtggatcaaggaccagagacagctgctggtggaggtggagagaatggagtgcgccacccccagcgacaagcagggcatgcccgtgctgagcctgaacatcacctgccagatgaacaagaccatcatcggcgtgagcgtgctgagcgtgctggtggtgagcgtggtggccgtgctggtgtacaagttctacttccacctgatgctgctggccggctgcatcaagtacggcagaggcgagaacatctacgacgccttcgtgatctacagcagccaggacgaggactgggtgagaaacgagctggtgaagaacctggaggagggcgtgccccccttccagctgtgcctgcactacagagacttcatccccggcgtggccatcgccgccaacatcatccacgagggcttccacaagagcagaaaggtgatcgtggtggtgagccagcacttcatccagagcagatggtgcatcttcgagtacgagatcgcccagacctggcagttcctgagcagcagagccggcatcatcttcatcgtgctgcagaaggtggagaagaccctgctgagacagcaggtggagctgtacagactgctgagcagaaacacctacctggagtgggaggacagcgtgctgggcagacacatcttctggagaagactgagaaaggccctgctggacggcaagagctggaaccccgagggcaccgtgggcaccggctgcaactggcaggaggccaccagcatctag

SEQ ID NO: 136898 - DNA, 2400 bp, Artificial Sequence
  derived and/or modified sequence
atggaactgaacttctacaagatccctgataacctccccttcagcaccaagaaccttgatctgtcgttcaacccactgagacatttgggcagctactcattcttcagtttccccgaactccaggtgctggacttaagtagatgcgagatccagacgatagaggacggcgcttatcagtcactctcgcacctgtccaccctgattctgacaggtaatccaattcaatctctggcacttggcgcattttcaggcctgagctccctgcagaaacttgtggcggtggagacaaatctagcttccctggagaattttccgatcggccatctcaaaactctgaaagaattaaatgtcgcccacaacctgattcaatctttcaaactgccagagtacttttctaatttaaccaaccttgagcacctggacctgagttcaaataagatccagtccatatattgcactgatcttcgtgtgctgcaccagatgcccctgttaaacctgagcctagatctgtccttgaatcccatgaattttattcagccaggtgcgttcaaggagatccggctccacaagctcacactcagaaacaattttgattctctcaatgtgatgaaaacatgcatccaaggactggctggccttgaagtgcaccgcctcgtccttggcgaattcagaaacgagggaaacctggagaagttcgataagtcagctctggagggcctgtgcaatctgaccattgaggagttccgcctggcctacctcgactactaccttgacgatatcatagacctctttaattgtcttactaacgtaagctcttttagcctggtatctgttaccatcgagcgtgtgaaggatttcagctacaacttcggctggcagcacttagaactagtgaactgtaaatttggacagtttcctaccctgaagctgaaatccctcaagcggctcacattcacaagcaataagggtgggaacgccttttctgaggtggacctgccttctttagaattcctagacttatcaaggaacggcctgtcttttaaggggtgttgttctcaatcagatttcggaacaacatctctcaagtatctcgaccttagctttaatggggtcattacaatgtcctcaaactttctcggcctagaacaattggaacatctggatttccaacattcaaacttaaagcagatgtcagagttttccgtgttcctttctctgcgcaatctgatatacctggacatcagccatacccacacacgggtggcattcaacgggattttcaatggactgtcttcattagaggtgcttaaaatggctgggaacagcttccaggagaactttttgcctgacatctttaccgagctcaggaatctgacatttcttgacctgagccagtgccaattggaacagttgtcacctactgccttcaatagtttgtcttcactccaggtgctgaacatgtctcataataattttttttccttagatactttcccgtataaatgcttaaacagcctccaggttctggactactcactgaatcatataatgacctcgaaaaaacaggagctgcagcacttccctagctcgctggccttccttaacttgactcaaaacgattttgcttgtacatgtgagcaccaaagcttccttcaatggatcaaggatcaaaggcaacttctcgttgaggtagagcgcatggagtgtgcaacgccatcggataagcagggaatgccggtgttaagtctaaatattacttgccagatgaacaagacaattattggggtgtctgtactaagcgtcttagtggtctctgtcgtggccgtcctggtatacaaattctatttccacctgatgctgctcgcaggatgtatcaaatatggtcggggggagaatatctacgatgcttttgttatctatagtagccaggacgaagactgggttagaaatgaattggtcaagaacctggaagaaggtgtgcctccctttcagttgtgtctgcattatagggactttattcctggggtagcgattgccgccaatataatccacgagggatttcacaagtctaggaaagtgatagttgtggttagtcagcatttcatccagtcaaggtggtgcatcttcgagtacgagatcgcacagacttggcagtttctgagtagtcgggccgggattatcttcattgtcttgcagaaagtcgagaagaccttactccgccagcaggtagagctctatcgtcttctgtctaggaatacctacttggaatgggaagactccgtcttgggtaggcacatattttggcgtagactgaggaaagctctcctcgatgggaagtcttggaatccggaaggcactgtggggactgggtgcaactggcaggaagcgacttccatctag

SEQ ID NO: 136899 - DNA, 2400 bp, Artificial Sequence
  derived and/or modified sequence
atggagctgaacttctacaagatcccagacaacctgcccttcagcaccaagaacctggacctgtccttcaaccccctgcggcacctgggcagctacagcttcttctccttccctgagctgcaggtgctggacctgagccgctgtgagatccagaccattgaagatggagcctaccagagcctgagccacctgagcaccctcatcctgaccggcaaccccatccagagcctggccctgggcgccttcagcggcctgagcagcctgcagaagctggtggccgtggagaccaacctggccagcctggagaacttccccatcggccacctgaagaccctgaaggagctgaatgtggcccacaacctgatccagagcttcaagctgcctgagtacttcagcaacctgaccaacctggagcacctggacctgagcagcaacaagatccagagcatctactgcacagacctgcgggtgctgcaccagatgcccctgctgaacctgagcctggacctgagcctgaaccccatgaacttcatccagcccggggccttcaaggagatccggctgcacaagctgaccctgaggaacaactttgacagcctgaatgtgatgaagacctgcatccagggcctggccggcctggaggtgcaccggctggtgctgggggagttcagaaatgaaggcaacctggagaagtttgacaagagcgccctggagggcctgtgcaacctgaccatcgaggagttccggctggcctacctggactactacctggatgacatcatcgacctcttcaactgcctgaccaacgtgagcagcttcagcctggtgtctgtgaccatcgagcgggtgaaggacttctcctacaactttggctggcagcacctggagctggtgaactgcaagtttggccagttccccaccctgaagctgaagagcctgaagaggctgaccttcaccagcaacaagggcggcaatgccttcagcgaggtggacctgcccagcctggagttcctggacctgagcagaaatggcctgtccttcaagggctgctgcagccagagcgactttggcaccaccagcctgaagtacctggacctgtccttcaatggagtcatcaccatgagcagcaacttcctgggcctggagcagctggagcacctggacttccagcacagcaacctgaagcagatgtctgagttctctgtgttcctgagcctgaggaacctgatctacctggacatcagccacacccacaccagggtggccttcaacggcatcttcaacggcctgagcagcctggaggtgctgaagatggccggcaacagcttccaggagaacttcctgcctgacatcttcacagagctgaggaacctgaccttcctggacctgagccagtgccagctggagcagctgagccccacagccttcaacagcctgagcagcctgcaggtgctgaacatgagccacaacaacttcttcagcctggacaccttcccctacaagtgcctgaacagcctgcaggtgctggactacagcctgaaccacatcatgaccagcaagaagcaggagctgcagcacttccccagcagcctggccttcctgaacctgacccagaatgactttgcctgcacctgtgagcaccagagcttcctgcagtggatcaaggaccagaggcagctgctggtggaggtggagaggatggagtgtgccacccccagcgacaagcagggcatgcctgtgctgagcctgaacatcacctgccagatgaacaagaccatcatcggcgtgtctgtgctgtctgtgctggtggtgtctgtggtggccgtgctggtgtacaagttctacttccacctgatgctgctggccggctgcatcaagtatggaagaggagagaacatctatgatgcctttgtgatctacagcagccaggatgaggactgggtgagaaatgagctggtgaagaacctggaggagggcgtgccccccttccagctgtgcctgcactacagagacttcatccctggggtggccatcgccgccaacatcatccacgagggcttccacaagagcaggaaggtgattgtggtggtgtcccagcacttcatccagagccgctggtgcatctttgaatatgaaattgcccagacctggcagttcctgagcagccgggccggcatcatcttcatcgtgctgcagaaggtggagaagaccctgctgcggcagcaggtggagctgtaccgcctgctgagcaggaacacctacctggagtgggaggacagcgtgctgggccgccacatcttctggaggcggctgaggaaggccctgctggatggcaagtcctggaaccctgagggcaccgtgggcaccggctgcaactggcaggaggccaccagcatctag

SEQ ID NO: 136900 - DNA, 2400 bp, Artificial Sequence
  derived and/or modified sequence
atggagctgaacttctacaagatccccgacaacctgcccttcagcactaaaaatctcgacctatctttcaaccctctcaggcatctgggcagctattctttcttcagttttccagagttacaggtcctggaccttagtagatgcgagattcagacgatagaagatggtgcatatcagtctctgagccacctgtcaacactgatactcacaggcaatccaatccagtccttggccctgggagccttctccggtctatcctctctccaaaagctggtggcggtggagactaacctggcttcactggaaaacttcccaattggccatcttaaaacattaaaagaactgaatgtcgcacacaacctgatccaatccttcaagcttccagaatactttagtaacttgacgaatttagaacacctggacctgagctcgaacaaaatacagtcaatttactgcaccgacttaagggttctgcatcagatgcccctactaaatttgtccctggacctatctctcaatccaatgaatttcatccaacccggggccttcaaggaaatccgtttgcacaagttaacccttaggaacaactttgatagccttaatgtgatgaagacctgtattcaaggactagcgggattggaagtccaccgactggttcttggggagttccggaatgagggcaacctcgagaagtttgataagtccgctttagagggcctctgcaacttgaccattgaggaattccggctggcctacctcgattattacctggatgacattattgacctgtttaattgcttgaccaacgtttcgtcctttagcctcgtaagtgtcacaattgagagggtcaaagactttagctataactttggctggcagcatcttgaactggtgaattgcaaatttggacagttcccaacactgaaacttaaaagtcttaagagattgacctttacgtccaataaagggggaaacgccttctccgaggtggacctgcccagcctggagtttttggatttgtcaaggaacgggctgtcattcaaagggtgttgctctcagagtgatttcgggaccacgtccctgaaatacctcgatctgtccttcaacggggtcataacgatgtcgtcaaactttttgggtttagaacagttggagcatctggatttccagcacagtaatcttaagcaaatgagcgagttcagcgtgttcctttctcttcgcaacctcatctacctggacatcagtcatacccacactcgagtcgcatttaacgggatcttcaacggactttcatccttggaggtgctaaagatggcaggcaattcttttcaggagaatttcctgcctgacatcttcactgagctcagaaacttgacattcctggatttgtcgcagtgtcaactggaacagctgagccctaccgcatttaattccctgtcgtccttacaggtacttaacatgagtcacaacaactttttctctcttgatacatttccctacaaatgcctcaattccctgcaggtgctggattactcactcaaccacattatgacatctaaaaaacaagagctccagcacttcccttcctctctggccttcctgaatctcacacaaaacgacttcgcatgcacttgcgagcatcagagttttctccagtggattaaggaccaaagacagctgcttgttgaagtggagcgtatggagtgcgcgaccccatcagacaagcaaggcatgcccgttctcagtctaaacattacgtgtcagatgaacaagactattataggagtctctgtgctcagcgtgctagttgtgagtgtggtagccgtattagtgtacaaattttactttcacttgatgctactagccggctgcattaaatatggcaggggcgagaatatctacgatgcatttgttatctattcctcgcaagatgaggattgggttcggaacgagctggttaagaatctggaagagggagtccctccattccaattgtgcctccattatagggacttcataccaggggtggccattgcagctaacattatacatgagggctttcataagagtcgaaaagtcatcgtcgttgtttcccaacactttatccagtcgagatggtgtattttcgaatatgagattgcccaaacgtggcaattcctttcttcccgagccgggatcatttttattgtccttcagaaagtcgagaagactctcctcagacagcaagtcgaactttataggcttttgtcccggaatacatatttggagtgggaggactccgtactcggtagacacattttctggcggcggctccggaaggcactgttggatggaaagtcctggaacccggaagggactgtaggaaccgggtgtaactggcaagaggctaccagcatttag

SEQ ID NO: 136901 - DNA, 2400 bp, Artificial Sequence
  derived and/or modified sequence
atggaattaaatttctacaaaatccccgataacctgcccttcagcacaaaaaatctcgacctgagttttaaccctctacgccatctgggttcctacagtttctttagctttcccgaacttcaggtcctcgacctcagtagatgtgaaatacagacgatcgaggatggagcctaccaaagcctgagccatctgtcaacactgatccttaccggcaatccgatccagtccctggcactgggcgctttttctggtctcagcagcctgcagaaattagtcgcagttgaaaccaatttggcatcactggagaattttccgatcggccacctaaagactcttaaagaactgaacgtcgcccacaacctcattcagagctttaagctcccagaatacttttccaacttaacgaacctcgagcacctggaccttagcagcaataagattcaatcaatttactgtaccgatctaagggtactgcaccagatgccactgttaaacctgtcccttgatctatccctcaatccaatgaactttattcagcctggagcctttaaggagatccggctgcataagttgacattacgtaacaatttcgattctttaaacgtgatgaaaacctgcattcaaggattggctggactggaagtgcatagactagtactgggggaatttcgaaatgagggtaatctcgagaagttcgacaaaagcgccctcgaggggctctgtaatctcacgatcgaggaattccggctcgcctatttagattactatctggatgacatcatcgatctgttcaactgcctgactaatgtgtccagtttttccttggtaagtgtgacaattgagcgggtcaaggacttcagctacaatttcggatggcagcatctcgagttggtgaactgcaagttcggacagtttcctacgctcaaattgaaatctctcaagaggttgacatttaccagtaacaaggggggtaacgccttctccgaggttgaccttccatctctggagtttctcgatctttctagaaacggtctgtcatttaagggctgttgtagccagtccgacttcggaaccacgagtttgaaatatcttgatctctcttttaatggcgtcattactatgagttctaatttcttgggactggagcagctggaacatctcgactttcagcacagtaatctgaaacagatgtccgaattttcagtgttcctgtcacttagaaatttgatttacctcgatatatctcacacccacacaagggtcgctttcaatggaatatttaacggcctttcttccctcgaggtccttaaaatggcgggtaattccttccaggaaaatttcctccctgatatcttcactgaactgcggaacctcaccttcctcgatttgtcacagtgtcagctcgaacagttatctcccacggctttcaacagtttgagtagcctgcaggtactgaatatgagtcataataacttcttctcactggatactttcccctacaagtgcctgaattcccttcaagtgttagactacagcctcaaccacatcatgaccagtaagaagcaggagctgcagcatttcccatcctcactcgcctttcttaatctaacccagaatgacttcgcctgtacttgtgagcatcagtccttcctacagtggatcaaagaccaacgacaactgcttgttgaggtggaaagaatggagtgtgccaccccgagtgacaaacagggcatgcctgtccttagccttaacattacatgccaaatgaataagacgattatcggggtcagtgtactctccgtacttgtggtctctgtggtcgcagtcctggtgtataagttttactttcatctgatgctgctcgccggatgcataaaatatggtagaggcgagaatatctacgacgctttcgtgatctacagttcacaagatgaggattgggtacggaacgagttggtgaagaatctggaagagggggtcccgcctttccagctttgcctacactaccgtgatttcattcccggtgtcgcaatcgctgctaacattatccatgagggctttcataagtcacgcaaggtgatcgtcgtggtttcccagcacttcattcagagccgttggtgcattttcgagtacgaaattgcccaaacctggcagttcttgtcatctagggccggtatcattttcatagtgctccagaaggtggaaaaaacactcttgcgacagcaggtcgagctataccgtttgctcagccgaaatacctatctcgaatgggaagactcagtcttaggtagacacatcttctggagacgactgaggaaagcactgctggatgggaagtcatggaacccagagggaaccgtgggtacaggctgcaactggcaagaagcaaccagtatttag

SEQ ID NO: 136902 - protein, 385 aa, Artificial Sequence
  derived and/or modified sequence
MSKPAGSTSRILDIPCKVCGDRSSGKHYGVYACDGCSGFFKRSIRRNRTYVCKSGNQGGCPVDKTHRNQCRACRLKKCLEVNMNKDAVQHERGPRTSTIRKQVALYFRGHKEENGAAAHFPSAALPAPAFFTAVTQLEPHGLELAAVSTTPERQTLVSLAQPTPKYPHEVNGTPMYLYEVATESVCESAARLLFMSIKWAKSVPAFSTLSLQDQLMLLEDAWRELFVLGIAQWAIPVDANTLLAVSGMNGDNTDSQKLNKIISEIQALQEVVARFRQLRLDATEFACLKCIVTFKAVPTHSGSELRSFRNAAAIAALQDEAQLTLNSYIHTRYPTQPCRFGKLLLLLPALRSISPSTIEEVFFKKTIGNVPITRLLSDMYKSSDI

SEQ ID NO: 136903 - DNA, 3271 bp, Artificial Sequence
  derived and/or modified sequence
agggacgccctattcccctccccgcggctgcctgtcagagcgcttctggagatattacaggggacccagcccgcagcgacaggcacaaagtcacggggtaatgaacttcggggacccttcgccgctgcgtgcgcggctctccccggaaacccggacctggccgcctcttccctcggaagatttcccagcaatctagttttcccactctgcgcttgggttccggcagcgcggagcccgtctgcctctgagactgcggtagtgttttccttctttccttgggagaccagcggtcggcagagattgcccacactctgcatgcctatgtagagggagagatcgaagactgagtgacaggaatggggaaaaagagggatttcgctccgtaggaaggccattttcgtgtctccatctctgtctttcaacatccctctcttgctgttcttccttcttcctcagtcttcctgtccatctctccatctgtctgtccatgtgtgtgtccatatcaagcagcattcccagcagctgcggttttgcaagagccgggaagaaacttaaggatgcttaaatttccactgttggacgaattctgagcgcccagggagcagcgcagcgcgcgactgacacccacctgtcccgcccaggagccttgcaggctggagggcagctggagagcggcggcgcccggcggcgaggcgggcgctgccggccgggactcgggcagcgcccaccaaccgctccgccccgggacagccagcatgagcaagccagccggatcaacaagccgcattttagatatcccctgcaaagtgtgtggcgaccgcagctcggggaagcactacggggtctacgcctgcgacggctgctcaggttttttcaaacggagcatccgaaggaataggacctatgtctgcaaatctggaaaccagggaggctgtccggtggacaagacgcacagaaaccagtgcagggcgtgtcggctgaagaagtgtttggaagtcaacatgaacaaagacgccgtgcagcacgagcgggggcctcggacgtccaccatccgcaagcaagtggccctctacttccgtggacacaaggaggagaacggggccgccgcgcactttccctcggcggcgctccctgcgccggccttcttcaccgcggtcacgcagctggagccgcacggcctggagctggccgcggtgtccaccactccagagcggcagaccctcgtgagcctggctcagcccacgcccaagtacccccatgaagtgaatgggaccccaatgtatctctatgaagtggccacggagtcggtgtgtgaatcagctgccagacttctcttcatgagcatcaagtgggctaagagtgtgccagccttctccacgctgtctttgcaagaccagctgatgcttttggaagatgcttggagagaactgtttgttctaggaatagcacaatgggccattccggttgatgctaacactctactggctgtatctggcatgaacggtgacaacacagattcccagaagctgaacaagatcatatctgaaatacaggctttacaagaggtggtggctcgatttagacaactccggttagatgctactgaatttgcctgtctaaaatgcatcgtcactttcaaagccgttcctacacatagtggttctgaactgagaagtttccggaatgctgccgccattgcagcccttcaagatgaggctcagctaacgctcaacagctacatccataccagatatcccactcaaccctgtcgctttggaaaactcctgttgcttttgccagctttacgttctattagcccatcaactatagaagaagtgtttttcaaaaaaaccatcggcaatgtgccaattacaagactgctttcagatatgtacaaatccagtgatatctaagctcacaagatacccacttttcaggatgggacagtatcagatgaacttcaacccatggagaacaagcctcaactaacaaacccttcaggaagcatataccggggaatgtgtagccttcaggaaaaaaatgccaattgacacaaagcattccagtagctatgacctgccgccctgaccaggatagggcgggtgggaaggagaggggtgcaacaggaccgcctgcactgaaaactcactgctgccatgccctgggagggggcaaactgggggttgccacaggccgtgccattctgcctcttacctggaagatcaggctgaacgatcaaaagctgaaacataagtagtgctttctcttcctttttagcatacaaagtttggtaaccaaatatagctctgtgtataacatcgtactgcggccttcaaaactacgttatgttggagcatttattttaaaaataatggtaggttttaaattaaaagtgttatcaaaagtttcccctctattgtaatacattattaagtggccttcagaactgagttaataagtgaaaagtagcttatgccatgtgatttgctttttctctatcttcttttttcttttctttctctttcttttgttctttcttcttcttttttaataccataggccaggcaaccttgtcaaaggaattgatggacaaaatgagattctcaccaggacttcaggttggataacatgtcaaaaagagaagagctttactaaaagaacataagtcaagggaggatgaataaaaacagcaaaaccaaataaagtggagatgagtgattgagtgaggtagattgctgtcccgttaacatagtgctgaaaccaaaggcagtgggggtccaaactcgtggtgcagcaagtcacaccagacaggaaacgaatatggacgtaattgcagaaggaacttcaaggagatgaatgaatgctaaaagggttcttgactgatccattgctaacagcctgagactcttcaatgcctttccgaaaactggtttctagtaaagccttgaatgaacacacacacacacacacacacacacacacacacacacacacacacacaccgtcctacactttaagctgctcctttggtatgactctatacttatggaaatgtagaaacaaacatttttaaatagctgctgtacttttcacattttgatttattaggtactagcactgaggaaaaaaaattcagcacttggactatcataggatgagtaaaacttttcttgtacaaagtgaattaactgatttgtgaagttaaaaggttgtactcattgtatttacaaagaataaaaatatattgaatttaaatgaaaaaaaaaaaaaa

SEQ ID NO: 136904 - DNA, 1158 bp, Artificial Sequence
  derived and/or modified sequence
atgtctaagcctgcaggctctacctcgaggattctggacatcccatgtaaggtctgcggggaccgctcatccgggaagcactatggagtgtatgcctgcgatggctgcagtgggttcttcaagcgctcaatcaggagaaaccgcacctacgtgtgtaaatccggtaaccaaggagggtgcccggtggataaaacacatcgcaaccagtgtagggcatgcagacttaaaaaatgccttgaggtgaacatgaacaaagatgcagtgcaacatgagcggggcccacgaacctctaccatccgtaagcaagtcgctctttacttccggggccacaaagaggaaaacggcgccgctgcacatttcccttccgccgccctgcctgcccccgcgttctttacagcggtaacacaattggaacctcatggactggaacttgcagctgtgagcactaccccagagcgccagaccctggtgtctctggcccaacccacccctaagtacccacacgaggtgaatgggacccctatgtacctgtacgaggtggccaccgagagcgtctgcgagtcggcggctagactcctttttatgtccataaagtgggctaagtcagttccagcattctccactctgagcttgcaggaccagttgatgttgttggaagacgcctggcgagaactgtttgttctaggcattgcccaatgggctattccagtggacgccaacactctcctggcagtcagcgggatgaacggagataacacagattcacagaaactgaataagatcatcagcgaaatccaggccttgcaggaagttgtggcgagatttagacagttgagactggatgcaactgagttcgcctgtttaaaatgcattgtgacgtttaaggcagtgcctacgcacagtgggtcagagctgaggtcctttcgaaatgctgcagccatcgccgccctgcaggatgaggcccagctgacactgaattcttacatccacaccaggtatcccactcaaccctgccgattcggtaagttattgctactcctaccagccctaaggagtattagccctagcaccatcgaggaagtcttttttaagaagaccattggcaatgttcctattacacgcttgctgtctgacatgtacaaaagttctgatatatag

SEQ ID NO: 136905 - DNA, 1158 bp, Artificial Sequence
  derived and/or modified sequence
atgagcaagccagctggcagcaccagccgcatcctggacatcccctgcaaggtgtgtggggacaggagcagcggcaagcactacggcgtgtatgcctgtgatggctgcagcggcttcttcaagaggagcatcagaagaaacagaacctacgtgtgcaagagcggcaaccagggcggctgccctgtggacaagacccacaggaaccagtgccgggcctgccgcctgaagaagtgcctggaggtgaacatgaacaaggatgctgtgcagcacgagcggggccccaggaccagcaccatcaggaagcaggtggccctgtacttccggggccacaaggaggagaatggagctgctgcccacttccccagcgctgccctgcctgccccagccttcttcaccgctgtgacccagctggagccccacggcctggagctggccgctgtgtccaccaccccagagcggcagaccctggtgtccctggcccagcccacccccaagtacccccatgaggtgaatggcacccccatgtacctgtatgaggtggccacagagagcgtgtgtgagagcgctgcccggctgctcttcatgagcatcaagtgggccaagtctgtgcctgccttcagcaccctgagcctgcaggaccagctgatgctgctggaggatgcctggagggagctgtttgtgctgggcatcgcccagtgggccatccctgtggatgccaacaccctgctggccgtgtctggcatgaatggagacaacacagacagccagaagctgaacaagatcatcagcgagatccaggccctgcaggaggtggtggcccgcttccggcagctgcggctggatgccacagaatttgcctgcctgaagtgcatcgtgaccttcaaggctgtgcccacccacagcggcagcgagctgcgctccttcagaaatgctgctgccatcgccgccctgcaggatgaggcccagctgaccctgaacagctacatccacacccgctaccccacccagccctgccgctttgggaagctgctgctgctgctgcctgccctgcggagcatcagccccagcaccatcgaggaggtgttcttcaagaagaccatcggaaatgtgcccatcacccggctgctgagtgacatgtacaagagcagtgacatctag

SEQ ID NO: 136906 - DNA, 1158 bp, Artificial Sequence
  derived and/or modified sequence
atgagcaagcccgccggcagcaccagccggatcctggacatcccctgtaaggtatgcggagacagatccagtgggaagcactatggagtttatgcctgtgacggttgcagcggctttttcaaacgcagcattaggcgcaatcggacctacgtttgcaaatctggtaatcaaggcggatgtcctgttgacaagactcatcgcaaccagtgccgagcctgccggcttaagaagtgtcttgaagtgaacatgaataaagacgccgtacagcacgaacggggccccaggacctccactattagaaagcaggtagcactgtatttccggggccacaaggaggagaacggcgccgctgcacactttcctagtgcggcgctgcctgcccccgccttctttactgcagtgacccaactcgagccccacgggctggagctggccgccgtgtccaccacccccgaaagacagacattggtaagcctggcacagccaacacccaagtatccacatgaggttaatggaacaccaatgtatctctatgaggttgctactgagtctgtctgtgaaagtgcagcccgactactgttcatgtcaatcaaatgggccaaatccgtgcctgccttttcaactctttctctccaggaccagctgatgttgctggaggatgcttggagggagctcttcgtgctggggatagcacaatgggcaatccctgtggatgctaacacactgctggctgtctccggtatgaacggtgataacacggattcccagaagctgaacaaaatcatctccgagatacaggcactgcaagaagtggtggcacgatttcgtcaactgcgccttgacgccaccgaattcgcctgcctcaagtgcattgtcacttttaaggcagtgcccacacactccggatcagaactcagaagttttcgcaacgctgcagctattgccgcactccaagacgaggcacagctgaccttgaactcctatatccacacccggtatcctacccagccttgtagatttggcaaactgctgctcctcctacctgctcttagatccattagcccatcaacaatcgaggaggtgttctttaagaaaacaattggtaacgttcctatcactagattgctctccgatatgtacaagtcttccgacatctag

SEQ ID NO: 136907 - DNA, 3212 bp, Artificial Sequence
  derived and/or modified sequence
ggagatattacaggggacccagcccgcagcgacaggcacaaagtcacggggtaatgaacttcggggacccttcgccgctgcgtgcgcggctctccccggaaacccggacctggccgcctcttccctcggaagatttcccagcaatctagttttcccactctgcgcttgggttccggcagcgcggagcccgtctgcctctgagactgcggtagtgttttccttctttccttgggagaccagcggtcggcagagattgcccacactctgcatgcctatgtagagggagagatcgaagactgagtgacaggaatggggaaaaagagggatttcgctccgtaggaaggccattttcgtgtctccatctctgtctttcaacatccctctcttgctgttcttccttcttcctcagtcttcctgtccatctctccatctgtctgtccatgtgtgtgtccatatcaagcagcattcccagcagctgcggttttgcaagagccgggaagaaacttaaggatgcttaaatttccactgttggacgaattctgagcgcccagggagcagcgcagcgcgcgactgacacccacctgtcccgcccaggagccttgcaggctggagggcagctggagagcggcggcgcccggcggcgaggcgggcgctgccggccgggactcgggcagcgcccaccaaccgctccgccccgggacagccagcatgagcaagccagccggatcaacaagccgcattttagatatcccctgcaaagtgtgtggcgaccgcagctcggggaagcactacggggtctacgcctgcgacggctgctcaggttttttcaaacggagcatccgaaggaataggacctatgtctgcaaatctggaaaccagggaggctgtccggtggacaagacgcacagaaaccagtgcagggcgtgtcggctgaagaagtgtttggaagtcaacatgaacaaagacgccgtgcagcacgagcgggggcctcggacgtccaccatccgcaagcaagtggccctctacttccgtggacacaaggaggagaacggggccgccgcgcactttccctcggcggcgctccctgcgccggccttcttcaccgcggtcacgcagctggagccgcacggcctggagctggccgcggtgtccaccactccagagcggcagaccctcgtgagcctggctcagcccacgcccaagtacccccatgaagtgaatgggaccccaatgtatctctatgaagtggccacggagtcggtgtgtgaatcagctgccagacttctcttcatgagcatcaagtgggctaagagtgtgccagccttctccacgctgtctttgcaagaccagctgatgcttttggaagatgcttggagagaactgtttgttctaggaatagcacaatgggccattccggttgatgctaacactctactggctgtatctggcatgaacggtgacaacacagattcccagaagctgaacaagatcatatctgaaatacaggctttacaagaggtggtggctcgatttagacaactccggttagatgctactgaatttgcctgtctaaaatgcatcgtcactttcaaagccgttcctacacatagtggttctgaactgagaagtttccggaatgctgccgccattgcagcccttcaagatgaggctcagctaacgctcaacagctacatccataccagatatcccactcaaccctgtcgctttggaaaactcctgttgcttttgccagctttacgttctattagcccatcaactatagaagaagtgtttttcaaaaaaaccatcggcaatgtgccaattacaagactgctttcagatatgtacaaatccagtgatatctaagctcacaagatacccacttttcaggatgggacagtatcagatgaacttcaacccatggagaacaagcctcaactaacaaacccttcaggaagcatataccggggaatgtgtagccttcaggaaaaaaatgccaattgacacaaagcattccagtagctatgacctgccgccctgaccaggatagggcgggtgggaaggagaggggtgcaacaggaccgcctgcactgaaaactcactgctgccatgccctgggagggggcaaactgggggttgccacaggccgtgccattctgcctcttacctggaagatcaggctgaacgatcaaaagctgaaacataagtagtgctttctcttcctttttagcatacaaagtttggtaaccaaatatagctctgtgtataacatcgtactgcggccttcaaaactacgttatgttggagcatttattttaaaaataatggtaggttttaaattaaaagtgttatcaaaagtttcccctctattgtaatacattattaagtggccttcagaactgagttaataagtgaaaagtagcttatgccatgtgatttgctttttctctatcttcttttttcttttctttctctttcttttgttctttcttcttcttttttaataccataggccaggcaaccttgtcaaaggaattgatggacaaaatgagattctcaccaggacttcaggttggataacatgtcaaaaagagaagagctttactaaaagaacataagtcaagggaggatgaataaaaacagcaaaaccaaataaagtggagatgagtgattgagtgaggtagattgctgtcccgttaacatagtgctgaaaccaaaggcagtgggggtccaaactcgtggtgcagcaagtcacaccagacaggaaacgaatatggacgtaattgcagaaggaacttcaaggagatgaatgaatgctaaaagggttcttgactgatccattgctaacagcctgagactcttcaatgcctttccgaaaactggtttctagtaaagccttgaatgaacacacacacacacacacacacacacacacacacacacacacacacacaccgtcctacactttaagctgctcctttggtatgactctatacttatggaaatgtagaaacaaacatttttaaatagctgctgtacttttcacattttgatttattaggtactagcactgaggaaaaaaaattcagcacttggactatcataggatgagtaaaacttttcttgtacaaagtgaattaactgatttgtgaagttaaaaggttgtactcattgtatttacaaagaataaaaatatattgaatttaaatgaa

SEQ ID NO: 136908 - DNA, 1158 bp, Artificial Sequence
  derived and/or modified sequence
atgagtaaaccggctggaagcactagccggatcctggacattccctgcaaggtctgcggcgacagatcaagcggcaagcactatggcgtgtacgcttgcgacggctgttccgggttttttaaaaggagtatccggaggaatcgaacgtatgtgtgcaagtctggcaaccaaggtggctgcccggtggataaaacccacaggaatcagtgtcgagcgtgccgcctaaaaaagtgcttggaagtaaacatgaacaaggatgcagtacagcatgaaaggggtccccgaaccagcacaatccgcaagcaggtggctctgtatttccgaggtcataaggaagaaaatggggctgcggcacatttcccatccgctgctctgcccgcaccggctttctttactgccgttacacagctcgaaccgcacggactggaactggctgccgtgtccacaacccctgagagacaaacactggtaagcctcgcacagcccaccccaaagtatccacatgaagtgaacggtactcctatgtatttatatgaagtggccaccgagagcgtgtgtgagagcgccgcaagattattatttatgtcaatcaagtgggccaaaagcgttcctgcatttagcacacttagtctgcaagatcagctgatgttactggaagacgcctggagagagctattcgttctcggaatcgctcagtgggcgatacccgtagatgctaacacgctgctggccgtaagcggtatgaacggggacaacacagactcacagaaactgaacaagattatttccgagatccaggccttacaggaggtggttgccaggttcagacaactccggctggacgcaactgaatttgcctgcttgaagtgcatcgtgacattcaaggccgttcctacccactcaggatctgagttgcggagcttcagaaatgccgcagctattgccgcactgcaagacgaggcgcagctcaccctcaatagctacatccacacacggtaccctacccagccatgccggttcggtaagctcttactgctgctgccagccctgaggagcattagcccctccaccatcgaggaggtctttttcaaaaagacaatcgggaacgtgcctatcactaggctcctgtctgacatgtacaaaagctctgatatttag

SEQ ID NO: 136909 - DNA, 1158 bp, Artificial Sequence
  derived and/or modified sequence
atgagcaagcccgccggcagcaccagcagaatcctggacatcccctgcaaggtgtgcggcgacagaagcagcggcaagcactacggcgtgtacgcctgcgacggctgcagcggcttcttcaagagaagcatcagaagaaacagaacctacgtgtgcaagagcggcaaccagggcggctgccccgtggacaagacccacagaaaccagtgcagagcctgcagactgaagaagtgcctggaggtgaacatgaacaaggacgccgtgcagcacgagagaggccccagaaccagcaccatcagaaagcaggtggccctgtacttcagaggccacaaggaggagaacggcgccgccgcccacttccccagcgccgccctgcccgcccccgccttcttcaccgccgtgacccagctggagccccacggcctggagctggccgccgtgagcaccacccccgagagacagaccctggtgagcctggcccagcccacccccaagtacccccacgaggtgaacggcacccccatgtacctgtacgaggtggccaccgagagcgtgtgcgagagcgccgccagactgctgttcatgagcatcaagtgggccaagagcgtgcccgccttcagcaccctgagcctgcaggaccagctgatgctgctggaggacgcctggagagagctgttcgtgctgggcatcgcccagtgggccatccccgtggacgccaacaccctgctggccgtgagcggcatgaacggcgacaacaccgacagccagaagctgaacaagatcatcagcgagatccaggccctgcaggaggtggtggccagattcagacagctgagactggacgccaccgagttcgcctgcctgaagtgcatcgtgaccttcaaggccgtgcccacccacagcggcagcgagctgagaagcttcagaaacgccgccgccatcgccgccctgcaggacgaggcccagctgaccctgaacagctacatccacaccagataccccacccagccctgcagattcggcaagctgctgctgctgctgcccgccctgagaagcatcagccccagcaccatcgaggaggtgttcttcaagaagaccatcggcaacgtgcccatcaccagactgctgagcgacatgtacaagagcagcgacatctag

SEQ ID NO: 136910 - protein, 245 aa, Artificial Sequence
  derived and/or modified sequence
MASPSRRLQTKPVITCFKSVLLIYTFIFWITGVILLAVGIWGKVSLENYFSLLNEKATNVPFVLIATGTVIILLGTFGCFATCRASAWMLKLYAMFLTLVFLVELVAAIVGFVFRHEIKNSFKNNYEKALKQYNSTGDYRSHAVDKIQNTLHCCGVTDYRDWTDTNYYSEKGFPKSCCKLEDCTPQRDADKVNNEGCFIKVMTIIESEMGVVAGISFGVACFQLIGIFLAYCLSRAITNNQYEIV

SEQ ID NO: 136911 - protein, 227 aa, Artificial Sequence
  derived and/or modified sequence
MASPSRRLQTKPVITCFKSVLLIYTFIFWITGVILLAVGIWGKVSLENYFSLLNEKATFGCFATCRASAWMLKLYAMFLTLVFLVELVAAIVGFVFRHEIKNSFKNNYEKALKQYNSTGDYRSHAVDKIQNTLHCCGVTDYRDWTDTNYYSEKGFPKSCCKLEDCTPQRDADKVNNEGCFIKVMTIIESEMGVVAGISFGVACFQLIGIFLAYCLSRAITNNQYEIV

SEQ ID NO: 136912 - DNA, 738 bp, Artificial Sequence
  derived and/or modified sequence
atggccagccccagcagaagactgcagaccaagcccgtgatcacctgcttcaagagcgtgctgctgatctacaccttcatcttctggatcaccggcgtgatcctgctggccgtgggcatctggggcaaggtgagcctggagaactacttcagcctgctgaacgagaaggccaccaacgtgcccttcgtgctgatcgccaccggcaccgtgatcatcctgctgggcaccttcggctgcttcgccacctgcagagccagcgcctggatgctgaagctgtacgccatgttcctgaccctggtgttcctggtggagctggtggccgccatcgtgggcttcgtgttcagacacgagatcaagaacagcttcaagaacaactacgagaaggccctgaagcagtacaacagcaccggcgactacagaagccacgccgtggacaagatccagaacaccctgcactgctgcggcgtgaccgactacagagactggaccgacaccaactactacagcgagaagggcttccccaagagctgctgcaagctggaggactgcaccccccagagagacgccgacaaggtgaacaacgagggctgcttcatcaaggtgatgaccatcatcgagagcgagatgggcgtggtggccggcatcagcttcggcgtggcctgcttccagctgatcggcatcttcctggcctactgcctgagcagagccatcaccaacaaccagtacgagatcgtgtag

SEQ ID NO: 136913 - DNA, 684 bp, Artificial Sequence
  derived and/or modified sequence
atggccagccccagcagaagactgcagaccaagcccgtgatcacctgcttcaagagcgtgctgctgatctacaccttcatcttctggatcaccggcgtgatcctgctggccgtgggcatctggggcaaggtgagcctggagaactacttcagcctgctgaacgagaaggccaccttcggctgcttcgccacctgcagagccagcgcctggatgctgaagctgtacgccatgttcctgaccctggtgttcctggtggagctggtggccgccatcgtgggcttcgtgttcagacacgagatcaagaacagcttcaagaacaactacgagaaggccctgaagcagtacaacagcaccggcgactacagaagccacgccgtggacaagatccagaacaccctgcactgctgcggcgtgaccgactacagagactggaccgacaccaactactacagcgagaagggcttccccaagagctgctgcaagctggaggactgcaccccccagagagacgccgacaaggtgaacaacgagggctgcttcatcaaggtgatgaccatcatcgagagcgagatgggcgtggtggccggcatcagcttcggcgtggcctgcttccagctgatcggcatcttcctggcctactgcctgagcagagccatcaccaacaaccagtacgagatcgtgtag

SEQ ID NO: 136914 - DNA, 738 bp, Artificial Sequence
  derived and/or modified sequence
atggcctctccctcacgcaggctccagacaaagcctgtgataacatgctttaaatctgtgctactcatctacactttcatattctggatcactggggtcatcctcctcgctgtcggcatatggggtaaggtgtccctggaaaactacttttccctcctgaatgaaaaagccaccaatgtgccattcgtgctaatagctaccgggacggtgatcatcttgctcgggaccttcggctgtttcgcaacatgtcgcgcttctgcgtggatgctcaaactgtacgccatgtttttgacactggtctttctggtcgagctagtcgccgccattgttggctttgtctttcggcacgagatcaagaacagcttcaagaataattacgaaaaagctctgaagcagtacaattccacgggcgattataggagccacgccgtggacaagattcaaaacacacttcattgttgtggggtgactgactatcgagactggacggacacaaactattactccgagaagggttttcccaaaagttgctgtaaactcgaggactgcacaccccaacgggatgcagataaagtaaataatgaggggtgtttcattaaagtaatgactatcatagaatccgaaatgggagttgtagccggcatctcctttggtgtcgcttgcttccagttaatcggtatattcctggcctactgcctgagcagggcgatcacaaataaccagtacgagattgtctag

SEQ ID NO: 136915 - DNA, 684 bp, Artificial Sequence
  derived and/or modified sequence
atggcatccccctccaggagactgcagacgaagcccgttatcacgtgcttcaagtcagttctgctgatctacacatttatattctggatcacgggggtgatccttctggcagttgggatctgggggaaagtgtccctggagaattatttcagccttttgaacgagaaagccacatttggatgtttcgccacttgcagggcatctgcttggatgttgaagttatacgctatgttccttacactcgtctttctcgtcgaactggtggcggccatcgtgggtttcgtattccgtcacgaaattaaaaacagctttaaaaataactacgaaaaggccttgaagcagtataactctactggagactaccgctcccacgccgttgataagattcagaataccctgcattgctgtggagttacagattaccgggactggactgacaccaattactatagtgagaaagggtttcccaagtcctgctgcaagctcgaggattgcactccccagagggacgcagacaaggtcaataacgagggttgtttcataaaggtcatgaccatcatcgaatctgagatgggtgtcgtggccggtatcagttttggcgtggcatgcttccagctaattggcattttcctcgcttactgtttgagtagagcaattacgaataaccagtatgagatcgtctag

SEQ ID NO: 136916 - DNA, 738 bp, Artificial Sequence
  derived and/or modified sequence
atggccagccccagccggcggctgcagaccaagcctgtgatcacctgcttcaagtctgtgctgctgatctacaccttcatcttctggatcactggagtcatcctgctggccgtgggcatctggggcaaggtgtccctggagaactacttcagcctgctgaatgagaaggccaccaacgtgccctttgtgctgattgccactggaacagtcatcatcctgctgggcaccttcggctgctttgccacctgccgggccagcgcctggatgctgaagctgtatgccatgttcctgaccctggtgttcctggtggagctggtggccgccatcgtgggctttgtgttcagacatgagatcaagaacagcttcaagaacaactatgagaaggccctgaagcagtacaacagcactggagactaccgcagccatgctgtggacaagatccagaacaccctgcactgctgcggcgtgacagactacagagactggacagacaccaactactacagcgagaagggcttccccaagagctgctgcaagctggaggactgcaccccccagagagatgctgacaaggtgaacaatgaaggctgcttcatcaaggtgatgaccatcattgaaagtgagatgggcgtggtggccggcatcagctttggagtggcctgcttccagctgattggcatcttcctggcctactgcctgagccgggccatcaccaacaaccagtatgagatcgtgtag

SEQ ID NO: 136917 - DNA, 684 bp, Artificial Sequence
  derived and/or modified sequence
atggccagccccagccggcggctgcagaccaagcctgtgatcacctgcttcaagtctgtgctgctgatctacaccttcatcttctggatcactggagtcatcctgctggccgtgggcatctggggcaaggtgtccctggagaactacttcagcctgctgaatgagaaggccaccttcggctgctttgccacctgccgggccagcgcctggatgctgaagctgtatgccatgttcctgaccctggtgttcctggtggagctggtggccgccatcgtgggctttgtgttcagacatgagatcaagaacagcttcaagaacaactatgagaaggccctgaagcagtacaacagcactggagactaccgcagccatgctgtggacaagatccagaacaccctgcactgctgcggcgtgacagactacagagactggacagacaccaactactacagcgagaagggcttccccaagagctgctgcaagctggaggactgcaccccccagagagatgctgacaaggtgaacaatgaaggctgcttcatcaaggtgatgaccatcattgaaagtgagatgggcgtggtggccggcatcagctttggagtggcctgcttccagctgattggcatcttcctggcctactgcctgagccgggccatcaccaacaaccagtatgagatcgtgtag

SEQ ID NO: 136918 - DNA, 738 bp, Artificial Sequence
  derived and/or modified sequence
atggccagccccagccggcggctgcagaccaagcccgtgatcacctgctttaaatcagtgctactcatctacacatttatcttctggattaccggtgtgatcctactcgccgtcggtatctgggggaaggtgtccttggagaattacttttctctcctgaatgaaaaggcaacaaatgtgccgttcgttctcatcgccacagggaccgttatcatcctgttgggcactttcggatgtttcgctacctgccgtgcatctgcttggatgttgaagctctacgcgatgttcttgacgctcgttttcctggtcgaacttgttgcagcaattgtgggttttgttttccgccacgaaatcaagaattccttcaagaataattacgaaaaggctctgaagcaatataacagtaccggtgattatcggagtcacgcggtcgataagattcagaataccttgcactgctgtggagtcacggactacagggattggaccgacaccaattattattctgagaaagggttcccaaaatcatgttgcaaactagaagactgcactcctcagagggatgctgacaaggtcaataacgaaggctgctttatcaaggtgatgaccatcatcgagtctgaaatgggagttgtggctgggatctcctttggcgttgcctgcttccaactgatcggaatattcctggcctattgtctttcaagggcaattaccaataaccagtacgagatagtgtag

SEQ ID NO: 136919 - DNA, 684 bp, Artificial Sequence
  derived and/or modified sequence
atggccagccccagccggcggctgcagaccaagcccgtgatcacctgtttcaaaagcgtgcttctgatctacacatttattttctggatcactggggtcattctgttggcggtcggtatttggggcaaagtgagcctagaaaactacttttcactgctgaacgagaaggcaactttcggttgtttcgccacttgtagagcctccgcttggatgttaaaactctacgcaatgttcctaacccttgtctttctagtcgagcttgtcgctgccattgtaggtttcgtattcagacatgagatcaaaaattcttttaaaaataactatgaaaaggccctgaagcagtacaattcaactggcgactatcgctctcacgccgtagataaaatacagaatacactgcactgctgtggtgtaaccgattaccgcgattggaccgatactaattactatagtgaaaaaggatttccgaagtcctgctgtaaactggaagactgtactccgcagagggacgccgacaaagtgaacaatgaggggtgttttatcaaggtcatgaccatcattgagtctgaaatgggagtggttgcaggaatttctttcggcgtggcttgcttccagctcattggaatatttctagcttactgtctttctcgggctatcaccaataaccaatacgaaatcgtttag

SEQ ID NO: 136920 - DNA, 738 bp, Artificial Sequence
  derived and/or modified sequence
atggcctcaccatctcgcaggctccagaccaagccggtaatcacatgtttcaagtcagtgcttttgatatatacttttatcttttggattaccggcgtgatcctattagccgtgggaatctgggggaaagtgtccctagaaaattacttcagtctcctgaatgaaaaagcaaccaacgtgccttttgttttgatagctacgggcaccgtaataatcctccttgggacattcggttgcttcgcaacgtgtcgggcatcagcttggatgctgaagctgtacgccatgtttctcacactggtgtttcttgtggagctggtcgccgctatagtaggcttcgttttccggcacgagattaagaacagctttaagaacaactacgaaaaagctctcaaacagtataacagcacaggcgattatcgtagccatgccgtggacaagatccagaataccctgcattgttgtggggttaccgattaccgggactggacagataccaattactacagcgaaaaggggttccccaagagctgttgcaaacttgaggactgcactccccagcgggacgccgataaagttaataacgaaggttgctttattaaggtcatgacaatcattgaatctgagatgggagttgtggccggtatttcttttggcgttgcttgtttccagctgatagggatttttctcgcctactgtttatcccgcgctattaccaacaaccagtacgaaatcgtgtag

SEQ ID NO: 136921 - DNA, 684 bp, Artificial Sequence
  derived and/or modified sequence
atggcttccccctctcggagactgcagacaaaaccagtgattacttgttttaagagcgtgcttttaatttacactttcattttttggatcactggcgtgatcttgctcgctgtcgggatctggggtaaggtgagcctagaaaattactttagccttttaaacgaaaaagccacgtttgggtgtttcgcaacttgtcgcgcatcagcctggatgctcaagctgtatgcgatgttcctgactttagtttttctcgtggagctggttgctgctatcgtcgggtttgtatttcgacacgaaattaagaactcctttaaaaacaactatgagaaggccctgaagcagtataacagcacaggggattaccgctcacatgccgtggataagatacagaataccctccactgctgtggcgtaaccgactaccgtgattggactgatacaaactattattccgaaaagggctttcccaaatcgtgctgtaaattggaagattgcacgccacagcgggacgccgacaaagtgaataacgaagggtgcttcattaaagtaatgactatcattgagtcagagatgggggttgtggccggaatatctttcggggtcgcatgctttcagttgattggtatcttcctggcctattgtctgagccgcgctatcacgaacaatcaatacgagatcgtctag

SEQ ID NO: 136922 - DNA, 2206 bp, Artificial Sequence
  derived and/or modified sequence
agttgtggacgctcgtaagttttcggcagtttccggggagactcggggactccgcgtctcgctctctgtgttccaatcgcccggtgcggtggtgcagggtctcgggctagtcatggcgtccccgtctcggagactgcagactaaaccagtcattacttgtttcaagagcgttctgctaatctacacttttattttctggatcactggcgttatccttcttgcagttggcatttggggcaaggtgagcctggagaattacttttctcttttaaatgagaaggccaccaatgtccccttcgtgctcattgctactggtaccgtcattattcttttgggcacctttggttgttttgctacctgccgagcttctgcatggatgctaaaactgtatgcaatgtttctgactctcgtttttttggtcgaactggtcgctgccatcgtaggatttgttttcagacatgagattaagaacagctttaagaataattatgagaaggctttgaagcagtataactctacaggagattatagaagccatgcagtagacaagatccaaaatacgttgcattgttgtggtgtcaccgattatagagattggacagatactaattattactcagaaaaaggatttcctaagagttgctgtaaacttgaagattgtactccacagagagatgcagacaaagtaaacaatgaaggttgttttataaaggtgatgaccattatagagtcagaaatgggagtcgttgcaggaatttcctttggagttgcttgcttccaactgattggaatctttctcgcctactgcctctctcgtgccataacaaataaccagtatgagatagtgtaacccaatgtatctgtgggcctattcctctctacctttaaggacatttagggtcccccctgtgaattagaaagttgcttggctggagaactgacaacactacttactgatagaccaaaaaactacaccagtaggttgattcaatcaagatgtatgtagacctaaaactacaccaataggctgattcaatcaagatccgtgctcgcagtgggctgattcaatcaagatgtatgtttgctatgttctaagtccaccttctatcccattcatgttagatcgttgaaaccctgtatccctctgaaacactggaagagctagtaaattgtaaatgaagtaatactgtgttcctcttgactgttatttttcttagtagggggcctttggaaggcactgtgaatttgctattttgatgtagtgttacaagatggaaaattgattcctctgactttgctattgatgtagtgtgatagaaaattcacccctctgaactggctccttcccagtcaaggttatctggtttgattgtataatttgcaccaagaagttaaaatgttttatgactctctgttctgctgacaggcagagagtcacattgtgtaatttaatttcagtcagtcaatagatggcatccctcatcagggttgccagatggtgataacagtgtaaggccttgggtctaaggcatccacgactggaagggactactgatgttctgtgatacatcaggtttcagcacacaacttacatttctttgcctccaaattgaggcatttattatgatgttcatactttccctcttgtttgaaagtttctaattattaaatggtgtcggaattgttgtattttccttaggaattcagtggaacttatcttcattaaatttagctggtaccaggttgatatgacttgtcaatattatggtcaactttaagtcttagttttcgtttgtgcctttgattaataagtataactcttatacaataaatactgctttcctctaaaaagatcgtgtttaaattaacttgtagaaaatctgctggaatggttgttgttttccactgagaaagctaagccctacatttctattcagagtactgtttttagatgtgaaatataagcctgcggccttaactctgtattaaaaaaaatgtttttgtttaaaaaaaactgttcccataggtgcagcaaaccaccatggcacatgtatacctatgtaacaaacctgcacattctgcacatgtatcccagaacttaatgtaaacaaaaaaatcttaaagtgcaaatattaaaaaaaactgttctctgtgaaaaaaattatattccatgttataaagtagcatatgactagtgttctcctag

SEQ ID NO: 136923 - DNA, 1099 bp, Artificial Sequence
  derived and/or modified sequence
atactttaccctctacaaaattgtacagtgtttccggcccttctcagttgtggacgctcgtaagttttcggcagtttccggggagactcggggactccgcgtctcgctctctgtgttccaatcgcccggtgcggtggtgcagggtctcgggctagtcatggcgtccccgtctcggagactgcagactaaaccagtcattacttgtttcaagagcgttctgctaatctacacttttattttctggatcactggcgttatccttcttgcagttggcatttggggcaaggtgagcctggagaattacttttctcttttaaatgagaaggccacctttggttgttttgctacctgccgagcttctgcatggatgctaaaactgtatgcaatgtttctgactctcgtttttttggtcgaactggtcgctgccatcgtaggatttgttttcagacatgagattaagaacagctttaagaataattatgagaaggctttgaagcagtataactctacaggagattatagaagccatgcagtagacaagatccaaaatacgttgcattgttgtggtgtcaccgattatagagattggacagatactaattattactcagaaaaaggatttcctaagagttgctgtaaacttgaagattgtactccacagagagatgcagacaaagtaaacaatgaaggttgttttataaaggtgatgaccattatagagtcagaaatgggagtcgttgcaggaatttcctttggagttgcttgcttccaactgattggaatctttctcgcctactgcctctctcgtgccataacaaataaccagtatgagatagtgtaacccaatgtatctgtgggcctattcctctctacctttaaggacatttagggtcccccctgtgaattagaaagttgcttggctggagaactgacaacactacttactgatagaccaaaaaactacaccagtaggttgattcaatcaagatgtatgtagacctaaaactacaccaataggctgattcaatcaagatccgtgctcgcagtgggctgattcaatcaagatgtatgtttgctatgttctaagtccaccttctat

SEQ ID NO: 136924 - protein, 418 aa, Artificial Sequence
  derived and/or modified sequence
MAPTQGPRAPLEFGGPLGAAALLLLLPATMFHLLLAARSGPARLLGPPASLPGLEVLWSPRALLLWLAWLGLQAALYLLPARKVAEGQELKDKSRLRYPINGFQALVLTALLVGLGMSAGLPLGALPEMLLPLAFVATLTAFIFSLFLYMKAQVAPVSALAPGGNSGNPIYDFFLGRELNPRICFFDFKYFCELRPGLIGWVLINLALLMKEAELRGSPSLAMWLVNGFQLLYVGDALWHEEAVLTTMDITHDGFGFMLAFGDMAWVPFTYSLQAQFLLHHPQPLGLPMASVICLINATGYYIFRGANSQKNTFRKNPSDPRVAGLETISTATGRKLLVSGWWGMVRHPNYLGDLIMALAWSLPCGVSHLLPYFYLLYFTALLVHREARDERQCLQKYGLAWQEYCRRVPYRIMPYIY

SEQ ID NO: 136925 - protein, 302 aa, Artificial Sequence
  derived and/or modified sequence
MSAGLPLGALPEMLLPLAFVATLTAFIFSLFLYMKAQVAPVSALAPGGNSGNPIYDFFLGRELNPRICFFDFKYFCELRPGLIGWVLINLALLMKEAELRGSPSLAMWLVNGFQLLYVGDALWHEEAVLTTMDITHDGFGFMLAFGDMAWVPFTYSLQAQFLLHHPQPLGLPMASVICLINATGYYIFRGANSQKNTFRKNPSDPRVAGLETISTATGRKLLVSGWWGMVRHPNYLGDLIMALAWSLPCGVSHLLPYFYLLYFTALLVHREARDERQCLQKYGLAWQEYCRRVPYRIMPYIY

SEQ ID NO: 136926 - DNA, 1257 bp, Artificial Sequence
  derived and/or modified sequence
atggcccccacccagggccccagagcccccctggagttcggcggccccctgggcgccgccgccctgctgctgctgctgcccgccaccatgttccacctgctgctggccgccagaagcggccccgccagactgctgggcccccccgccagcctgcccggcctggaggtgctgtggagccccagagccctgctgctgtggctggcctggctgggcctgcaggccgccctgtacctgctgcccgccagaaaggtggccgagggccaggagctgaaggacaagagcagactgagataccccatcaacggcttccaggccctggtgctgaccgccctgctggtgggcctgggcatgagcgccggcctgcccctgggcgccctgcccgagatgctgctgcccctggccttcgtggccaccctgaccgccttcatcttcagcctgttcctgtacatgaaggcccaggtggcccccgtgagcgccctggcccccggcggcaacagcggcaaccccatctacgacttcttcctgggcagagagctgaaccccagaatctgcttcttcgacttcaagtacttctgcgagctgagacccggcctgatcggctgggtgctgatcaacctggccctgctgatgaaggaggccgagctgagaggcagccccagcctggccatgtggctggtgaacggcttccagctgctgtacgtgggcgacgccctgtggcacgaggaggccgtgctgaccaccatggacatcacccacgacggcttcggcttcatgctggccttcggcgacatggcctgggtgcccttcacctacagcctgcaggcccagttcctgctgcaccacccccagcccctgggcctgcccatggccagcgtgatctgcctgatcaacgccaccggctactacatcttcagaggcgccaacagccagaagaacaccttcagaaagaaccccagcgaccccagagtggccggcctggagaccatcagcaccgccaccggcagaaagctgctggtgagcggctggtggggcatggtgagacaccccaactacctgggcgacctgatcatggccctggcctggagcctgccctgcggcgtgagccacctgctgccctacttctacctgctgtacttcaccgccctgctggtgcacagagaggccagagacgagagacagtgcctgcagaagtacggcctggcctggcaggagtactgcagaagagtgccctacagaatcatgccctacatctactag

SEQ ID NO: 136927 - DNA, 909 bp, Artificial Sequence
  derived and/or modified sequence
atgagcgccggcctgcccctgggcgccctgcccgagatgctgctgcccctggccttcgtggccaccctgaccgccttcatcttcagcctgttcctgtacatgaaggcccaggtggcccccgtgagcgccctggcccccggcggcaacagcggcaaccccatctacgacttcttcctgggcagagagctgaaccccagaatctgcttcttcgacttcaagtacttctgcgagctgagacccggcctgatcggctgggtgctgatcaacctggccctgctgatgaaggaggccgagctgagaggcagccccagcctggccatgtggctggtgaacggcttccagctgctgtacgtgggcgacgccctgtggcacgaggaggccgtgctgaccaccatggacatcacccacgacggcttcggcttcatgctggccttcggcgacatggcctgggtgcccttcacctacagcctgcaggcccagttcctgctgcaccacccccagcccctgggcctgcccatggccagcgtgatctgcctgatcaacgccaccggctactacatcttcagaggcgccaacagccagaagaacaccttcagaaagaaccccagcgaccccagagtggccggcctggagaccatcagcaccgccaccggcagaaagctgctggtgagcggctggtggggcatggtgagacaccccaactacctgggcgacctgatcatggccctggcctggagcctgccctgcggcgtgagccacctgctgccctacttctacctgctgtacttcaccgccctgctggtgcacagagaggccagagacgagagacagtgcctgcagaagtacggcctggcctggcaggagtactgcagaagagtgccctacagaatcatgccctacatctactag

SEQ ID NO: 136928 - DNA, 1257 bp, Artificial Sequence
  derived and/or modified sequence
atggcccccacccaaggcccgcgggcccctcttgaatttggcggtcccctgggcgccgctgccctgctgcttctcttaccggccactatgtttcacctcctgcttgccgcccggtcgggacctgcaagattattagggcctcccgcatcccttcccggcctagaggtgctgtggtcccctagagctctgctcttgtggctggcttggttgggcctacaggctgcactttatctgttacccgcaagaaaagtggctgagggccaagaactaaaagacaaatctaggttgcggtatcccatcaacggctttcaggccctggtactgactgccttgttagtgggccttggaatgagcgcgggcctacctttgggggcacttcccgagatgcttctccccctcgctttcgtggctacactgaccgcattcatcttcagcctgttcctctatatgaaagcccaagttgctcctgtgtctgcgctagcaccaggcggaaactctggaaaccctatatatgatttcttccttgggcgggaactgaatcctagaatatgcttcttcgacttcaagtatttctgtgagcttcgccccggactgattggctgggtactgattaatctggctctgcttatgaaggaagccgagcttcggggcagtccctctctcgctatgtggctggtcaacggttttcagctcctatatgtcggagacgcattatggcatgaagaggccgtgttaaccacaatggatatcacacacgacggattcggctttatgctggctttcggcgatatggcctgggttccttttacgtacagcctccaggcccaattcctgctccatcacccccagcctcttgggctcccaatggcatccgtcatctgccttattaacgctacaggttactacatctttcgaggcgcaaatagtcagaagaataccttcagaaagaacccctccgatccaagagtagcgggactcgaaactatctctaccgccacaggaaggaaactgctggtgtctggatggtggggaatggtgagacacccaaactatttgggcgacctgatcatggcgctggcgtggtccctcccgtgtggcgtctctcatttgttgccttacttttatctgctctacttcactgccctactagtccacagggaagctagggatgaacgccagtgtctgcagaagtatgggctggcctggcaggaatactgccgtcgggtcccttatagaattatgccttatatctattag

SEQ ID NO: 136929 - DNA, 909 bp, Artificial Sequence
  derived and/or modified sequence
atgtcggctgggctgcccctgggtgcactgcccgagatgctgctgccactcgcgtttgttgctactttaacggcttttatcttttccctgttcctgtatatgaaggcccaggtagcgcccgtctcggccctggcgccagggggcaactctggcaaccctatttatgacttctttctcggaagagagctgaacccacgtatttgcttcttcgacttcaagtacttttgcgaactcagacccggtcttatcggctgggtactgataaatttggccctgttaatgaaagaggctgagctccgcggctccccaagtttggccatgtggcttgtgaatggcttccagctcttatatgtgggcgacgctttgtggcacgaggaagccgtgctcacaacgatggacatcacgcacgacggcttcggcttcatgctcgcctttggggacatggcctgggtgccattcacttacagcttgcaggcccagttcctcctgcaccacccccagccactggggctgccgatggccagcgtgatttgtctgatcaatgctaccggctactacatttttaggggagcaaacagccagaagaatactttccggaaaaaccccagtgatcctcgtgtggccggtctcgagacaatctctacagctaccgggcggaaacttctggtgagcggatggtggggaatggtcaggcaccccaattacctgggtgatttgataatggccctggcctggagccttccctgcggagtgagccatctgttgccatacttttatttgctgtacttcaccgcactattggtacacagggaagcaagagatgagaggcagtgtctgcagaaatatggtttagcctggcaagaatattgcagaagggttccgtatcgtatcatgccgtatatatactag

SEQ ID NO: 136930 - DNA, 1257 bp, Artificial Sequence
  derived and/or modified sequence
atggcccccacccagggcccccgggcccccctggagtttggaggccccctgggcgccgccgccctgctgctgctgctgcctgccaccatgttccacctgctgctggccgcccggagcggccctgcccggctgctgggccccccagccagcctgcccggcctggaggtgctgtggagcccccgggccctgctgctgtggctggcctggctgggcctgcaggccgccctgtacctgctgcctgccaggaaggtggccgagggccaggagctgaaggacaagagccggctgcgctaccccatcaatggcttccaggccctggtgctgacagccctgctggtgggcctgggcatgtctgctggcctgcccctgggcgccctgcctgagatgctgctgcccctggcctttgtggccaccctgacagccttcatcttcagcctcttcctgtacatgaaggcccaggtggcccctgtgtctgccctggcccctgggggcaacagcggcaaccccatctatgacttcttcctgggccgggagctgaacccccgcatctgcttctttgacttcaagtacttctgtgagctgcggcccggcctgattggctgggtgctgatcaacctggccctgctgatgaaggaggccgagctgcggggcagccccagcctggccatgtggctggtgaatggcttccagctgctgtatgtgggagatgccctgtggcatgaggaggccgtgctgaccaccatggacatcacccatgatggcttcggcttcatgctggcctttggagacatggcctgggtgcccttcacctacagcctgcaggcccagttcctgctgcaccacccccagcccctgggcctgcccatggccagcgtcatctgcctgatcaatgccaccggctactacatcttccggggggccaacagccagaagaacaccttcaggaagaaccccagcgacccccgggtggccggcctggagaccatcagcacagccactggaaggaagctgctggtgtctggctggtggggcatggtgcgccaccccaactacctgggggacctgatcatggccctggcctggagcctgccctgtggggtgagccacctgctgccctacttctacctgctgtacttcaccgccctgctggtgcaccgggaggccagagatgagcggcagtgcctgcagaagtatggcctggcctggcaggagtactgcagaagagtgccctaccgcatcatgccctacatctactag

SEQ ID NO: 136931 - DNA, 909 bp, Artificial Sequence
  derived and/or modified sequence
atgtctgctggcctgcccctgggcgccctgcctgagatgctgctgcccctggcctttgtggccaccctgacagccttcatcttcagcctcttcctgtacatgaaggcccaggtggcccctgtgtctgccctggcccctgggggcaacagcggcaaccccatctatgacttcttcctgggccgggagctgaacccccgcatctgcttctttgacttcaagtacttctgtgagctgcggcccggcctgattggctgggtgctgatcaacctggccctgctgatgaaggaggccgagctgcggggcagccccagcctggccatgtggctggtgaatggcttccagctgctgtatgtgggagatgccctgtggcatgaggaggccgtgctgaccaccatggacatcacccatgatggcttcggcttcatgctggcctttggagacatggcctgggtgcccttcacctacagcctgcaggcccagttcctgctgcaccacccccagcccctgggcctgcccatggccagcgtcatctgcctgatcaatgccaccggctactacatcttccggggggccaacagccagaagaacaccttcaggaagaaccccagcgacccccgggtggccggcctggagaccatcagcacagccactggaaggaagctgctggtgtctggctggtggggcatggtgcgccaccccaactacctgggggacctgatcatggccctggcctggagcctgccctgtggggtgagccacctgctgccctacttctacctgctgtacttcaccgccctgctggtgcaccgggaggccagagatgagcggcagtgcctgcagaagtatggcctggcctggcaggagtactgcagaagagtgccctaccgcatcatgccctacatctactag

SEQ ID NO: 136932 - DNA, 1257 bp, Artificial Sequence
  derived and/or modified sequence
atggcccccacccagggcccccgggcccccctggagttcggcggcccactgggcgctgccgcacttctcctgcttttgcccgccacgatgttccatctgctgctggccgctagatccggcccagctaggctgcttgggcctcctgcttcactcccaggtctcgaagttctgtggtcccctcgcgctctgctgttgtggcttgcttggttgggtctgcaagcagcactgtacttgttacccgcccgcaaggtggctgagggacaggagctgaaagacaagagcaggctacgttaccctattaacgggtttcaagccctggtgctgaccgctctcctggtgggattagggatgagcgccggactgcctctcggcgccctcccggaaatgttgttgcccttagcgttcgttgccacacttacggccttcatcttttccctatttctttatatgaaagcccaagtcgcacctgtgagcgcactggccccagggggtaactctggcaacccaatctacgacttttttctgggccgcgagctgaatcccagaatctgttttttcgacttcaagtatttttgcgagctgcgccctgggctgatcggctgggtattaattaacctggccctattgatgaaagaagccgagctacgcggcagtccttcgctcgccatgtggcttgttaatgggttccaattactatacgtgggagacgctttgtggcatgaggaggccgtgttgaccaccatggacataacccacgacgggtttggcttcatgctggcgtttggtgacatggcttgggttcctttcacgtactcattgcaggcccaatttctgcttcaccaccctcagccactcggactacccatggctagcgtcatctgcctcataaacgcaaccggatactatatcttcaggggggccaattctcaaaagaacactttcagaaagaacccgtccgatcctagagtggcaggactggaaacaatttcaaccgcaacaggcaggaaactcttagtctccgggtggtggggaatggtcagacacccaaattaccttggggacttgataatggctcttgcttggagcctgccttgcggggtttcacacctgctcccttatttctatctgctctattttacggccttactggtccacagagaagcccgtgacgagcggcagtgcctccagaagtatggccttgcatggcaggagtactgtcgtagggttccatatagaatcatgccctacatatactag

SEQ ID NO: 136933 - DNA, 909 bp, Artificial Sequence
  derived and/or modified sequence
atgagcgccggcctgcccctgggcgccctgcccgagatgctgctgccacttgcttttgtcgccaccctcactgctttcatatttagcctgtttctttacatgaaggcccaggttgctcctgtttctgcgctggccccaggaggcaattctggaaatcctatttatgattttttcctgggtcgcgagcttaatcctaggatttgtttttttgattttaaatacttttgtgaactgcgtcctgggctaattggatgggtactgattaacctagctttgctcatgaaggaagctgagctgcggggctctccatcactcgccatgtggttggtgaatggctttcaactgctgtacgttggagatgcactgtggcacgaagaggcagtactgactactatggatataacccacgatggatttggatttatgctggcgtttggggatatggcctgggtgcctttcacatatagtctccaggcacagttcctcctccatcatccgcagcccctgggactgcccatggcgtccgtcatttgccttatcaatgccacaggctactatatcttccggggagccaactcacagaagaacacctttcgaaagaatccgtctgatccccgggtagccggtcttgagaccatcagcaccgcaaccggacgaaaactcctcgtctcaggttggtggggcatggtgagacaccccaattaccttggtgacctgatcatggcacttgcctggagcctgccatgtggcgtttcccatctgctgccgtacttctacctgttgtattttacggcactgctcgttcaccgcgaagccagagacgagcgccagtgtctccagaaatacggcctggcttggcaggagtactgtaggagggttccttataggataatgccatatatttactag

SEQ ID NO: 136934 - DNA, 1257 bp, Artificial Sequence
  derived and/or modified sequence
atggctcccactcaggggcctcgtgcacctctagaattcggaggtcctcttggggctgcagcactcctcctgctgctcccagcaaccatgttccaccttctcctcgcagcccgttcaggcccagccaggttattaggcccacccgcatcactccctgggctggaggtcctctggtctcccagagccctcctcctgtggttagcctggttgggtctgcaggccgcattgtacctgctgccagccagaaaagtggccgaagggcaagagctgaaagataaatccagactaagatatcccattaacggcttccaggcgctggtgttaacagctctgctggttggcctgggcatgtcagctggcctccctttgggagcccttcccgaaatgcttctgccgcttgcgtttgtggctacacttactgcgttcatattctccctgttcctatacatgaaggcacaggtggcaccagtgtctgccctggccccaggaggcaactcaggaaaccccatttatgactttttcctgggcagggaactaaacccacgtatttgtttctttgattttaaatacttctgtgagcttaggccaggcctgatcggatgggtgctgataaatctggcactcttgatgaaagaagccgagctgcgaggaagccccagcctggcaatgtggcttgtgaatggatttcagctgctgtacgtcggagacgctctgtggcacgaggaggccgttctgactacaatggacattacacatgatggattcggattcatgctcgcattcggagatatggcctgggtcccttttacctacagcctgcaagcacagtttctactccatcaccctcagccccttggtctcccaatggctagtgtcatctgtctgataaacgccacgggctactatatcttcagaggagctaattcccagaagaacactttcagaaaaaacccgagcgatccccgagtggcaggcctggagacaatctcaaccgcgactggtcgaaagctcttggtgtcaggatggtgggggatggttcggcacccgaattacttgggtgacctgatcatggcgctggcttggtccctgccctgtggcgtatcccaccttctgccctatttctacctgctctatttcacagcgctccttgtgcaccgggaagcgcgtgatgagagacagtgcctccagaaatatgggcttgcttggcaagagtattgtcgtcgcgttccgtacagaatcatgccatatatttattag

SEQ ID NO: 136935 - DNA, 909 bp, Artificial Sequence
  derived and/or modified sequence
atgtctgcagggctgcccctcggcgctcttcccgagatgttgctccctctggccttcgtcgctacattgacagcattcatattcagtctgtttctctacatgaaagctcaggtcgcccctgtttcggctctcgcgcctggcggaaacagcgggaatccaatctacgatttctttctgggaagagagcttaaccccagaatctgtttctttgatttcaagtacttttgcgagttgcgcccaggactaatcggatgggtgctcattaatctggccttgctcatgaaggaggccgagttgaggggatctccctctcttgcgatgtggttagtcaacggctttcaattgctctatgtgggggatgctttatggcatgaagaggccgttcttaccaccatggatatcactcacgacggttttggattcatgctggcctttggggacatggcttgggtgcccttcacatactcgctgcaagctcagttcctcctccaccaccctcagcccttgggcctcccgatggcaagcgtgatttgtctgatcaacgccacagggtactatattttcaggggcgctaattctcagaagaacactttccgcaaaaacccatccgacccccgagtcgctggcctggagacaatctcaactgccactggacggaaacttctcgttagtggatggtgggggatggtaagacaccccaactacctgggcgatctgatcatggcactggcctggtcgttaccttgtggcgtgtcccacttactgccctatttttacctactgtattttacggcccttctagtgcaccgcgaggccagggacgaaagacaatgtctgcagaagtatggactggcttggcaggaatattgtaggcgcgttccctacaggatcatgccatatatctattag

SEQ ID NO: 136936 - DNA, 1722 bp, Artificial Sequence
  derived and/or modified sequence
gggacgagagcggtccttgtctgcgttccgtgtccaggcaggtgcaggcgccgcggggccggatcctccgcgcggccgagtccatctcctgggaaatggggcggacagtgtttccttgactgactattgtgagcgccctctctctccggcggagcggagaccatggcccccactcagggcccccgggccccgctggaattcggagggcccctgggcgccgcggctctgctactgctgctgcccgccaccatgttccacctgctcctggcggcccgttcgggccccgcgcgcctgctgggtccacccgcgtccctgccggggctggaggtgctgtggagcccacgggcgctgctgctgtggctcgcctggctcggcctgcaggcggcgctctacctactgccggcgcgcaaggtggccgaggggcaggaattgaaggacaagagtcgcctgcgctatcctattaacggcttccaggccctggtgctgacagccctgttggtggggctggggatgtcagcggggctgcctctgggggcgctcccggaaatgctcctgcccttggcgtttgtcgccaccctcaccgctttcatcttcagcctctttctctacatgaaggcgcaggtagccccagtttcggccctggcacctggggggaactcaggcaatccgatttacgacttttttctgggacgagagctcaaccctcgtatctgtttcttcgacttcaaatatttctgtgaactgcgacccggcctcatcggctgggtcctcatcaacctggccctgttgatgaaggaggcagagcttcgaggcagtccctcactggccatgtggctggtcaatggcttccagttgctctacgtgggtgatgccctctggcacgaggaggccgtcctcaccaccatggatatcacacatgacgggtttggcttcatgctggcgtttggggacatggcctgggtgcccttcacctacagcctgcaggcccagttcctgctgcaccacccgcagcccctggggttgcccatggcctctgtcatctgcctcatcaatgctactggttactacatcttccgtggggcgaattcccagaaaaacactttccgaaagaatccttctgaccccagagtggctgggcttgagaccatctctacagccacagggcggaaactgctggtgtctgggtggtggggtatggtccgccatcccaactatcttggagacctcatcatggctctggcttggtccttgccctgcggggtgtcacacctgctgccctacttctacctcctctacttcaccgcgctgctggtgcaccgtgaggcccgggatgagcggcagtgcctgcagaagtacggcctggcctggcaggagtactgccggcgtgtgccttaccgcatcatgccctacatctactgaagcggctccaccaccccaggtgggggcatgtgcccactcatccaccagcacacccaggaccaggagcctcgacacacttgggactcaagggcttgcaccccacccagccctgaggatgaacaacctcagagaagaggtggtttagagcaaggaaaaaaatgaaaccagtgaccaaaatcggagatgctcttcctcctttggataaacactgggaacccttggtgcacttctctcccctaggactggctgggtcagcactgatcagggagaagctgagcagtggcttgtgggcccaggaatctg

SEQ ID NO: 136937 - DNA, 1671 bp, Artificial Sequence
  derived and/or modified sequence
gttccgtgtccaggcaggtgcaggcgccgcggggccggatcctccgcgcggccgagtccatctcctgggaaatggggcggacagtgtttccttgactgactattgtgagcgccctctctctccggcggagcggagaccatggcccccactcagggcccccgggccccgctggaattcggagggcccctgggcgccgcggctctgctactgctgctgcccgccaccatgttccacctgctcctggcggcccgttcgggccccgcgcgcctgctgggtccacccgcgtccctgccggggctggaggtgctgtggagcccacgggcgctgctgctgtggctcgcctggctcggcctgcaggcggcgctctacctactgccggcgcgcaaggcttccaggccctggtgctgacagccctgttggtggggctggggatgtcagcggggctgcctctgggggcgctcccggaaatgctcctgcccttggcgtttgtcgccaccctcaccgctttcatcttcagcctctttctctacatgaaggcgcaggtagccccagtttcggccctggcacctggggggaactcaggcaatccgatttacgacttttttctgggacgagagctcaaccctcgtatctgtttcttcgacttcaaatatttctgtgaactgcgacccggcctcatcggctgggtcctcatcaacctggccctgttgatgaaggaggcagagcttcgaggcagtccctcactggccatgtggctggtcaatggcttccagttgctctacgtgggtgatgccctctggcacgaggaggccgtcctcaccaccatggatatcacacatgacgggtttggcttcatgctggcgtttggggacatggcctgggtgcccttcacctacagcctgcaggcccagttcctgctgcaccacccgcagcccctggggttgcccatggcctctgtcatctgcctcatcaatgctactggttactacatcttccgtggggcgaattcccagaaaaacactttccgaaagaatccttctgaccccagagtggctgggcttgagaccatctctacagccacagggcggaaactgctggtgtctgggtggtggggtatggtccgccatcccaactatcttggagacctcatcatggctctggcttggtccttgccctgcggggtgtcacacctgctgccctacttctacctcctctacttcaccgcgctgctggtgcaccgtgaggcccgggatgagcggcagtgcctgcagaagtacggcctggcctggcaggagtactgccggcgtgtgccttaccgcatcatgccctacatctactgaagcggctccaccaccccaggtgggggcatgtgcccactcatccaccagcacacccaggaccaggagcctcgacacacttgggactcaagggcttgcaccccacccagccctgaggatgaacaacctcagagaagaggtggtttagagcaaggaaaaaaatgaaaccagtgaccaaaatcggagatgctcttcctcctttggataaacactgggaacccttggtgcacttctctcccctaggactggctgggtcagcactgatcagggagaagctgagcagtggcttgtgggcccaggaatctggggtctggtgggacaatagctatccctc

SEQ ID NO: 136938 - protein, 1259 aa, Artificial Sequence
  derived and/or modified sequence
MDASEEPLPPVIYTMENKPIVTCAGDQNLFTSVYPTLSQQLPREPMEWRRSYGRAPKMIHLESNFVQFKEELLPKEGNKALLTFPFLHIYWTECCDTEVYKATVKDDLTKWQNVLKAHSSVDWLIVIVENDAKKKNKTNILPRTSIVDKIRNDFCNKQSDRCVVLSDPLKDSSRTQESWNAFLTKLRTLLLMSFTKNLGKFEDDMRTLREKRTEPGWSFCEYFMVQEELAFVFEMLQQFEDALVQYDELDALFSQYVVNFGAGDGANWLTFFCQPVKSWNGLILRKPIDMEKRESIQRREATLLDLRSYLFSRQCTLLLFLQRPWEVAQRALELLHNCVQELKLLEVSVPPGALDCWVFLSCLEVLQRIEGCCDRAQIDSNIAHTVGLWSYATEKLKSLGYLCGLVSEKGPNSEDLNRTVDLLAGLGAERPETANTAQSPYKKLKEALSSVEAFEKHYLDLSHATIEMYTSIGRIRSAKFVGKDLAEFYMRKKAPQKAEIYLQGALKNYLAEGWALPITHTRKQLAECQKHLGQIENYLQTSSLLASDHHLTEEERKHFCQEILDFASQPSDSPGHKIVLPMHSFAQLRDLHFDPSNAVVHVGGVLCVEITMYSQMPVPVHVEQIVVNVHFSIEKNSYRKTAEWLTKHKTSNGIINFPPETAPFPVSQNSLPALELYEMFERSPSDNSLNTTGIICRNVHMLLRRQESSSSLEMPSGVALEEGAHVLRCSHVTLEPGANQITFRTQAKEPGTYTLRQLCASVGSVWFVLPHIYPIVQYDVYSQEPQLHVEPLADSLLAGIPQRVKFTVTTGHYTIKNGDSLQLSNAEAMLILCQAESRAVVYSNTREQSSEAALRIQSSDKVTSISLPVAPAYHVIEFELEVLSLPSAPALGGESDMLGMAEPHRKHKDKQRTGRCMVTTDHKVSIDCPWSIYSTVIALTFSVPFRTTHSLLSSGTRKYVQVCVQNLSELDFQLSDSYLVDTGDSTDLQLVPLNTQSQQPIYSKQSVFFVWELKWTEEPPPSLHCRFSVGFSPASEEQLSISLKPYTYEFKVENFFTLYNVKAEIFPPSGMEYCRTGSLCSLEVLITRLSDLLEVDKDEALTESDEHFSTKLMYEVVDNSSNWAVCGKSCGVISMPVAARATHRVHMEVMPLFAGYLPLPDVRLFKYLPHHSAHSSQLDADSWIENDSLSVDKHGDDQPDSSSLKSRGSVHSACSSEHKGLPMPRLQALPAGQVFNSSSGTQVLVIPSQDDHVLEVSVT

SEQ ID NO: 136939 - DNA, 3780 bp, Artificial Sequence
  derived and/or modified sequence
atggacgccagcgaggagcccctgccccccgtgatctacaccatggagaacaagcccatcgtgacctgcgccggcgaccagaacctgttcaccagcgtgtaccccaccctgagccagcagctgcccagagagcccatggagtggagaagaagctacggcagagcccccaagatgatccacctggagagcaacttcgtgcagttcaaggaggagctgctgcccaaggagggcaacaaggccctgctgaccttccccttcctgcacatctactggaccgagtgctgcgacaccgaggtgtacaaggccaccgtgaaggacgacctgaccaagtggcagaacgtgctgaaggcccacagcagcgtggactggctgatcgtgatcgtggagaacgacgccaagaagaagaacaagaccaacatcctgcccagaaccagcatcgtggacaagatcagaaacgacttctgcaacaagcagagcgacagatgcgtggtgctgagcgaccccctgaaggacagcagcagaacccaggagagctggaacgccttcctgaccaagctgagaaccctgctgctgatgagcttcaccaagaacctgggcaagttcgaggacgacatgagaaccctgagagagaagagaaccgagcccggctggagcttctgcgagtacttcatggtgcaggaggagctggccttcgtgttcgagatgctgcagcagttcgaggacgccctggtgcagtacgacgagctggacgccctgttcagccagtacgtggtgaacttcggcgccggcgacggcgccaactggctgaccttcttctgccagcccgtgaagagctggaacggcctgatcctgagaaagcccatcgacatggagaagagagagagcatccagagaagagaggccaccctgctggacctgagaagctacctgttcagcagacagtgcaccctgctgctgttcctgcagagaccctgggaggtggcccagagagccctggagctgctgcacaactgcgtgcaggagctgaagctgctggaggtgagcgtgccccccggcgccctggactgctgggtgttcctgagctgcctggaggtgctgcagagaatcgagggctgctgcgacagagcccagatcgacagcaacatcgcccacaccgtgggcctgtggagctacgccaccgagaagctgaagagcctgggctacctgtgcggcctggtgagcgagaagggccccaacagcgaggacctgaacagaaccgtggacctgctggccggcctgggcgccgagagacccgagaccgccaacaccgcccagagcccctacaagaagctgaaggaggccctgagcagcgtggaggccttcgagaagcactacctggacctgagccacgccaccatcgagatgtacaccagcatcggcagaatcagaagcgccaagttcgtgggcaaggacctggccgagttctacatgagaaagaaggccccccagaaggccgagatctacctgcagggcgccctgaagaactacctggccgagggctgggccctgcccatcacccacaccagaaagcagctggccgagtgccagaagcacctgggccagatcgagaactacctgcagaccagcagcctgctggccagcgaccaccacctgaccgaggaggagagaaagcacttctgccaggagatcctggacttcgccagccagcccagcgacagccccggccacaagatcgtgctgcccatgcacagcttcgcccagctgagagacctgcacttcgaccccagcaacgccgtggtgcacgtgggcggcgtgctgtgcgtggagatcaccatgtacagccagatgcccgtgcccgtgcacgtggagcagatcgtggtgaacgtgcacttcagcatcgagaagaacagctacagaaagaccgccgagtggctgaccaagcacaagaccagcaacggcatcatcaacttcccccccgagaccgcccccttccccgtgagccagaacagcctgcccgccctggagctgtacgagatgttcgagagaagccccagcgacaacagcctgaacaccaccggcatcatctgcagaaacgtgcacatgctgctgagaagacaggagagcagcagcagcctggagatgcccagcggcgtggccctggaggagggcgcccacgtgctgagatgcagccacgtgaccctggagcccggcgccaaccagatcaccttcagaacccaggccaaggagcccggcacctacaccctgagacagctgtgcgccagcgtgggcagcgtgtggttcgtgctgccccacatctaccccatcgtgcagtacgacgtgtacagccaggagccccagctgcacgtggagcccctggccgacagcctgctggccggcatcccccagagagtgaagttcaccgtgaccaccggccactacaccatcaagaacggcgacagcctgcagctgagcaacgccgaggccatgctgatcctgtgccaggccgagagcagagccgtggtgtacagcaacaccagagagcagagcagcgaggccgccctgagaatccagagcagcgacaaggtgaccagcatcagcctgcccgtggcccccgcctaccacgtgatcgagttcgagctggaggtgctgagcctgcccagcgcccccgccctgggcggcgagagcgacatgctgggcatggccgagccccacagaaagcacaaggacaagcagagaaccggcagatgcatggtgaccaccgaccacaaggtgagcatcgactgcccctggagcatctacagcaccgtgatcgccctgaccttcagcgtgcccttcagaaccacccacagcctgctgagcagcggcaccagaaagtacgtgcaggtgtgcgtgcagaacctgagcgagctggacttccagctgagcgacagctacctggtggacaccggcgacagcaccgacctgcagctggtgcccctgaacacccagagccagcagcccatctacagcaagcagagcgtgttcttcgtgtgggagctgaagtggaccgaggagcccccccccagcctgcactgcagattcagcgtgggcttcagccccgccagcgaggagcagctgagcatcagcctgaagccctacacctacgagttcaaggtggagaacttcttcaccctgtacaacgtgaaggccgagatcttcccccccagcggcatggagtactgcagaaccggcagcctgtgcagcctggaggtgctgatcaccagactgagcgacctgctggaggtggacaaggacgaggccctgaccgagagcgacgagcacttcagcaccaagctgatgtacgaggtggtggacaacagcagcaactgggccgtgtgcggcaagagctgcggcgtgatcagcatgcccgtggccgccagagccacccacagagtgcacatggaggtgatgcccctgttcgccggctacctgcccctgcccgacgtgagactgttcaagtacctgccccaccacagcgcccacagcagccagctggacgccgacagctggatcgagaacgacagcctgagcgtggacaagcacggcgacgaccagcccgacagcagcagcctgaagagcagaggcagcgtgcacagcgcctgcagcagcgagcacaagggcctgcccatgcccagactgcaggccctgcccgccggccaggtgttcaacagcagcagcggcacccaggtgctggtgatccccagccaggacgaccacgtgctggaggtgagcgtgacctag

SEQ ID NO: 136940 - DNA, 3780 bp, Artificial Sequence
  derived and/or modified sequence
atggatgccagcgaggagcccttgccacccgtgatctataccatggaaaacaagcccatcgtgacctgcgctggggatcagaatctgttcacatccgtttatcccactctgagccagcagctgccccgcgagcccatggagtggagaaggagctacggccgtgctccaaaaatgatccacctggaatctaacttcgtgcagttcaaagaagagctcttgcccaaggagggaaataaagcactattgacatttccattccttcatatctactggactgagtgttgcgataccgaggtatataaagcaacggtcaaagacgatctcacaaaatggcagaacgtgctgaaagcacattccagtgtggactggttgattgtgatcgttgagaacgatgccaaaaagaaaaataaaaccaatattttacctcgcacctcgattgtggataagattcgcaatgacttctgcaataaacagtctgaccgctgcgtagtcctgtctgacccgcttaaggactcttccagaacacaagaatcttggaacgccttcctcaccaagttgcggactctgctcctgatgtcgtttacaaaaaacctcggtaaattcgaagacgacatgcggacgctgagggaaaaacggacagaacccggatggtctttttgcgagtacttcatggtacaagaggagctcgcattcgtgttcgagatgctccaacagttcgaagatgctttggttcagtacgatgagctggacgcacttttctcccaatatgtagtgaattttggtgccggcgatggagcaaattggctaaccttcttttgccagcccgtaaagagctggaatggcttaatcctgcgaaaaccaatcgacatggagaaaagggaatcaattcaacggcgggaggccacactactagacctccgctcttacctgtttagtcggcagtgcaccctattgttattccttcagaggccatgggaggttgcccaacgggcgttggagttattacacaattgcgtgcaggaactcaaactgctggaggttagtgttcctccgggcgctttggactgttgggtcttcctgagctgccttgaggttctgcaaaggatcgaggggtgttgcgatagggcccaaatcgacagcaacatagctcacacagtagggctgtggagctacgcgactgagaaactgaaatccctgggctacttatgcggtttggtctctgaaaagggcccgaacagtgaagacctgaaccgcaccgtagacctattagcagggctcggggctgagcggccagagactgcaaatactgcgcagagcccctataaaaagctcaaagaagccctgtcttcagtggaggcatttgagaagcattatctcgacttgtctcatgcgacaatcgagatgtatactagcatagggaggattcgcagcgccaagtttgtgggcaaagatttggctgagttctacatgaggaaaaaggcgccccagaaggctgagatttacttgcaaggggcgttgaagaactacctggctgagggctgggctctcccgattacccacacccgcaaacaattggccgagtgccagaagcatctggggcagattgagaattacttacagacttctagcctgttggcctcagaccaccacttgactgaggaggagcggaaacatttctgccaggagatcttggacttcgcttcgcagcccagcgacagtcccgggcacaagattgtgctgccaatgcactccttcgcccagctgcgggatctgcacttcgatccatctaatgctgtcgttcatgtgggaggagtgctatgtgtcgaaatcacaatgtactctcagatgccagttcccgtccacgtagagcaaatagtggtgaacgttcacttcagcattgaaaaaaattcgtataggaagacagctgagtggctgaccaagcacaagaccagcaatggaatcataaacttccctccagagaccgccccgtttccagtgtctcaaaatagcctgcccgctctggaactctatgagatgtttgagcggagtccctctgacaattcattgaatactacgggtatcatttgtaggaacgtacatatgctgctcaggcggcaggaaagctccagcagtctcgaaatgcccagtggagtggcactggaggagggggcacacgtgctgcgatgttcccacgtcacacttgaaccaggggccaaccagatcacatttcgcacgcaggccaaggagccagggacttacactctccgacagctgtgcgcatctgttgggagcgtatggttcgtgttgcctcacatctacccgattgtccaatacgacgtctactcacaagaaccgcaactgcatgtagagcctctcgctgattctctgctcgccggcattccccaaagggtaaaattcaccgtgacgaccggccactataccataaagaatggagattcgctgcagctgtctaatgccgaggctatgctaattttgtgtcaagcagagtcgcgagccgtcgtgtattccaacacccgggaacagagttcggaggccgcattacgaatacagagctccgataaggtcacttcaatctccctgccagtcgctcccgcgtaccatgtcatcgaattcgagctcgaggtgcttagcctcccatctgcacctgctctgggcggcgagtctgatatgctaggtatggcagaaccccaccggaaacataaagacaaacagagaactgggagatgcatggttactactgaccacaaggtcagcattgattgtccttggagcatatactccactgtaatcgcccttaccttcagcgtgcctttccgcactactcactctttactgtcatcaggcacgaggaagtacgttcaggtttgtgtgcaaaacctgtccgagctggatttccagttgagcgattcctaccttgtggacactggagattctactgatctgcagcttgtgccactgaacacacaatcccagcagcctatttacagtaagcagtctgtgtttttcgtctgggagctgaagtggaccgaagagccgcctccctccctccactgtaggttctcagtgggattctcccctgcctccgaggaacagttgagcatatcccttaaaccatacacatacgagtttaaggttgagaacttctttactttgtacaacgtgaaggccgaaatctttccccctagcgggatggaatactgcaggaccggcagcctttgttccctggaagtgttgattactcggctgagcgacctcttagaagtggacaaggatgaggccctgacagagtccgacgaacatttctcgactaaactcatgtacgaggttgtggataatagttccaactgggccgtgtgtgggaaatcgtgcggcgtgatctcaatgcccgtggccgcacgggccacacacagggttcatatggaggtgatgcctctttttgcgggctacctcccactgcccgacgtacgtctatttaagtacctgccacaccatagcgcgcattcctcacagctggacgccgacagctggatcgagaatgattccctcagcgtcgataagcacggggatgaccagcccgattcgtcttcacttaaaagccgtggttctgtgcactcagcttgctcaagcgagcataagggactcccgatgccaaggctccaagccctacccgcaggtcaagtctttaatagcagcagcggcacccaggtattagtgattccatcccaggatgatcatgtgttggaggttagcgtaacctag

SEQ ID NO: 136941 - DNA, 3780 bp, Artificial Sequence
  derived and/or modified sequence
atggatgccagcgaggagcccctgccccctgtgatctacaccatggagaacaagcccatcgtgacctgtgccggggaccagaacctcttcacctctgtgtaccccaccctgagccagcagctgccccgggagcccatggagtggaggaggagctatggccgggcccccaagatgatccacctggagagcaactttgtgcagttcaaggaggagctgctgcccaaggagggcaacaaggccctgctgaccttccccttcctgcacatctactggacagagtgctgtgacacagaggtgtacaaggccaccgtgaaggatgacctgaccaagtggcagaatgtgctgaaggcccacagctctgtggactggctgattgtgattgtggagaatgatgccaagaagaagaacaagaccaacatcctgcccaggaccagcatcgtggacaagatcagaaatgacttctgcaacaagcagagcgacagatgtgtggtgctgagtgaccccctgaaggacagcagcaggacccaggagagctggaatgccttcctgaccaagctgcggaccctgctgctgatgtccttcaccaagaacctgggcaagtttgaagatgacatgaggaccctgcgggagaagaggacagagcccggctggagcttctgtgagtacttcatggtgcaggaggagctggcctttgtgtttgagatgctgcagcagtttgaagatgccctggtgcagtatgatgagctggatgccctcttcagccagtatgtggtgaactttggagctggagatggagccaactggctgaccttcttctgccagcctgtgaagtcctggaatggcctcatcctgaggaagcccatcgacatggagaagcgggagagcatccagaggcgggaggccaccctgctggacctgcggagctacctgttcagccggcagtgcaccctgctgctcttcctgcagaggccctgggaggtggcccagagggccctggagctgctgcacaactgtgtgcaggagctgaagctgctggaggtgtctgtgcccccaggggccctggactgctgggtgttcctgagctgcctggaggtgctgcagagaattgagggctgctgtgaccgggcccagattgacagcaacatcgcccacacagtgggcctgtggagctatgccacagagaagctgaagagcctgggctacctgtgtggcctggtgtctgagaagggccccaacagcgaggacctgaacagaacagtggacctgctggccggcctgggcgctgagaggcctgagacagccaacacagcccagagcccctacaagaagctgaaggaggccctgagctctgtggaggcctttgagaagcactacctggacctgagccacgccaccatcgagatgtacaccagcatcggccgcatccgcagcgccaagtttgtgggcaaggacctggccgagttctacatgaggaagaaggccccccagaaggccgagatctacctgcagggcgccctgaagaactacctggccgagggctgggccctgcccatcacccacaccaggaagcagctggccgagtgccagaagcacctgggccagatcgagaactacctgcagaccagcagcctgctggccagtgaccaccacctgacagaggaggagaggaagcacttctgccaggagatcctggactttgccagccagcccagcgacagccctggccacaagatcgtgctgcccatgcacagctttgcccagctgcgggacctgcactttgaccccagcaatgctgtggtgcacgtgggcggcgtgctgtgtgtggagatcaccatgtacagccagatgcctgtgcctgtgcacgtggagcagatcgtggtgaatgtgcacttcagcattgagaagaacagctacaggaagacagctgagtggctgaccaagcacaagaccagcaatggcatcatcaacttccccccagagacagcccccttccctgtgtcccagaacagcctgcctgccctggagctgtatgagatgtttgagaggagccccagcgacaacagcctgaacaccaccggcatcatctgcagaaatgtgcacatgctgctgcggcggcaggagagcagcagcagcctggagatgcccagcggcgtggccctggaggagggcgcccacgtgctgcgctgcagccacgtgaccctggagcccggggccaaccagatcaccttccgcacccaggccaaggagcccggcacctacaccctgcggcagctgtgtgcctctgtgggctctgtgtggtttgtgctgccccacatctaccccatcgtgcagtatgatgtgtacagccaggagccccagctgcacgtggagcccctggccgacagcctgctggccggcatcccccagagggtgaagttcaccgtgaccaccggccactacaccatcaagaatggagacagcctgcagctgagcaatgctgaggccatgctgatcctgtgccaggccgagagcagagctgtggtgtacagcaacacccgggagcagagcagcgaggccgccctgcgcatccagagcagtgacaaggtgaccagcatcagcctgcctgtggccccagcctaccacgtgattgaatttgagctggaggtgctgagcctgcccagcgccccagccctgggcggggagagtgacatgctgggcatggccgagccccacaggaagcacaaggacaagcagaggacaggccgctgcatggtgaccacagaccacaaggtgtccattgactgcccctggagcatctacagcacagtgattgccctgaccttctctgtgcccttccgcaccacccacagcctgctgagcagcggcaccaggaaatatgtgcaggtgtgtgtgcagaacctgtctgagctggacttccagctgagtgacagctacctggtggacaccggggacagcacagacctgcagctggtgcccctgaacacccagagccagcagcccatctacagcaagcagagcgtcttctttgtgtgggagctgaagtggacagaggagcccccacccagcctgcactgccgcttctctgtgggcttctccccagccagcgaggagcagctgagcatcagcctgaagccctacacctatgagttcaaggtggagaacttcttcaccctgtacaacgtgaaggccgagatcttccccccatctggcatggagtactgcaggacaggcagcctgtgcagcctggaggtgctgatcacccggctgagtgacctgctggaggtggacaaggatgaggccctgacagaaagtgatgagcacttcagcaccaagctgatgtatgaggtggtggacaacagcagcaactgggccgtgtgtgggaagagctgtggggtcatctccatgcctgtggccgcccgggccacccaccgggtgcacatggaggtgatgcccctgtttgctggctacctgcccctgcctgatgtgcggctcttcaagtacctgccccaccacagcgcccacagcagccagctggatgctgacagctggattgaaaatgacagcctgtctgtggacaagcatggagatgaccagcctgacagcagcagcctgaagagccggggctctgtgcacagcgcctgcagcagcgagcacaagggcctgcccatgccccggctgcaggccctgcctgctggccaggtgttcaacagcagcagcggcacccaggtgctggtgatccccagccaggatgaccacgtgctggaggtgtctgtgacctag

SEQ ID NO: 136942 - DNA, 3780 bp, Artificial Sequence
  derived and/or modified sequence
atggacgccagcgaggagcccctgccccccgtgatctacaccatggaaaacaagccgattgtcacttgtgcaggagaccagaatctgttcacctctgtgtaccccaccctctctcaacagttgccccgggaacccatggagtggcgtcgcagctacggcagggcccccaagatgattcacctcgagagcaacttcgtgcagttcaaggaggagctacttccaaaagagggcaacaaggctctgctgaccttcccttttctacatatctattggaccgagtgctgcgacacagaggtctataaagccaccgttaaggatgatctcactaagtggcagaatgttctaaaggcacactccagtgtggactggctgattgtgattgtcgaaaacgacgcaaagaaaaagaataaaacgaatattctgccccggacttctatcgtagataagatccgtaatgatttctgcaataagcagagtgaccgttgtgtcgtgttgagcgatcccctgaaagacagttcacgcacccaggagagttggaatgcatttttgacaaaattgagaactctcctgctgatgagtttcaccaagaacctggggaaatttgaagatgacatgcgtaccctccgcgaaaagcgcactgagccaggctggagtttttgcgaatacttcatggtgcaagaagagcttgctttcgttttcgagatgctacagcagtttgaggatgccttagtccaatatgacgagttggacgccctattctcccaatacgtggtgaacttcggagcgggggacggggcaaactggctgacattcttctgtcaacctgttaagtcatggaatggcctaatcctccgcaagcccattgacatggaaaagagagagagtattcaaagacgagaagctaccttgttagatctgagatcctatctgtttagtagacagtgtaccctgctgctctttttgcagaggccatgggaagtcgctcagcgggccctggagctgctgcacaattgtgtccaggagcttaagctccttgaagtctcagtaccccccggcgctcttgattgttgggttttcctctcatgtctggaagtactgcaacgaatcgagggttgctgtgaccgcgctcagattgatagtaacatagcccacactgtgggtctgtggtcctacgccacggagaagctgaaaagcttgggatatctgtgtggtctcgtgtctgaaaaagggcctaactcagaggatcttaataggacagtggacttgctggctggtctgggggcagaacggccagagaccgcaaataccgcccaatcgccatacaaaaagctgaaggaggcattgtctagtgtcgaagcgttcgaaaagcactatctggatctttcacatgcgactatcgaaatgtatacaagcattgggcggatccgctctgccaaatttgtgggtaaagacctcgcagagttttacatgaggaagaaagcaccccaaaaagcagagatctacttgcaaggcgcacttaagaattatctcgccgaaggctgggctctccccataacgcacactcgcaaacagcttgccgagtgccagaagcacctggggcagattgagaattatctccagacttcctcactcttggcttcagaccatcatttaacagaggaggaaaggaagcacttctgccaggaaatcttggatttcgcctcccagcccagcgactcgccaggacacaagatcgtgctgccaatgcactcgtttgctcagcttcgggatctccattttgatccctcaaatgccgtagtgcacgtgggaggtgtcctgtgtgtcgaaattacaatgtattcacagatgcctgtcccagtgcacgtcgagcagattgtggttaatgttcactttagtatcgagaagaacagctatcgtaaaacagcggagtggcttactaagcataagactagcaatggcattatcaactttccccctgagactgccccctttcccgtctcgcaaaacagtcttccagctttggaattgtacgagatgtttgagagaagcccatccgataatagcctgaataccacaggcatcatctgccgcaatgtgcacatgctactcaggaggcaggagtcctcttcaagcctcgaaatgcccagcggggtcgcactggaagagggcgcccacgtgctgaggtgctcccacgtaaccttggagccaggggcaaaccagatcacctttcgcacccaggccaaagaaccagggacctatacgctgaggcaactgtgcgctagcgtagggtccgtctggttcgttctgccccatatttaccctattgtgcagtatgatgtctattctcaggagccccaactccacgtcgagccgctggctgatagtctcttggctggcatcccgcagcgtgtgaagttcacagtcactacaggccactataccattaagaacggcgacagtctgcagctgtccaacgctgaggccatgcttattttgtgccaagcggagagcagagcagtagtgtacagcaatactcgcgaacagtcttccgaggccgctcttcgcattcaaagttccgacaaggtgaccagtatatctttgcctgttgcccccgcataccatgtgatagaatttgagcttgaagtgctcagtttaccaagtgcccccgctttgggcggcgaatccgacatgcttggtatggctgagccgcatcgcaagcataaggataagcagcgtactggtcgttgtatggtcacaacggaccataaggtgagcatcgactgcccgtggtccatttactcaacagttatcgcattgaccttctccgtgccgttcaggacaacccacagcctcctgtcttctggcacacgcaagtacgtgcaagtctgtgtgcagaatctctccgaacttgacttccagctgtcggacagttatctggtggacacaggcgacagcaccgatctccagctggtccccttgaacacccaatcccagcagccaatttacagcaaacaaagtgttttttttgtgtgggaacttaagtggacggaagagccaccccctagcttgcactgccgcttctccgttggtttcagccctgcctcagaggagcagttgagtatttcattgaaaccttacacatatgagttcaaggtggagaatttcttcactctttacaatgtgaaggcagagatattcccgccgtccggcatggagtattgccggacaggtagcctgtgtagtctggaggtccttatcactaggctttcggacttattggaagtggacaaggatgaggctctaacagaatccgatgagcatttctctaccaagttgatgtatgaggttgtcgataactcttctaattgggccgtgtgtggtaaatcatgtggcgtgatctctatgcccgtggcagcccgagcaacccatcgagtgcatatggaagtcatgccgcttttcgctggctacctgccactgccagacgttcgtctgtttaagtacctgccacatcatagtgcacatagctcacagctcgacgcagactcatggattgagaacgacagtctcagcgtggacaagcatggtgacgatcagcccgactccagctctttaaagagccgagggtccgtgcattccgcttgttcatccgagcacaaaggcttgcccatgcctcgtctccaggcactacctgcaggccaggttttcaactcctccagcgggacacaggtactggttattccttcacaggacgaccatgtcctggaggtttcagtaacatag

SEQ ID NO: 136943 - DNA, 3780 bp, Artificial Sequence
  derived and/or modified sequence
atggatgcatccgaagaacccctgccaccagtgatttataccatggaaaacaaaccaatcgtgacctgcgcgggtgaccagaatctcttcacatccgtctatcccaccctatctcagcagctgcctagagagccaatggaatggcgccgtagctatggcagggcccctaagatgattcacctggagtctaattttgtacagtttaaagaagagctgctacctaaagagggcaacaaggctctgctgacctttccgttcctgcatatctattggacggaatgctgtgacaccgaggtgtacaaggctacagtgaaagatgacttgactaaatggcagaacgtgctcaaggcccactcttccgtggactggctgatagtgatcgtggagaatgatgccaagaagaaaaataaaacgaacatactgccacgtacttcaatagttgacaagattcgtaatgatttttgtaacaaacaatccgacaggtgtgtggttctgagtgaccctctcaaggactcatcaaggacgcaagagagttggaacgcctttctcaccaaactcagaactctgttactcatgagcttcacaaaaaatttaggcaaattcgaggacgacatgcggacacttagggagaaacgcacggagccgggatggtccttctgtgaatatttcatggtccaggaagagctcgccttcgtcttcgagatgctgcagcaattcgaggacgccttggtccagtacgatgaactggacgccttattctcgcagtacgtggttaactttggagctggggatggagcaaattggttgacatttttctgccagccggtgaagagttggaacggattgattctgagaaagcctattgacatggaaaagcgggagtctattcaacggagagaggccacacttttggatctgcgcagttatctgtttagtaggcagtgtaccctgttgttgttcttacagcggccatgggaggtagcccagcgagccctggagcttctgcataactgcgttcaggagttgaagctgctcgaagtgagcgtgcccccaggagccttggactgttgggttttcctctcctgcttagaggtgctccagcgcatcgaagggtgctgtgatcgggcacagattgactccaacatagcccataccgtgggattgtggtcatacgccactgagaagctgaagtccctgggttatctatgcggactggtaagcgaaaaaggacccaactcagaagacttgaatcgaaccgtcgacctcctcgctggactcggagccgaacgtcctgagaccgccaataccgctcagtctccatacaaaaagctcaaggaagctctttcctctgtggaggctttcgagaaacactacctggatctgtcgcacgccacaatcgagatgtacacaagcatcggtcgcatccgcagcgctaagtttgtcggaaaagatcttgcagagttctatatgcgaaaaaaggcccctcagaaggccgagatctatctgcagggcgcactgaagaattatttggccgagggctgggcgctgcccattactcatacacggaaacaattggccgagtgccaaaaacatctaggacagatcgagaactatctccaaaccagctccctactcgcaagcgatcatcatctcactgaggaggagcgcaagcacttctgccaggagattctcgacttcgcctctcagccaagcgattctcccggacataagattgttctccccatgcacagctttgctcagctccgggacctgcatttcgacccatccaatgcggtggtgcacgtgggtggcgtgctgtgtgtggaaatcactatgtacagccagatgccagtaccagttcacgtcgagcagatcgtggtgaacgtgcatttcagcattgagaagaattcttacagaaagacagctgagtggctcaccaaacacaagacctccaatggaataatcaacttcccccctgaaactgcccctttccccgttagccagaacagcctccctgcactggaattgtacgagatgtttgagcggtctccttccgacaattctttgaacaccacgggaatcatatgcagaaacgttcatatgctgttacggaggcaggagagctcttccagtctcgaaatgccctccggggtcgctctggaggaaggagcgcacgtgttgcgctgctctcacgtgacactggaaccaggggcaaatcaaatcactttcagaacacaggcaaaagagccaggcacatacactctcaggcagctttgtgcttccgtgggcagcgtgtggtttgtgttaccccacatttaccctatcgtccagtatgacgtgtatagccaggagccccagctgcatgtcgagcctcttgcagattcgctcttagccggaatcccccagagagtcaagtttacggtgactacagggcattacacaatcaagaatggggatagccttcagctgtctaacgctgaggctatgctgatcctgtgccaggcagaatccagggccgtggtgtacagtaatacgcgtgagcagagcagcgaagcagcgctgagaatacagtccagcgataaagtcacctcaatttccctgccagtggcacccgcatatcacgtaatagagttcgaactggaggttctgtccctcccaagcgcccctgctttgggaggcgagagcgacatgctcgggatggccgaaccacataggaaacacaaagataaacaacgtacaggacggtgcatggtaaccacggatcataaagtctctatcgattgtccttggtccatctacagcacagtaattgctctgacattcagcgtcccattccgcacaactcatagtctgctgtcctcaggaacacgcaagtatgtgcaggtctgcgtgcaaaatcttagtgagctagattttcaactctcagattcttatctggtggacaccggcgatagcactgacttgcagctggtacctctcaatactcagtctcagcagcctatttatagcaaacagagcgttttcttcgtatgggagttgaagtggaccgaggaaccaccacctagcctccactgcaggttttccgttggtttcagcccagctagcgaagaacagctcagcatctctctcaagccctacacatacgagtttaaggtcgaaaacttctttaccctgtataatgtgaaggcggaaatttttcctccttctgggatggaatactgccgaacgggctctctgtgttcattggaggtcttgatcacaagacttagcgacctgttagaggtggacaaagacgaagcgctaacagagtccgacgaacacttcagtaccaagctgatgtacgaagtggttgacaactcctctaattgggcagtgtgcggtaaaagctgcggcgtgatctccatgccagtagctgctcgcgctacgcaccgtgttcacatggaagttatgcctctgtttgctggttatctgccgcttcccgatgtgcgtttgtttaagtacctacctcatcacagtgcccacagtagccaattggatgctgactcctggatcgaaaacgacagccttagtgtggataagcacggggacgatcaacccgattcatctagcctcaagagcagagggagcgttcactccgcgtgcagctccgaacacaaggggctgccaatgccccgactccaggccctccccgctggccaggtctttaactcgtcttccggaactcaggtgttggtgattccgagtcaggatgatcatgtcctcgaggtgtcggttacctag

SEQ ID NO: 136944 - DNA, 6976 bp, Artificial Sequence
  derived and/or modified sequence
ccggaagtggctgaggccggcagcagcgggcggcagctgcggcgcaaccggctccggagctgcctggcgcggccgggcgggcggcgccgctcaggctcgggctccggctgggcccggcgcggcctcggggctgcccatggggcgcggggggccgggccggtgacgccggacgcccatggacgcctctgaggagccgctgccgccggtgatctacaccatggagaacaagcccatcgtcacctgtgctggagatcagaatttatttacctctgtttatccaacgctctctcagcagcttccaagagaaccaatggaatggagaaggtcctatggccgggctccgaagatgattcacctagagtctaactttgttcaattcaaagaggagctgctgcccaaagaaggaaacaaagctctgctcacgtttcccttcctccatatttactggacagagtgctgtgataccgaagtgtataaagctacagtaaaagatgacctcaccaagtggcagaatgttctgaaggctcatagctctgtggactggttaatagtgatagttgaaaatgatgccaagaaaaaaaacaaaaccaacatccttccccgaacctctattgtggacaaaataagaaatgatttttgtaataaacagagtgacaggtgtgttgtgctctccgaccccttgaaggactcttctcgaactcaggaatcctggaatgccttcctgaccaaactcaggacattgcttcttatgtcttttaccaaaaacctaggcaagtttgaggatgacatgagaaccttgagggagaagaggactgagccaggctggagcttttgtgaatatttcatggttcaggaggagcttgcctttgttttcgagatgctgcagcagttcgaggacgccctggtgcagtacgacgaactggacgccctcttctctcagtatgtggtcaacttcggggccggggatggtgccaactggctgacttttttctgccagccagtgaagagctggaacggattgatcctccgaaaacccatagatatggagaagcgggaatcgatccagaggcgagaagccaccctgttagatctgcgcagttacctgttctctcgccagtgcaccttgctgctcttcctgcagaggccgtgggaggtggcccagcgcgccctagagctgctgcacaactgcgtgcaggaactgaagctcttagaagtctctgtcccacctggtgctctggactgctgggtgtttctgagctgtctggaggtgttgcagaggatagaaggctgctgtgaccgggcacagatcgactcaaacattgcccacactgtggggctatggagctatgccacagaaaagttaaagtccttgggctatctatgtggacttgtgtcagagaaaggacctaactcagaagatctcaacaggacagttgaccttttggcaggtttgggagctgagcgaccagaaacagccaacacagctcagagtccttataagaaactgaaagaagcattatcgtcagtggaagcttttgaaaaacactacttagatttgtcccatgccaccattgaaatgtatacaagcattgggaggattcgatctgctaagtttgttggaaaagatctggcagagttttacatgaggaaaaaggctccacaaaaggcagaaatctatcttcaaggagcactgaaaaactacctggctgagggctgggcactccccatcacacacacaaggaagcagctggccgaatgtcaaaagcaccttggacaaattgaaaactacctgcagaccagcagcctcttagccagtgaccaccacctcactgaagaggagcgcaagcacttctgccaggagatacttgactttgccagccagccgtcagacagcccaggtcataagatagtgctacccatgcattcctttgcacaactgcgagatctccattttgatccctccaatgccgtggtccacgtgggcggcgttttgtgcgttgagataaccatgtacagccagatgcctgtgcctgttcacgtggagcagattgtggtcaatgtccacttcagcattgagaaaaacagctaccggaagactgcggagtggcttaccaagcacaagacgtccaatgggatcattaactttccacccgagaccgcacctttccctgtatcccaaaacagtttgcccgcgctggagttgtatgaaatgtttgagagaagcccatctgataactccttgaacacgactgggattatctgcagaaacgtccacatgctcctgagaaggcaggagagcagctcctctctagagatgccctcaggggtggctctggaggagggtgcccacgtgctgaggtgcagccacgtgaccctggaaccaggggccaaccagataacattcaggactcaggccaaggaacctggaacgtatacactcaggcagctgtgcgcctcggtgggctccgtgtggttcgtcctccctcacatctaccccattgtgcagtacgacgtgtactcacaggagccccagctgcacgtggagccgctggctgatagccttctggcaggcattcctcagagagtcaagttcactgtcactaccggccattatacgataaagaatggagacagcctgcagcttagcaatgccgaagccatgctcatcctgtgccaggcggagagcagggctgtggtctactccaacacgagagaacagtcttctgaggccgcgctccggattcagtcctccgacaaggtcacgagcatcagtctgcctgttgcgcctgcgtaccacgtgatcgaatttgaactggaagttctctctttaccttcagccccagcactcggaggggagagtgacatgctggggatggcagagccccacaggaagcataaggacaaacagagaactggccgctgcatggttaccacagaccacaaagtgtcgattgactgcccgtggtccatctactccacagtcatcgcactgaccttcagcgtacccttcaggaccacacacagcctcctgtcctcaggaacacggaaatatgttcaagtttgtgtccagaatttgtcagaacttgactttcagctgtcagatagttatcttgtagataccggtgatagtaccgacctgcaactagtaccactgaacacgcagtcccagcagcccatctacagcaagcagtcggtgttcttcgtctgggaactcaagtggacagaagagcctcccccttctctgcattgccggttctctgttggattttccccagcttctgaggaacagctgtctatctccttaaagccgtatacttatgaatttaaagtggaaaatttttttacattatacaacgtgaaggctgagatctttcccccttcgggaatggagtattgcagaacaggctccctctgctccctggaggttttgatcacgaggctctcagacctcttggaggtggataaagatgaagcactgactgaatctgatgagcatttttcgacaaagcttatgtatgaagttgtcgacaacagtagcaactgggcagtgtgtgggaaaagctgcggtgtcatctccatgccagtggctgctcgggccactcacagggtccacatggaagtgatgccgctcttcgccgggtatctccccctgcccgacgtcaggctgttcaagtacctcccccatcattctgcacactcctcccaactggacgctgacagctggatagaaaacgacagcctgtcagtagacaagcacggggacgaccagccggacagcagcagcctcaagagcaggggcagcgtgcattcggcctgcagcagcgagcacaaaggcctacccatgccccggctgcaggcactgccggccggccaggtcttcaactccagctcgggcacacaagtcctggtcatccccagccaagatgaccacgtcctggaagtcagtgtaacatgacaacgccagggtgaacacacgccacttcccagctaggagtgcactttatgggactgtgactggactcttccgttctggctccagccagaccttcagtggtcctgcctggccgtggggacatcagagagtgtcatcacgcagctggccagctgagttctgttgttgttttcatgccgcctgtgatctcagattcctgcttttctcaccccgtccccatgctggtgtccgacgccgcttactcagagccctggcctccctccccctacctcacacgctgctcatgaaagtttccacccacgctgtctccacggaacagcctccgtctgctggctcttcgtggaaggccatttgtctttcaggtagacactcagcagccctcacggtcttagtgacgtgtgtgcctttctggtcacacagctgcccagtttcctgatcggggtggatttgtgtcccctaaggggtaaaacagccgtttaccgcagatcctctcattgtgcttttctagaataacacccttctaggggaggcgggtgggggagggagggatcataaccccttctgtgccttgggatgccggagctgggggacctggaggcccatcagccggagccacgtgaaaggtactgaagaaagctgagacccggctgtgaggagcgcctcagcggtgaggtggtttagggataaatgtttctggaaccctgtggtcccccataatgttgatagaatatcatatgcactgggagttaaatatatttaatttaatgatcattatatatgtgggggttaatatgttgtttttctgtccctttaaagtctttacatgtaattgtagctgtataatcgttatttttcttttgcatcttaagtcttagaaattaagatattccatcgtgaggatgagagaggtcctcagtgtgtttttggtctggttgtagggaaggactcaagtcctggaatgtcctccactggtctactgagttgcagtcacactgttccaatggattatttgctttcggttgtaaatttaattgtacatatggttgatttattatttttaaaaatacagactaactgatgtaatgtttatgtataagttgcaccaaaaatcaaggacaaaaataagtgtgtttgtttttacaggtgtgaaagtcacagcttgtaaataagtgttgtatgtattaaaccttttccagttctccaaagcgatgtatttttgtacacttgaaatagagtactcttaatttactgggcaaatgtgcttggaattgaacttgacaagattagctcaagcagatagagtcgggtccagcagtgggtggccctcgtgtgaatccccgtggatgtgcaagttgtggagagaaggagcaccgggttcctgcccagcactgtgcttgcgggaggcggtggggcatgggaggaaggaggcacagaccggggaaatatgacagccgtcatttccagtattctctgtgttgtcttttagctcattcaataaataaaggtggtgtgatttttttttcctcctgtctttttcatttgtagaaactggagacgtgtaaagaagataaataattgtgtaattaaactttccagaaatttatcttcctcatgtgcagtttaacaaacttggtcaaactagttagcaaattagaacttcagaatctaatgatagtttagggtttctaaaataaggttttttattgtaaaaattgacgattgccctgcatttctaccaagtcctgtgaataaagagatgggagatttgattccgtcagaagagactgtaatccgtgtcgtcagcctgggagccttccccagtgtaatgtagctttctctcttaccttctggaagagggaatgtttcatttattactgtttgattttcttgtatctggttctactcccaggatgaaattatccaactacatatatatttagaggaagaaagtgaaggggaaatttaaaatgtttacggcgcttaattgcctggaaatgaaatgaaatcaaatttatcagtttttttccccctaattacccaaaagatcttttgcaaactatgttacatgaatgcttctgcctctttaagacaaagaagaatgtcacccaaaattgtcatttttttcttaatgttcatcataaaagtcctaaaagagtaactgtaattggatgtttattgtttttatctaaagtaaggtgtatgtgtttgagacaagctggttttgttgataaagagatgttaaataattgtgaagccagatatgcaatgtgtatctgaaaagcaaggaatttgcagccgttttacaaatatctgtggaacatgtaaatactgtcaaatggaaaataaaataagttataatttttgtgaatttcatgggatgtcctatgattggaaaaattataactcttctgattctaatgtggaaattgttgtatttaatctgaaaatgactttacctacaacagttccattgtcagcacagcctaggaaggtcagatcctgtattaattactcttagtggagatgccagatatcccatacagaattagcagagaaaatacacacaggcttctattcaaattttctttagtgcttaaaattaagttttaaaatgaaatcagacactgcaggtttgtatataaaatgaaaagctatactactttttacaaaagggcaaactgggctgatgtaaatgttttactttcaactgtgttctttaaaataaatcctacctggtttttaaattttatttttcatgaaaatgctcctttctctacatttattcatcctatatacatcaggctgtaagaccccccccagtcatcattaatacaatgtgttgggattctgtgactggaaaaggtgacaagttggtgactttgacactgcaggtattccattttcatggtttactatgaaaagtcatttttcatattatgtaatatattgttagattaaaaccattgtattaagactttaaaatgtaagcattgtaattctgaaaatacacattttaagaagaaa

SEQ ID NO: 136945 - protein, 694 aa, Artificial Sequence
  derived and/or modified sequence
MPEFLEDPSVLTKDKLKSELVANNVTLPAGEQRKDVYVQLYLQHLTARNRPPLPAGTNSKGPPDFSSDEEREPTPVLGSGAAAAGRSRAAVGRKATKKTDKPRQEDKDDLDVTELTNEDLLDQLVKYGVNPGPIVGTTRKLYEKKLLKLREQGTESRSSTPLPTISSSAENTRQNGSNDSDRYSDNEEGKKKEHKKVKSTRDIVPFSELGTTPSGGGFFQGISFPEISTRPPLGSTELQAAKKVHTSKGDLPREPLVATNLPGRGQLQKLASERNLFISCKSSHDRCLEKSSSSSSQPEHSAMLVSTAASPSLIKETTTGYYKDIVENICGREKSGIQPLCPERSHISDQSPLSSKRKALEESESSQLISPPLAQAIRDYVNSLLVQGGVGSLPGTSNSMPPLDVENIQKRIDQSKFQETEFLSPPRKVPRLSEKSVEERDSGSFVAFQNIPGSELMSSFAKTVVSHSLTTLGLEVAKQSQHDKIDASELSFPFHESILKVIEEEWQQVDRQLPSLACKYPVSSREATQILSVPKVDDEILGFISEATPLGGIQAASTESCNQQLDLALCRAYEAAASALQIATHTAFVAKAMQADISQAAQILSSDPSRTHQALGILSKTYDAASYICEAAFDEVKMAAHTMGNATVGRRYLWLKDCKINLASKNKLASTPFKGGTLFGGEVCKVIKKRGNKH

SEQ ID NO: 136946 - DNA, 2085 bp, Artificial Sequence
  derived and/or modified sequence
atgcccgagttcctggaggaccccagcgtgctgaccaaggacaagctgaagagcgagctggtggccaacaacgtgaccctgcccgccggcgagcagagaaaggacgtgtacgtgcagctgtacctgcagcacctgaccgccagaaacagaccccccctgcccgccggcaccaacagcaagggcccccccgacttcagcagcgacgaggagagagagcccacccccgtgctgggcagcggcgccgccgccgccggcagaagcagagccgccgtgggcagaaaggccaccaagaagaccgacaagcccagacaggaggacaaggacgacctggacgtgaccgagctgaccaacgaggacctgctggaccagctggtgaagtacggcgtgaaccccggccccatcgtgggcaccaccagaaagctgtacgagaagaagctgctgaagctgagagagcagggcaccgagagcagaagcagcacccccctgcccaccatcagcagcagcgccgagaacaccagacagaacggcagcaacgacagcgacagatacagcgacaacgaggagggcaagaagaaggagcacaagaaggtgaagagcaccagagacatcgtgcccttcagcgagctgggcaccacccccagcggcggcggcttcttccagggcatcagcttccccgagatcagcaccagaccccccctgggcagcaccgagctgcaggccgccaagaaggtgcacaccagcaagggcgacctgcccagagagcccctggtggccaccaacctgcccggcagaggccagctgcagaagctggccagcgagagaaacctgttcatcagctgcaagagcagccacgacagatgcctggagaagagcagcagcagcagcagccagcccgagcacagcgccatgctggtgagcaccgccgccagccccagcctgatcaaggagaccaccaccggctactacaaggacatcgtggagaacatctgcggcagagagaagagcggcatccagcccctgtgccccgagagaagccacatcagcgaccagagccccctgagcagcaagagaaaggccctggaggagagcgagagcagccagctgatcagcccccccctggcccaggccatcagagactacgtgaacagcctgctggtgcagggcggcgtgggcagcctgcccggcaccagcaacagcatgccccccctggacgtggagaacatccagaagagaatcgaccagagcaagttccaggagaccgagttcctgagcccccccagaaaggtgcccagactgagcgagaagagcgtggaggagagagacagcggcagcttcgtggccttccagaacatccccggcagcgagctgatgagcagcttcgccaagaccgtggtgagccacagcctgaccaccctgggcctggaggtggccaagcagagccagcacgacaagatcgacgccagcgagctgagcttccccttccacgagagcatcctgaaggtgatcgaggaggagtggcagcaggtggacagacagctgcccagcctggcctgcaagtaccccgtgagcagcagagaggccacccagatcctgagcgtgcccaaggtggacgacgagatcctgggcttcatcagcgaggccacccccctgggcggcatccaggccgccagcaccgagagctgcaaccagcagctggacctggccctgtgcagagcctacgaggccgccgccagcgccctgcagatcgccacccacaccgccttcgtggccaaggccatgcaggccgacatcagccaggccgcccagatcctgagcagcgaccccagcagaacccaccaggccctgggcatcctgagcaagacctacgacgccgccagctacatctgcgaggccgccttcgacgaggtgaagatggccgcccacaccatgggcaacgccaccgtgggcagaagatacctgtggctgaaggactgcaagatcaacctggccagcaagaacaagctggccagcacccccttcaagggcggcaccctgttcggcggcgaggtgtgcaaggtgatcaagaagagaggcaacaagcactag

SEQ ID NO: 136947 - DNA, 2085 bp, Artificial Sequence
  derived and/or modified sequence
atgcctgagttcttagaggatccaagcgtcctgaccaaagacaaacttaaaagcgaactcgtggctaacaacgtcaccctccctgcaggcgaacaaaggaaagatgtgtatgtgcaactatacttgcaacacctaacagccaggaatcgccctcccctgccagctggaactaacagcaagggccctcctgacttcagctccgacgaagagcgtgaacctacaccagtactgggcagcggtgcagcagccgctgggcgctctcgcgccgcagtgggcagaaaggccaccaaaaaaaccgacaaaccccgccaggaggataaggatgacctggacgtcacagaactgaccaatgaagacctgctcgaccagctggtcaaatatggcgtgaatccaggtcctatcgtgggcaccacccggaaactgtacgaaaagaaactccttaagctccgagagcagggcaccgaatccagatcttctactccactcccaaccatctctagcagcgctgaaaacacgagacagaatggatctaatgatagcgaccgctactctgacaatgaagagggcaaaaagaaagagcataaaaaggtgaagtctactcgagacatcgtgcccttctccgagctcgggacaacccccagtggagggggtttttttcaggggatcagcttccccgaaatctccacacggccccctctcggaagcacggagctacaggccgccaagaaggtccacacatccaagggcgacttaccgcgcgaacccctggtggcaactaacttgcccggtagagggcaacttcagaagctggcctcagagcgaaacctctttatttcgtgtaagtcttcacacgataggtgcctggagaagagctcctctagtagctcccagcccgagcactctgccatgctggtttcgacagctgcctcccctagcctcatcaaggaaaccaccacaggatattataaggacatcgtggagaacatctgtggaagagaaaaatccgggatccagccactgtgccccgagcgatctcatatcagcgatcagagccctctctccagtaagaggaaagcgttggaagaaagtgagagcagccagttgatcagtcccccattagcccaggccatccgcgactacgtgaactccctgctcgtccagggcggtgtcgggtcactgcccgggacttccaatagcatgcccccactggatgtggagaacattcagaagcggatcgatcagagtaagtttcaggagaccgaattcctcagcccaccccgaaaggtgccaaggttgtcggagaagtccgttgaagagcgggactcaggctcattcgttgcattccagaacatacctgggtccgaactgatgtcgtcctttgccaagacggtggtctcgcattcacttacgaccctgggattagaggtcgccaaacagtcacagcacgacaagattgatgcttccgagttgagttttccgttccacgaaagcattttgaaagtgatcgaagaggaatggcagcaggtagataggcagctgcccagcctcgcgtgtaagtacccagtgtctagcagggaggctacccagatactctcagtgcctaaagtcgatgatgaaatcctgggatttatttccgaggcaactccactaggcggtatacaggctgcaagcaccgagtcttgtaatcaacagctggacctagctttgtgtagagcttacgaggctgccgcatcggctcttcaaatcgcgacacacacggcctttgtcgctaaggccatgcaagcagatatctcccaggccgcacagatactgtccagtgacccatcccggacccaccaagctcttggcatactgtctaaaacgtacgacgccgcctcttacatctgcgaggccgcctttgatgaagttaagatggctgcccatacaatgggtaatgcaacagtaggacggcggtatctttggctcaaagactgcaagatcaacctcgcatccaaaaataaattagcctctactccatttaagggtggcactttatttgggggggaagtgtgcaaagtgatcaaaaaacgcggtaataagcactag

SEQ ID NO: 136948 - DNA, 2085 bp, Artificial Sequence
  derived and/or modified sequence
atgcctgagttcctggaggaccccagcgtgctgaccaaggacaagctgaagtctgagctggtggccaacaacgtgaccctgcctgctggggagcagaggaaggatgtgtatgtgcagctgtacctgcagcacctgacagccaggaacagaccacccctgcctgctggcaccaacagcaagggccccccagacttcagcagtgatgaggagcgggagcccacccctgtgctgggcagcggggctgctgctgctggccgcagcagagctgctgtgggcaggaaggccaccaagaagacagacaagccccggcaggaggacaaggatgacctggatgtgacagagctgaccaatgaagacctgctggaccagctggtgaagtatggagtgaaccctggccccatcgtgggcaccaccaggaagctgtatgagaagaagctgctgaagctgcgggagcagggcacagagagccgcagcagcacccccctgcccaccatcagcagcagcgctgagaacacccggcagaatggcagcaatgacagcgaccgctacagcgacaatgaggagggcaagaagaaggagcacaagaaggtgaagagcacccgggacatcgtgcccttcagcgagctgggcaccacccccagcggcggcggcttcttccagggcatctccttccctgagatcagcaccaggcctcccctgggcagcacagagctgcaggccgccaagaaggtgcacaccagcaagggggacctgccccgggagcccctggtggccaccaacctgcccggccggggccagctgcagaagctggccagcgagaggaacctcttcatcagctgcaagagcagccatgaccgctgcctggagaagagcagcagcagcagcagccagcctgagcacagcgccatgctggtgtccacagctgccagccccagcctcatcaaggagaccaccaccggctactacaaggacatcgtggagaacatctgtggccgggagaagagcggcatccagcccctgtgcccagagaggagccacatcagtgaccagagccccctgagcagcaagaggaaggccctggaggagagcgagagcagccagctgatcagcccccccctggcccaggccatccgggactatgtgaacagcctgctggtgcagggcggcgtgggcagcctgcccggcaccagcaacagcatgccacccctggatgtggagaacatccagaagagaattgaccagagcaagttccaggagacagagttcctgagcccccccaggaaggtgccccggctgtctgagaagtctgtggaggagcgggacagcggcagctttgtggccttccagaacatccctggcagcgagctgatgagcagctttgccaagacagtggtgagccacagcctgaccaccctgggcctggaggtggccaagcagagccagcacgacaagattgatgccagcgagctgtccttccccttccacgagagcatcctgaaggtgattgaggaggagtggcagcaggtggaccggcagctgcccagcctggcctgcaagtaccctgtgagcagccgggaggccacccagatcctgtctgtgcccaaggtggatgatgagatcctgggcttcatcagcgaggccacccccctgggcggcatccaggccgccagcacagagagctgcaaccagcagctggacctggccctgtgccgggcctatgaagctgctgccagcgccctgcagatcgccacccacacagcctttgtggccaaggccatgcaggccgacatcagccaggccgcccagatcctgagcagtgaccccagcaggacccaccaggccctgggcatcctgagcaagacctatgatgctgccagctacatctgtgaggccgcctttgatgaggtgaagatggccgcccacaccatgggaaatgccaccgtgggccgccgctacctgtggctgaaggactgcaagatcaacctggccagcaagaacaagctggccagcacccccttcaagggcggcaccctgtttggaggagaggtgtgcaaggtgatcaagaagaggggcaacaagcactag

SEQ ID NO: 136949 - DNA, 2085 bp, Artificial Sequence
  derived and/or modified sequence
atgcccgagttcctggaggaccccagcgtgctgaccaaggacaagttgaaatcagagcttgtggcaaacaatgtaaccttgcccgccggtgagcagcggaaagacgtctacgtacagttatatcttcagcacctgaccgctcgtaatagacctccactccctgctgggaccaacagtaagggtccccctgacttcagttccgacgaagagagagagcccacacccgtactcggatctggcgccgcagctgccggtcggagtagggccgcagtcggccgtaaggctacaaaaaaaaccgataaaccgcgtcaggaagacaaagacgatctcgatgtgactgagcttacaaatgaggacctgctggaccagttggtgaagtacggagtgaacccaggaccaatagtgggaacaacgcgaaagctctatgagaagaaacttctgaagctgagagagcagggtacggaatcgcgaagcagcacccccttgcccacaatcagttccagcgcggagaatacccgacaaaatggaagcaacgactccgaccgctacagtgacaatgaagaggggaagaagaaggaacataaaaaggtgaaaagcacccgcgacattgtacccttttctgagctggggacaactccctcgggcggaggatttttccagggcatatcctttcctgagatttcgactcggcctccactcgggagcacggagctccaagccgccaagaaggtgcacacttctaaaggtgacctccccagagaaccactggttgccacaaacctcccaggacgcggtcagttacaaaagctggccagcgagaggaatctctttattagctgtaagagcagccacgacaggtgcctcgagaagtcatctagctcctcctcacaacccgagcactctgccatgttagtgtctacagcggcttctccctccctgattaaagagactacgacgggatactataaagacattgtggagaacatctgcgggcgggagaagtctggcatacagcctttatgtcccgagcgatcgcacatctccgatcaatctcctctaagtagcaaacgaaaggctctagaagagagtgagtcttcacagttgatttcacctcctcttgctcaggctatccgcgactacgtcaactctttactcgttcagggcggagtgggaagtttgccaggcacctctaattccatgccaccattagacgtggagaatatccaaaaacggatcgatcaaagcaagtttcaggagacggagtttctgagcccccctcgtaaagtgcctagactatctgagaaatctgttgaggagagagatagcgggtccttcgtggcattccagaacatcccagggtcagaactaatgagtagcttcgccaaaactgtcgtcagccactctctgacaaccctcgggctagaggtagctaagcagagtcagcacgacaaaattgatgccagcgagctgtccttcccatttcacgagagcatactgaaagttattgaagaagagtggcagcaggttgacaggcaattgcccagtctggcttgtaaatacccggtcagcagccgagaagcaactcagattctatctgtgcccaaagttgatgacgagatcctgggttttattagcgaggctactcccttgggaggcatacaagccgccagcacagagtcgtgtaaccagcagcttgaccttgctctttgccgggcctatgaggccgccgcatcagccctccagatcgcgacacacactgcttttgtagcaaaggccatgcaggcagatatttctcaggcggcacagattctaagcagcgatcccagtcggacccatcaggccctcggaatcttgtcaaagacctacgacgcggcaagctacatttgtgaagccgcatttgatgaagtgaaaatggcagcccataccatggggaacgcaaccgtaggacggcgctatttgtggcttaaagactgcaaaattaatctagcctctaaaaacaagctagcatccactccgtttaagggcgggaccctgttcgggggtgaagtgtgcaaggttatcaagaagagggggaacaagcactag

SEQ ID NO: 136950 - DNA, 2085 bp, Artificial Sequence
  derived and/or modified sequence
atgccagagtttctcgaagaccctagtgtactgactaaagacaagctcaagagtgagctggtagctaataacgtgaccctgcctgctggggagcagcgtaaggacgtgtacgtccagctgtatctgcagcacttgacagcccgaaacagaccccctttgcctgcagggactaacagcaaggggcctccagacttctcatctgacgaggaacgtgaacccacaccagtgctcggcagtggcgctgctgctgcaggccgtagtcgggcagccgtaggcagaaaggctactaaaaaaacagacaagcccagacaggaggataaagacgatctggatgtcaccgagctgacaaacgaggatctgttagaccagttggtgaaatacggggtaaaccctggacccatcgtcggaaccacacgcaaactctacgagaaaaaactccttaaactgcgagaacaggggactgaatctcggagctctaccccactgcctacaatcagtagcagtgccgaaaacacacgacaaaatggcagtaacgactcagatcgttatagtgacaatgaggaggggaagaagaaggagcacaaaaaggtaaagtcaacacgcgatatcgtcccgttcagcgagcttgggaccacacccagcggcggtggattcttccagggtatctctttcccagaaatttctacacgacctcccttaggatctactgaactccaggcagctaaaaaggtgcatacttccaaaggagacctgccacgggagccacttgtggccaccaatttacctggcagagggcagctccagaagctggcatcagagaggaatcttttcatctcctgtaagtcatcacatgatagatgtttagagaaaagttcctcctctagttctcaacccgaacactcagctatgctcgtgtccacagcagcttccccttccctgatcaaggagactaccaccggatattataaggacattgttgagaacatttgcggaagagagaagtcaggcatccagcctctatgtccagagcgaagccatatttccgaccaaagccccctctcaagcaagaggaaggccctcgaagagtcagaaagtagtcagttgattagcccaccgcttgcgcaagccatacgagattatgtcaacagcttacttgttcagggcggagtgggctccctccccggaaccagtaatagtatgccaccactggacgtagagaacatccagaaacggatcgaccagtcaaagtttcaggagacggagttcctttcccccccaaggaaggtgcctagactctctgagaagtccgtggaagaacgggatagcggcagtttcgtcgcattccagaatatcccaggcagtgagctgatgagctcctttgccaaaaccgtagtctcccacagtctgaccactctcgggctggaagtggctaagcagtctcagcacgataagattgacgctagtgaactgtccttccctttccatgaatccatactcaaggtgatagaggaggagtggcagcaagtggatcggcagcttccaagtttagcctgcaagtatcctgtctcctcacgggaagctactcagattctctcagtgccaaaagttgacgatgagatattaggatttatctctgaagcaaccccactgggcggtattcaggcagcaagcacagaatcctgcaatcagcagctggatctggccctttgcagagcatacgaagccgcagccagcgccctacagatagctacgcacactgcatttgtggcgaaggccatgcaagctgacatcagccaggctgctcaaatcctctcttcagacccgtcccggacacaccaggcgttgggaattctcagtaaaacgtacgacgcagcttcttatatctgcgaagccgcttttgatgaagttaaaatggccgctcacaccatgggaaacgctacagtggggagaagatacctgtggcttaaggactgtaaaataaacttagccagcaagaataagctcgctagcaccccatttaaaggcggtaccctgtttggaggggaagtttgcaaagttattaaaaaacggggtaacaagcattag

SEQ ID NO: 136951 - DNA, 3615 bp, Artificial Sequence
  derived and/or modified sequence
gggttggtgcgagcttccagcttggccgcagttggttcgtagttcggctctggggtcttttgtgtccgggtctggcttggctttgtgtccgcgagtttttgttccgctccgcagcgctcttcccgggcaggagccgtgaggctcggaggcggcagcgcggtccccggccaggagcaagcgcgccggcgtgagcggcggcggcaaaggctgtggggagggggcttcgcagatccccgagatgccggagttcctggaagacccctcggtcctgacaaaagacaagttgaagagtgagttggtcgccaacaatgtgacgctgccggccggggagcagcgcaaagacgtgtacgtccagctctacctgcagcacctcacggctcgcaaccggccgccgctccccgccggcaccaacagcaaggggcccccggacttctccagtgacgaagagcgcgagcccaccccggtcctcggctctggggccgccgccgcgggccggagccgagcagccgtcggcaggaaagccacaaaaaaaactgataaacccagacaagaagataaagatgatctagatgtaacagagctcactaatgaagatcttttggatcagcttgtgaaatacggagtgaatcctggtcctattgtgggaacaaccaggaagctatatgagaaaaagcttttgaaactgagggaacaaggaacagaatcaagatcttctactcctctgccaacaatttcttcttcagcagaaaatacaaggcagaatggaagtaatgattctgacagatacagtgacaatgaagaaggaaagaagaaagaacacaagaaagtgaagtccactagggatattgttcctttttctgaacttggaactactccctctggtggtggattttttcagggtatttcttttcctgaaatctccacccgtcctcctttgggcagtaccgaactacaggcagctaagaaagtacatacttctaagggagacctacctagggagcctcttgttgccacaaacttgcctggcaggggacagttgcagaagttagcctctgaaaggaatttgtttatttcatgcaagtctagccatgataggtgtttagagaaaagttcttcgtcatcttctcagcctgaacacagtgccatgttggtctctactgcagcttctccttcactgattaaagaaaccaccactggttactataaagacatagtagaaaatatttgcggtagagagaaaagtggaattcaaccattatgtcctgagaggtcccatatttcagatcaatcgcctctctccagtaaaaggaaagcactagaagagtctgagagctcacaactaatttctccgccacttgcccaggcaatcagagattatgtcaattctctgttggtccagggtggggtaggtagtttgcctggaacttctaactctatgcccccactggatgtagaaaacatacagaagagaattgatcagtctaagtttcaagaaactgaattcctgtctcctccaagaaaagtccctagactgagtgagaagtcagtggaggaaagggattcaggttcctttgtggcatttcagaacatacctggatccgaactgatgtcttcttttgccaaaactgttgtctctcattcactcactaccttaggtctagaagtggctaagcaatcacagcatgataaaatagatgcctcagaactatcttttcccttccatgaatctattttaaaagtaattgaagaagaatggcagcaagttgacaggcagctgccttcactggcatgcaaatatccagtttcttccagggaggcaacacagatattatcagttccaaaagtagatgatgaaatcctagggtttatttctgaagccactccactaggaggtattcaagcagcctccactgagtcttgcaatcagcagttggacttagcactctgtagagcatatgaagctgcagcatcagcattgcagattgcaactcacactgcctttgtagctaaggctatgcaggcagacattagtcaagctgcacagattcttagctcagatcctagtcgtacccaccaagcgcttgggattctgagcaaaacatatgatgcagcctcatatatttgtgaagctgcatttgatgaagtgaagatggctgcccataccatgggaaatgccactgtaggtcgtcgatacctctggctgaaggattgcaaaattaatttagcttctaagaataagctggcttccactccctttaaaggtggaacattatttggaggagaagtatgcaaagtaattaaaaagcgtggaaataaacactagtaaaattaaggacaaaaagacatctatcttatctttcaggtactttatgccaacattttcttttctgttaaggttgttttagtttccagatagggctaattacaaaatgttaagcttctacccatcaaattacagtataaaagtaattgcctgtgtagaactacttgtcttttctaaagatttgcgtagataggaagcctggtacaaacaatttaacgctttctagatcacatattagtctctaagttgttttctgtttcctgctttacttatgtttttacaattctccaaaactaagaaaattctaattaggatataaggagtatttactgttcaatagaataatatgcatcctcctttatacctaggacagaattaaacatttgttacacattcagaacagtgatgttgttctttttgatacttttatctcagtatcttttcacgttccataacttgtccatatttttgctcatattttcttacttttctttgttatttattcatgtctgcaacatcaatcatagtagtctagatcaatgcaactcaaagcaccagtctacaaactgttacttatccacaggcaagataagcatgcacaagaatttaaatctagagatactttttaggtcaatgacaggatttgattttttagcaaaattttattaatagctaaagcaatgtattgatttacactctgatgcaagtaatttatctcttcattgactggtagcaaccaattcatggaccagtaccatggaccacactttgagaaacacttctttggataataatagatatcctgggatagtgcatgttcaccatctattttgtcagataatggggccttttaaaaaataatactttgctttcatgatatattgtattttgtggaaagttaagtttagcaatatagactctaaaagcaaattaaatttttttaagccataagaaattatactatatcccagtatctgtatgtctgtataaagcagtgtattatcatgttttcatttctgtgattgtaagttaagagtcttaactgcagaggtattgtggaaagtagtagccttaagcataataaaatatggtctcttgggtactccctctggccattaccacattcttagattatatgtgtccatctttgcagctttctgagagtaattttatttgttgtcttctgaaatgtacatgtatacatgtacctactgagtgctatgtgatttttaaaaatgtattactgtagaatgcttctgcaaattcaataaagttgttaaatttgaacagtg

SEQ ID NO: 136952 - protein, 202 aa, Artificial Sequence
  derived and/or modified sequence
MELWGAYLLLCLFSLLTQVTTEPPTQKPKKIVNAKKDVVNTKMFEELKSRLDTLAQEVALLKEQQALQTVCLKGTKVHMKCFLAFTQTKTFHEASEDCISRGGTLGTPQTGSENDALYEYLRQSVGNEAEIWLGLNDMAAEGTWVDMTGARIAYKNWETEITAQPDGGKTENCAVLSGAANGKWFDKRCRDQLPYICQFGIV

SEQ ID NO: 136953 - DNA, 609 bp, Artificial Sequence
  derived and/or modified sequence
atggagctgtggggcgcttatttgttactgtgcctgttttccctgttgacacaggtgaccaccgagccccctactcaaaaacctaaaaaaatagtgaatgccaagaaggatgtggtgaataccaagatgtttgaggagctcaaaagtcggctagacaccctggcccaggaagtcgccctcctaaaagagcagcaggccctgcaaactgtgtgcctgaaaggtaccaaagtgcatatgaaatgctttctagcattcacccaaaccaaaacttttcacgaggcctctgaggactgcatctctaggggcggaacgctggggactccccagaccggaagcgagaacgatgctctgtacgagtatcttagacagtctgtggggaacgaagctgaaatttggctcggactaaacgatatggcagccgagggcacctgggttgatatgaccggagctcgaattgcttataagaactgggagacggagatcacagcacagcccgacgggggaaagaccgaaaattgcgcagtcttgtctggcgcagctaatggaaaatggtttgataagcgctgccgggatcagctgccgtatatttgccagtttggaatagtctag

SEQ ID NO: 136954 - DNA, 609 bp, Artificial Sequence
  derived and/or modified sequence
atggagctgtggggggcatacctgctgctttgtctttttagcctcttgactcaggtcaccacagaaccaccgactcaaaagccaaagaaaattgtaaacgctaagaaggatgtggtcaatacgaagatgttcgaagaacttaaatcgcggttggatactttagcccaagaagtggcactcctgaaggaacagcaggcacttcagaccgtgtgcttgaaaggaactaaagtccacatgaagtgcttcctggcattcacccagactaagaccttccacgaggcctccgaagactgtattagcagaggcgggacactgggcaccccccaaaccggatccgagaacgatgccttatacgaatatctgagacaaagcgtgggcaacgaggccgagatttggttgggtctaaatgacatggccgctgaaggtacatgggtggacatgacaggcgctcgaatagcctacaaaaactgggagaccgagataacagctcaacccgacggcggcaaaactgaaaactgcgccgtgttgtcaggagcggccaacggaaaatggttcgataaacgctgcagggaccaactgccatacatctgtcaattcggaatagtgtag

SEQ ID NO: 136955 - DNA, 609 bp, Artificial Sequence
  derived and/or modified sequence
atggaactgtggggagcttacctgctactgtgtttattctcactactgacgcaggtgacgacagaacctcctacccagaagccaaagaagattgtgaacgcaaaaaaagacgtcgttaacacaaaaatgttcgaggagctgaaatcgcgcttagatacattagcccaggaggttgcattactgaaggaacaacaggctttacagaccgtgtgtttgaagggtactaaagttcacatgaaatgctttcttgcattcacacaaactaaaaccttccatgaagccagtgaggactgcattagtcgagggggcacgcttgggacccctcagactgggagcgaaaacgatgcactctacgagtaccttagacagtcagtgggcaacgaagcagaaatatggctgggactaaatgacatggccgccgaaggaacatgggttgacatgacaggtgccagaatcgcatataagaactgggaaactgagattaccgcccagcccgacggcggcaaaactgaaaactgcgccgtactgagtggcgctgctaatggaaagtggtttgataagagatgccgggatcaacttccttacatttgtcagtttgggatcgtgtag

SEQ ID NO: 136956 - DNA, 936 bp, Artificial Sequence
  derived and/or modified sequence
cttctgcaggcttgtgtgtttgttttatttttttggcacgcctgcagccaagttggggagggtttcctggacagaggtcctttggctgctgccttaagacgtgcagcctgggccgtggctgtcactgcgttcggacccagacccgctgcaggcagcagcagcccccgcccgcgcagcagcatggagctctggggggcctacctcctcctctgcctcttctccctcctgacccaggtcaccaccgagccaccaacccagaagcccaagaagattgtaaatgccaagaaagatgttgtgaacacaaagatgtttgaggagctcaagagccgtctggacaccctggcccaggaggtggccctgctgaaggagcagcaggccctgcagacggtctgcctgaaggggaccaaggtgcacatgaaatgctttctggccttcacccagacgaagaccttccacgaggccagcgaggactgcatctcgcgcgggggcaccctgggcacccctcagactggctcggagaacgacgccctgtatgagtacctgcgccagagcgtgggcaacgaggccgagatctggctgggcctcaacgacatggcggccgagggcacctgggtggacatgaccggcgcccgcatcgcctacaagaactgggagactgagatcaccgcgcaacccgatggcggcaagaccgagaactgcgcggtcctgtcaggcgcggccaacggcaagtggttcgacaagcgctgccgcgatcagctgccctacatctgccagttcgggatcgtgtagccggcggggcgggggccgtggggggcctggaggagggcaggggccgcgggaggccgggaggagggtggggaccttgcagcccccatcctctccgtgcgcttggagcctctttttgcaaataaagttggtgcagcttcgcggagagga

SEQ ID NO: 136957 - DNA, 609 bp, Artificial Sequence
  derived and/or modified sequence
atggagctgtggggcgcctacctgctgctgtgcctgttcagcctgctgacccaggtgaccaccgagccccccacccagaagcccaagaagatcgtgaacgccaagaaggacgtggtgaacaccaagatgttcgaggagctgaagagcagactggacaccctggcccaggaggtggccctgctgaaggagcagcaggccctgcagaccgtgtgcctgaagggcaccaaggtgcacatgaagtgcttcctggccttcacccagaccaagaccttccacgaggccagcgaggactgcatcagcagaggcggcaccctgggcaccccccagaccggcagcgagaacgacgccctgtacgagtacctgagacagagcgtgggcaacgaggccgagatctggctgggcctgaacgacatggccgccgagggcacctgggtggacatgaccggcgccagaatcgcctacaagaactgggagaccgagatcaccgcccagcccgacggcggcaagaccgagaactgcgccgtgctgagcggcgccgccaacggcaagtggttcgacaagagatgcagagaccagctgccctacatctgccagttcggcatcgtgtag

SEQ ID NO: 136958 - DNA, 609 bp, Artificial Sequence
  derived and/or modified sequence
atggagctgtggggagcgtacctgctgctttgcctgttttctctcttgacacaggtgacgacggagcccccaacacagaagcccaaaaaaatcgtcaatgctaaaaaggacgtagtgaacacaaaaatgtttgaggagttgaaatcaagacttgatacactggcccaggaagtggccttactcaaagagcaacaggctctgcaaaccgtctgtctcaaaggcaccaaggtgcacatgaaatgctttctggcttttacccagaccaagacgtttcatgaggcctcagaagattgtatctcaaggggaggaacgctgggcacccctcagacaggaagtgagaacgacgctctttatgagtatctgcggcagtccgtcggaaacgaggctgagatctggcttggattgaatgacatggccgcagagggcacctgggtcgacatgactggcgctcgcatcgcctacaaaaattgggagactgaaataaccgcacagccagacggagggaaaaccgaaaattgcgccgtcctgtctggagcggcgaacgggaaatggtttgacaagagatgtcgagaccagttaccctatatttgtcagtttggaatcgtgtag

SEQ ID NO: 136959 - DNA, 609 bp, Artificial Sequence
  derived and/or modified sequence
atggagctgtggggcgcctacctgctgctgtgcctcttcagcctgctgacccaggtgaccacagagccccccacccagaagcccaagaagatcgtgaatgccaagaaggatgtggtgaacaccaagatgtttgaggagctgaagagccggctggacaccctggcccaggaggtggccctgctgaaggagcagcaggccctgcagacagtgtgcctgaagggcaccaaggtgcacatgaagtgcttcctggccttcacccagaccaagaccttccacgaggccagcgaggactgcatcagccggggcggcaccctgggcaccccccagacaggctctgaaaatgatgccctgtatgagtacctgcggcagagcgtgggcaatgaagctgagatctggctgggcctgaatgacatggctgctgagggcacctgggtggacatgaccggggcccgcatcgcctacaagaactgggagacagagatcacagcccagccagatggcggcaagacagagaactgtgctgtgctgtctggagctgccaacgggaagtggtttgacaagcgctgccgggaccagctgccctacatctgccagtttggaattgtgtag

SEQ ID NO: 136960 - DNA, 609 bp, Artificial Sequence
  derived and/or modified sequence
atggagctgtggggcgcctacctgctgctgtgcctgttcagcctgctgactcaggtaacgacagagccccctactcagaaaccaaagaaaatagtcaacgctaaaaaagacgtagttaacacaaaaatgttcgaggaattgaagtcaagactggacactctggcccaggaagtagctctgctgaaagaacaacaggccctccagaccgtctgtctgaagggaaccaaggtgcacatgaaatgtttcctggcgttcactcaaacaaagacctttcatgaggcatcagaggactgcatttcgagaggaggaacacttgggactccacaaaccggatcagaaaacgacgccctctacgagtacctgcggcagagcgttgggaatgaggcggaaatatggctcgggctgaatgatatggctgccgagggcacttgggtggacatgacaggtgcgcgaatagcctacaagaattgggagacagagataaccgcacagccggacggagggaagactgagaattgcgcagtgctgagtggcgccgcgaacggcaaatggttcgacaaaagatgtcgcgatcagctgccctacatttgtcaatttggcatcgtatag

SEQ ID NO: 136961 - RNA, 609 nt, Artificial Sequence
  derived and/or modified sequence
auggagcuguggggggcauaccugcugcuuugucuuuuuagccucuugacucaggucaccacagaaccaccgacucaaaagccaaagaaaauuguaaacgcuaagaaggauguggucaauacgaagauguucgaagaacuuaaaucgcgguuggauacuuuagcccaagaaguggcacuccugaaggaacagcaggcacuucagaccgugugcuugaaaggaacuaaaguccacaugaagugcuuccuggcauucacccagacuaagaccuuccacgaggccuccgaagacuguauuagcagaggcgggacacugggcaccccccaaaccggauccgagaacgaugccuuauacgaauaucugagacaaagcgugggcaacgaggccgagauuugguugggucuaaaugacauggccgcugaagguacauggguggacaugacaggcgcucgaauagccuacaaaaacugggagaccgagauaacagcucaacccgacggcggcaaaacugaaaacugcgccguguugucaggagcggccaacggaaaaugguucgauaaacgcugcagggaccaacugccauacaucugucaauucggaauaguguag

SEQ ID NO: 136962 - RNA, 609 nt, Artificial Sequence
  derived and/or modified sequence
auggaacuguggggagcuuaccugcuacuguguuuauucucacuacugacgcaggugacgacagaaccuccuacccagaagccaaagaagauugugaacgcaaaaaaagacgucguuaacacaaaaauguucgaggagcugaaaucgcgcuuagauacauuagcccaggagguugcauuacugaaggaacaacaggcuuuacagaccguguguuugaaggguacuaaaguucacaugaaaugcuuucuugcauucacacaaacuaaaaccuuccaugaagccagugaggacugcauuagucgagggggcacgcuugggaccccucagacugggagcgaaaacgaugcacucuacgaguaccuuagacagucagugggcaacgaagcagaaauauggcugggacuaaaugacauggccgccgaaggaacauggguugacaugacaggugccagaaucgcauauaagaacugggaaacugagauuaccgcccagcccgacggcggcaaaacugaaaacugcgccguacugaguggcgcugcuaauggaaagugguuugauaagagaugccgggaucaacuuccuuacauuugucaguuugggaucguguag

SEQ ID NO: 136963 - protein, 161 aa, Artificial Sequence
  derived and/or modified sequence
MDDIYKAAVEQLTEEQKNEFKAAFDIFVLGAEDGCISTKELGKVMRMLGQNPTPEELQEMIDEVDEDGSGTVDFDEFLVMMVRCMKDDSKGKSEEELSDLFRMFDKNADGYIDLDELKIMLQATGETITEDDIEELMKDGDKNNDGRIDYDEFLEFMKGVE

SEQ ID NO: 136964 - DNA, 486 bp, Artificial Sequence
  derived and/or modified sequence
atggatgacatctataaggccgcggtcgagcagcttacggaggaacagaagaatgagttcaaggctgcatttgatatcttcgtgcttggggccgaagacgggtgtatcagcacaaaagagcttgggaaagtaatgaggatgctcggacagaatccgacccccgaagagctgcaagaaatgatagatgaggtggacgaggacggaagcggtaccgttgatttcgatgagttcctggtaatgatggtccgctgcatgaaagacgattccaagggaaaaagcgaagaggaactgtccgatctattccgaatgttcgataaaaacgcggatggctacattgatctcgacgagctgaaaatcatgctacaagctaccggcgaaacgatcaccgaggacgacatcgaggaactgatgaaggatggcgacaagaataatgacggcaggattgactacgatgaattcttagaattcatgaagggagtcgaatag

SEQ ID NO: 136965 - DNA, 486 bp, Artificial Sequence
  derived and/or modified sequence
atggatgacatctacaaggctgctgtggagcagctgacagaggagcagaagaatgagttcaaggccgcctttgacatctttgtgctgggcgcagaagatggctgcatcagcaccaaggagctgggcaaggtgatgaggatgctgggccagaaccccaccccagaggagctgcaggagatgattgatgaggtggatgaagatggcagcggcaccgtggactttgatgagttcctggtgatgatggtgcgctgcatgaaggatgacagcaagggcaagtctgaggaggagctgagtgacctcttcaggatgtttgacaagaatgctgatggctacatcgacctggatgagctgaagatcatgctgcaggccaccggggagaccatcacagaagatgacatcgaggagctgatgaaggatggagacaagaacaatgatggaagaattgattatgatgagttcctggagttcatgaagggcgtggagtag

SEQ ID NO: 136966 - DNA, 486 bp, Artificial Sequence
  derived and/or modified sequence
atggacgacatctacaaggccgccgtggagcagctgaccgaggagcagaagaacgagttcaaagcagcctttgacatttttgtgcttggagcagaggatggttgcatctccacaaaggagctgggtaaagtgatgagaatgctgggtcagaaccctactcctgaggagttgcaggaaatgatcgatgaggtggatgaggatggctcaggcacagtagactttgatgaattcctagtaatgatggtcagatgcatgaaggacgattccaaagggaaaagcgaggaagagctgtcagatctcttccgcatgtttgacaagaatgccgacggatacattgatctggatgagctgaaaatcatgttgcaggcgaccggagagaccatcactgaggacgatatcgaagagctgatgaaagacggcgataagaataatgacggaagaattgattacgatgagtttctggagttcatgaagggagttgaatag

SEQ ID NO: 136967 - DNA, 486 bp, Artificial Sequence
  derived and/or modified sequence
atggacgacatatataaggccgctgttgaacaactgaccgaggagcaaaagaacgaattcaaggctgcattcgacattttcgttctcggagccgaggatggatgtatttcgacaaaagaactaggtaaagtcatgcggatgctggggcagaatcccacccctgaggagctacaggagatgattgacgaggtggacgaggatgggagtgggacagtggacttcgatgaattcctggtcatgatggtccggtgcatgaaagatgattccaagggtaagtcagaggaggaactgagcgatctgtttcgtatgttcgataagaacgctgatggatacatcgatttagatgagttgaaaatcatgttgcaggctactggcgaaaccattaccgaagacgatattgaggaactgatgaaggatggagacaaaaacaacgacggacgaattgactacgacgaattcttagagttcatgaagggcgtggagtag

SEQ ID NO: 136968 - DNA, 714 bp, Artificial Sequence
  derived and/or modified sequence
atttaagtcaagggccggctggcaaccccagcaagctgtcctgtgagccgccagcatggatgacatctacaaggctgcggtagagcagctgacagaagagcagaaaaatgagttcaaggcagccttcgacatcttcgtgctgggcgctgaggatggctgcatcagcaccaaggagctgggcaaggtgatgaggatgctgggccagaaccccacccctgaggagctgcaggagatgatcgatgaggtggacgaggacggcagcggcacggtggactttgatgagttcctggtcatgatggttcggtgcatgaaggacgacagcaaagggaaatctgaggaggagctgtctgacctcttccgcatgtttgacaaaaatgctgatggctacatcgacctggatgagctgaagataatgctgcaggctacaggcgagaccatcacggaggacgacatcgaggagctcatgaaggacggagacaagaacaacgacggccgcatcgactatgatgagttcctggagttcatgaagggtgtggagtagatgctgaccttcacccagagctgcctatgcccagcctccaactccagctgagtcctggggttggggagggggtcggggtcccaggacctgagcctggccatgtcctcaaccccaaatcccccgactccctccccagatctgtcctgggggatgcaaataaagcctgctctccc

SEQ ID NO: 136969 - DNA, 486 bp, Artificial Sequence
  derived and/or modified sequence
atggacgacatctacaaggccgccgtggagcagctgaccgaggagcagaagaacgagttcaaggccgccttcgacatcttcgtgctgggcgccgaggacggctgcatcagcaccaaggagctgggcaaggtgatgagaatgctgggccagaaccccacccccgaggagctgcaggagatgatcgacgaggtggacgaggacggcagcggcaccgtggacttcgacgagttcctggtgatgatggtgagatgcatgaaggacgacagcaagggcaagagcgaggaggagctgagcgacctgttcagaatgttcgacaagaacgccgacggctacatcgacctggacgagctgaagatcatgctgcaggccaccggcgagaccatcaccgaggacgacatcgaggagctgatgaaggacggcgacaagaacaacgacggcagaatcgactacgacgagttcctggagttcatgaagggcgtggagtag

SEQ ID NO: 136970 - protein, 187 aa, Artificial Sequence
  derived and/or modified sequence
MPEVERKPKITASRKLLLKSLMLAKAKECWEQEHEEREAEKVRYLAERIPTLQTRGLSLSALQDLCRELHAKVEVVDEERYDIEAKCLHNTREIKDLKLKVMDLRGKFKRPPLRRVRVSADAMLRALLGSKHKVSMDLRANLKSVKKEDTEKERPVEVGDWRKNVEAMSGMEGRKKMFDAAKSPTSQ

SEQ ID NO: 136971 - protein, 187 aa, Artificial Sequence [sequence omitted]

SEQ ID NO: 136972 - protein, 137 aa, Artificial Sequence
  derived and/or modified sequence
MPEVERKPKITASRKLLLKSLMLAKAKECWEQEHEEREAEKVRYLAERIPTLQTRGLSLSALQDLCRELHAKVEVVDEERYDIEAKCLHNTREIKDLKLKVMDLRGKFKRPPLRRVRVSADAMLRALLGSKHKVSMD

SEQ ID NO: 136973 - DNA, 564 bp, Artificial Sequence
  derived and/or modified sequence
atgcccgaggtggagagaaagcccaagatcaccgccagcagaaagctgctgctgaagagcctgatgctggccaaggccaaggagtgctgggagcaggagcacgaggagagagaggccgagaaggtgagatacctggccgagagaatccccaccctgcagaccagaggcctgagcctgagcgccctgcaggacctgtgcagagagctgcacgccaaggtggaggtggtggacgaggagagatacgacatcgaggccaagtgcctgcacaacaccagagagatcaaggacctgaagctgaaggtgatggacctgagaggcaagttcaagagaccccccctgagaagagtgagagtgagcgccgacgccatgctgagagccctgctgggcagcaagcacaaggtgagcatggacctgagagccaacctgaagagcgtgaagaaggaggacaccgagaaggagagacccgtggaggtgggcgactggagaaagaacgtggaggccatgagcggcatggagggcagaaagaagatgttcgacgccgccaagagccccaccagccagtag

SEQ ID NO: 136974 - DNA, 564 bp, Artificial Sequence
  derived and/or modified sequence
atgcccgaggtgcagagaaagcccaagatcaccgccagcagaaagctgctgctgaagagcctgatgctggccaaggccaaggagtgctgggagcaggagcacgaggagagagaggccgagaaggtgagatacctggccgagagaatccccaccctgcagaccagaggcctgagcctgagcgccctgcaggacctgtgcagagagctgcacgccaaggtggaggtggtggacgaggagagatacgacatcgaggccaagtgcctgcacaacaccagagagatcaaggacctgaagctgaaggtgatggacctgagaggcaagttcaagagaccccccctgagaagagtgagagtgagcgccgacgccatgctgagagccctgctgggcagcaagcacaaggtgagcatggacctgagagccaacctgaagagcgtgaagaaggaggacaccgagaaggagagacccgtggaggtgggcgactggagaaagaacgtggaggccatgagcggcatggagggcagaaagaagatgttcgacgccgccaagagccccaccagccagtag

SEQ ID NO: 136975 - DNA, 414 bp, Artificial Sequence
  derived and/or modified sequence
atgcccgaggtggagagaaagcccaagatcaccgccagcagaaagctgctgctgaagagcctgatgctggccaaggccaaggagtgctgggagcaggagcacgaggagagagaggccgagaaggtgagatacctggccgagagaatccccaccctgcagaccagaggcctgagcctgagcgccctgcaggacctgtgcagagagctgcacgccaaggtggaggtggtggacgaggagagatacgacatcgaggccaagtgcctgcacaacaccagagagatcaaggacctgaagctgaaggtgatggacctgagaggcaagttcaagagaccccccctgagaagagtgagagtgagcgccgacgccatgctgagagccctgctgggcagcaagcacaaggtgagcatggactag

SEQ ID NO: 136976 - DNA, 564 bp, Artificial Sequence
  derived and/or modified sequence
atgcccgaagtggaaagaaagcccaaaatcacagccagcagaaagctcttgctgaaatcattaatgcttgccaaggcaaaagagtgttgggagcaggagcacgaggagcgcgaagccgaaaaggtccggtacctggcagaacggatccccactttgcagacacgcggactaagcctatcggcccttcaggacctgtgtagagagctacatgctaaggtggaggttgtggatgaagagagatacgatatcgaggcgaagtgcttgcataataccagagagataaaagatctaaagctgaaggtgatggacctgcgaggaaagtttaaacggccaccgctgagacgcgtacgcgtatccgctgacgcgatgctaagagctctgctgggctcaaaacacaaggtctccatggatttgcgcgccaatctcaaaagtgttaagaaagaggatacagagaaggaacgccccgtagaagtcggcgactggagaaagaatgttgaagccatgtccggaatggaaggacggaagaagatgttcgacgccgcaaagagtcctaccagccaatag

SEQ ID NO: 136977 - DNA, 564 bp, Artificial Sequence
  derived and/or modified sequence
atgccagaggttcaacggaaacctaagattacggcttcaagaaagctgcttctgaagagcctgatgcttgcaaaggctaaagagtgttgggagcaggagcacgaggaaagggaggcagagaaggtaagatatctcgccgagaggattcccaccttacagacccgtgggttgagtttgtctgccttgcaggatctgtgccgggaactgcacgctaaggtcgaagtggttgacgaagaaaggtacgatatagaggcaaagtgcctccacaacacccgggagattaaggaccttaagctcaaggttatggacctgcgcggtaagtttaaaagaccacccctgagaagagtacgagtatcagccgacgcaatgctgcgcgcccttctgggcagtaagcacaaggttagcatggatcttagagcgaatctgaagtccgttaagaaggaggataccgaaaaggagcgcccagtggaggtgggcgattggaggaaaaacgtggaagccatgtccggaatggaaggcagaaagaaaatgtttgacgcagccaagtctcctacatctcagtag

SEQ ID NO: 136978 - DNA, 564 bp, Artificial Sequence
  derived and/or modified sequence
atgcctgaggtggaacggaagcccaaaattacagccagccggaaactcctcctcaaatctctgatgctggcgaaagctaaggagtgttgggagcaggagcacgaagagcgagaggccgagaaagtgcgctaccttgcagaacggatcccaactctccagacgcggggcctcagcctgagcgccctgcaagatctgtgccgtgagctacacgccaaggtcgaagtggtagatgaggagcggtatgatattgaggccaagtgtctccataatactagagaaatcaaagatcttaaactgaaggtgatggacttgcgcggtaagttcaaaagaccccccctgcgccgggttagggtttctgccgatgcaatgcttagggcactgctggggtccaagcacaaggtgagtatggatctgcgcgcgaacctcaagtcagtgaagaaggaggataccgaaaaagagagaccagtggaagtgggcgactggcgtaagaacgtcgaagcgatgtcgggcatggaaggtagaaaaaagatgtttgacgccgctaaatcaccaactagtcagtag

SEQ ID NO: 136979 - DNA, 564 bp, Artificial Sequence
  derived and/or modified sequence
atgccagaggttgaacggaagcccaaaatcaccgcctctaggaaactcttgctgaaatctctgatgctggccaaggccaaagaatgctgggagcaggagcatgaagaacgtgaagccgagaaagtaaggtatctggccgagcgcattcctaccctccaaaccagggggctcagtctgagcgccctgcaggacctctgccgagagcttcacgccaaggtggaagtggtggatgaggaacggtacgatattgaggccaagtgtttgcacaataccagagaaataaaagacttaaagttaaaggttatggacctgagaggcaagtttaaaagacccccgctgcgtagggtgagggtgtctgccgacgcgatgttgcgcgccctgctcgggtctaaacacaaagtttccatggacctcagggccaacttgaagagcgtcaaaaaagaagacactgaaaaggagaggcctgtggaagtcggcgattggaggaagaatgtcgaggccatgagcggcatggaaggacggaagaagatgtttgacgctgccaagagccccacctcacagtag

SEQ ID NO: 136980 - DNA, 564 bp, Artificial Sequence
  derived and/or modified sequence
atgcccgaggtgcagcggaagccaaagatcacagcctctcgcaaactcctccttaaaagtttgatgctcgccaaagcaaaggagtgttgggaacaggaacatgaagagagagaggctgagaaggttaggtaccttgccgaacgcatacctactctccagactaggggattgtccttgtcagctctccaagatttatgccgcgaactgcacgctaaggtagaagtcgtggacgaagaaagatacgacattgaggccaaatgtttgcataacacacgcgagattaaggacctgaagctcaaagtgatggatctcagaggcaaatttaagcgtccgcccctgcgcagagttcgggtatctgctgatgccatgctgagagctctgctgggctcaaaacataaggtttctatggatctgagagcaaacttgaaatccgttaagaaagaagatacggagaaagaacgacctgtggaagtgggggattggagaaagaatgtggaggctatgagcggaatggaggggcgcaagaaaatgtttgacgcagccaagtcacccacaagccaatag

SEQ ID NO: 136981 - DNA, 414 bp, Artificial Sequence
  derived and/or modified sequence
atgcctgaggtggagagaaagcccaagatcactgcctctagaaagttgctgctcaagtcactgatgctcgccaaagctaaggagtgctgggaacaggaacacgaagaaagagaagcggaaaaagtgaggtatctagctgaacggattcctaccctgcagacacgcggcctgtcgctgagcgctctgcaggacttgtgtcgcgagcttcatgccaaagtggaggtggttgacgaagaaagatatgacattgaggccaagtgcctgcataacaccagggaaatcaaagacctaaagctgaaggtaatggatctccgcgggaaattcaaaaggccaccccttcggcgtgttcgggtgagtgccgatgccatgctccgcgccctcctggggagtaagcacaaagtttcaatggattag

SEQ ID NO: 136982 - DNA, 564 bp, Artificial Sequence
  derived and/or modified sequence
atgcctgaggtggagaggaagcccaagatcacagccagcaggaagctgctgctgaagagcctgatgctggccaaggccaaggagtgctgggagcaggagcacgaggagcgggaggccgagaaggtgcgctacctggccgagcgcatccccaccctgcagacccggggcctgagcctgagcgccctgcaggacctgtgccgggagctgcacgccaaggtggaggtggtggatgaggagagatatgacatcgaggccaagtgcctgcacaacacccgggagatcaaggacctgaagctgaaggtgatggacctgcggggcaagttcaagaggcctcccctgcggcgggtgcgggtgtctgcagatgccatgctgcgggccctgctgggcagcaagcacaaggtgtccatggacctgcgggccaacctgaagtctgtgaagaaggaggacacagagaaggagaggcctgtggaggtgggggactggaggaagaatgtggaggccatgagcggcatggagggcaggaagaagatgtttgatgctgccaagagccccaccagccagtag

SEQ ID NO: 136983 - DNA, 564 bp, Artificial Sequence
  derived and/or modified sequence
atgcctgaggtgcagaggaagcccaagatcacagccagcaggaagctgctgctgaagagcctgatgctggccaaggccaaggagtgctgggagcaggagcacgaggagcgggaggccgagaaggtgcgctacctggccgagcgcatccccaccctgcagacccggggcctgagcctgagcgccctgcaggacctgtgccgggagctgcacgccaaggtggaggtggtggatgaggagagatatgacatcgaggccaagtgcctgcacaacacccgggagatcaaggacctgaagctgaaggtgatggacctgcggggcaagttcaagaggcctcccctgcggcgggtgcgggtgtctgcagatgccatgctgcgggccctgctgggcagcaagcacaaggtgtccatggacctgcgggccaacctgaagtctgtgaagaaggaggacacagagaaggagaggcctgtggaggtgggggactggaggaagaatgtggaggccatgagcggcatggagggcaggaagaagatgtttgatgctgccaagagccccaccagccagtag

SEQ ID NO: 136984 - DNA, 414 bp, Artificial Sequence
  derived and/or modified sequence
atgcctgaggtggagaggaagcccaagatcacagccagcaggaagctgctgctgaagagcctgatgctggccaaggccaaggagtgctgggagcaggagcacgaggagcgggaggccgagaaggtgcgctacctggccgagcgcatccccaccctgcagacccggggcctgagcctgagcgccctgcaggacctgtgccgggagctgcacgccaaggtggaggtggtggatgaggagagatatgacatcgaggccaagtgcctgcacaacacccgggagatcaaggacctgaagctgaaggtgatggacctgcggggcaagttcaagaggcctcccctgcggcgggtgcgggtgtctgcagatgccatgctgcgggccctgctgggcagcaagcacaaggtgtccatggactag

SEQ ID NO: 136985 - DNA, 564 bp, Artificial Sequence
  derived and/or modified sequence
atgcccgaggtggagcggaagcccaagatcaccgccagccggaagctccttctgaagtcactgatgttggccaaagctaaagaatgctgggagcaggagcacgaggagcgtgaggctgaaaaagttaggtatctagccgaacgcattccaacactccagacccgcggtctgagcctttctgctctccaggatttgtgtcgggagcttcacgcgaaagtcgaggttgtggatgaggaaagatatgacatagaggctaagtgcctgcacaatacgcgggagattaaggacttgaagttgaaggttatggacctgagaggaaaattcaaacggccacctctgcgtcgggtgagagtgtcagccgatgcgatgctcagagccctacttggttcgaaacataaggtcagcatggaccttagggcgaacctgaagagtgtcaagaaggaagacacagagaaagagagacccgtcgaagtgggcgactggcgaaagaacgtcgaggctatgagtggaatggaaggccgcaagaagatgtttgatgccgccaaatctcctactagccagtag

SEQ ID NO: 136986 - DNA, 564 bp, Artificial Sequence
  derived and/or modified sequence
atgcccgaggtgcagcggaagcccaagatcaccgccagccggaagcttcttctgaaatcgctgatgcttgccaaggcgaaggagtgctgggagcaggagcatgaggaaagagaggctgaaaaggtgaggtacctagccgagcggatccctaccctgcagacacggggacttagcctgagtgcccttcaggacctctgtcgggaactgcacgcaaaggtggaggtggtggacgaagaacgatacgacatcgaggctaaatgcctgcacaatacacgcgaaataaaagacctgaaactgaaggtcatggacttgagaggcaagtttaagcgaccaccactgagaagagtgagggtttcagccgacgccatgctccgggctttgttaggaagcaaacataaggtgagcatggatttaagggccaacctcaaatcagtgaagaaagaggacaccgagaaggagcggcctgttgaggtgggagattggcgcaagaatgtggaggccatgagtggcatggaaggacggaaaaaaatgttcgatgctgcaaaaagccccacgagccagtag

SEQ ID NO: 136987 - DNA, 564 bp, Artificial Sequence
  derived and/or modified sequence
atgcccgaggtggagcggaagcccaagatcaccgccagccggaagctgcttttgaagtccctgatgttggccaaagccaaggagtgctgggaacaagaacatgaggagagagaagccgagaaagtaaggtacttggctgagcggattccaactttacagactcgcggcctatctctctctgcccttcaggacctctgccgggaactgcacgctaaagtggaggtggtggatgaggagaggtacgatatagaggctaagtgtctgcataatactagggaaatcaaggacctgaagttgaaggttatggacctccgcgggaagttcaaaagaccacctctgaggcgtgtccgtgtaagcgctgacgcaatgctcagggcacttctcggttccaagcataaagtttctatggacctgagagctaatctcaaaagtgtgaaaaaggaggataccgagaaagagcgtccagtggaggtgggcgattggagaaagaatgtggaggccatgtcagggatggaggggcgcaagaagatgttcgatgcggctaaatccccaacttcacagtag

SEQ ID NO: 136988 - DNA, 564 bp, Artificial Sequence
  derived and/or modified sequence
atgcccgaggtggagcggaagcccaagatcaccgccagccggaagctcctgttaaagtctctgatgcttgctaaggcaaaagagtgttgggaacaagaacacgaggagcgggaggctgaaaaggttcggtatctggctgagaggatccctaccttgcaaacaaggggattaagcttaagcgccctgcaagatttgtgccgggaactgcatgccaaggtggaagtggttgacgaagagagatacgacattgaagccaaatgtctgcacaatacccgtgagattaaggatttgaaactgaaagttatggatctgcgcgggaaatttaagcggccccccctgaggagggtaagggttagcgcggacgcgatgttgagggcactgctcggatccaagcacaaggtcagcatggacctccgggcaaacctcaaatccgtgaagaaggaggataccgaaaaggagcgtcctgttgaagtgggtgattggcgtaagaacgtagaggcaatgtccggtatggagggtcgcaagaagatgtttgatgctgccaaatccccaacttcccaatag

SEQ ID NO: 136989 - DNA, 564 bp, Artificial Sequence
  derived and/or modified sequence
atgcccgaggtgcagcggaagcccaagatcaccgccagccggaagttgctgttgaaatccctcatgttggctaaggctaaggagtgctgggaacaagaacacgaggagagggaggctgaaaaagtgcgctacctggccgaacgcatcccgactcttcagacccgcggtctgtcactgtctgctttgcaggacctgtgtcgggagctgcatgccaaggtggaggttgtcgacgaagagcgatacgatatcgaagcgaagtgtttacacaacacgcgggagattaaagatttgaaacttaaagttatggatctgagagggaagttcaaaagaccgcctctgcgtagagttcgtgtgtccgccgatgctatgctacgcgctttactcgggagcaagcacaaggtatccatggatctgcgggccaacttgaagtccgtgaagaaggaagacacagagaaggagagaccggttgaagtcggcgactggcgaaagaatgtcgaggccatgtctgggatggaaggtcgaaagaagatgttcgatgcggcgaaatcgcctacatctcaatag

SEQ ID NO: 136990 - DNA, 414 bp, Artificial Sequence
  derived and/or modified sequence
atgcccgaggtggagcggaagcccaagatcaccgccagccggaagctgttgctaaagagtctgatgctcgctaaggcgaaggaatgttgggagcaggagcacgaggagcgggaggccgaaaaggtgaggtacttggcagaaaggattcccactctgcagaccagaggcttgtctctctctgcgctccaggacttatgccgggagctgcatgccaaagttgaggtggtagacgaggaaaggtatgatattgaggctaaatgcctccacaacacaagagagattaaggatcttaagttgaaggtcatggatctcaggggaaaatttaaacggccgcccttgcgccgagttagagtgagcgctgacgcaatgcttagggcgctgcttggctctaagcacaaggtgtccatggactag

SEQ ID NO: 136991 - DNA, 564 bp, Artificial Sequence
  derived and/or modified sequence
atgcctgaggtagaaagaaagccaaagattacagcatctcgaaaactgctactgaagtctcttatgcttgcaaaggctaaagaatgttgggaacaggagcatgaggaaagagaggccgagaaggtaaggtatctcgcggaacggatccctaccctgcagacccggggtctgagcctcagcgcactgcaagacctgtgccgggagctccatgccaaggtggaggtcgtcgatgaagaacgatatgacatagaagccaaatgcctgcataacaccagagagatcaaggatcttaaactgaaggttatggacttaaggggcaaatttaaacggcctccactgcgcagagtccgcgtaagcgcggatgccatgctaagagctctgcttgggtccaaacataaggtgtctatggaccttagagcaaacttgaaatccgtaaaaaaagaggacaccgagaaagagagacccgtggaggtgggcgactggcgcaagaacgttgaagctatgagcggcatggagggtcggaaaaagatgttcgatgcagcaaaatcacccacctcccagtag

SEQ ID NO: 136992 - DNA, 564 bp, Artificial Sequence
  derived and/or modified sequence
atgcctgaggtacagcgcaagcccaaaatcactgcctcccggaagttactgctgaaatctctgatgctggccaaggcgaaagagtgttgggagcaggagcatgaggaaagagaagctgagaaggtgagatatctggccgagaggatcccaactctgcagactcgaggcctaagtctgtccgccctacaagatctgtgtcgcgaacttcacgccaaggtcgaagtcgtggatgaagagaggtatgatatcgaagctaaatgtcttcataatacccgcgagatcaaggaccttaagttaaaggtgatggatctaagaggcaagttcaagcgtccaccgttgcggagggttagagtttcagccgacgccatgctgagagcacttctggggtctaagcacaaagtcagtatggacctgcgagccaatcttaaaagtgtcaagaaagaggatacagagaaagagcgccctgtggaggttggcgattggagaaaaaatgtggaggctatgtccggtatggagggccgtaaaaagatgttcgacgccgctaaaagtcctacctctcagtag

SEQ ID NO: 136993 - DNA, 564 bp, Artificial Sequence
  derived and/or modified sequence
atgccggaggtagaacggaaacctaaaattactgccagccggaagctcctcctgaagtccctgatgctggcgaaggcgaaggagtgttgggagcaggagcatgaggaaagggaagccgagaaagttcgctatctggctgagagaatacctaccctccagaccagagggctgtctctatccgccctgcaggacctttgcagagaactgcacgctaaggtcgaagtagtggacgaagagcggtacgacatcgaggctaaatgcttgcacaatactcgcgagatcaaggatctgaaactgaaagtcatggatcttcgcggaaagttcaaacgccctcccttaaggagagtacgggtgtccgccgatgctatgctgcgcgcactgctgggatcaaagcataaagtatccatggacctgagagccaacctgaagtctgttaagaaggaagacacggagaaggagcgacctgttgaagtgggtgattggagaaagaatgtggaggccatgagcggtatggagggacggaagaagatgtttgacgccgcaaagagcccgactagtcagtag

SEQ ID NO: 136994 - DNA, 564 bp, Artificial Sequence
  derived and/or modified sequence
atgccagaagtcgagagaaagcccaaaatcactgcatcacggaaactgttgttaaaaagcctgatgctggccaaagcgaaggaatgttgggagcaggaacacgaagagcgcgaggccgaaaaggtcagatatctggcggagcgcattccaacacttcaaaccagagggttgtcgctgagtgccttgcaggatctatgtagagagcttcatgccaaggtcgaggttgtcgacgaggagcgttatgacatcgaggctaagtgcctacacaatacccgcgagatcaaagacctgaagcttaaagtgatggacctaaggggcaagttcaagcggcctcccttacgcagggtcagagtctcggcggatgccatgcttagagccctcctgggatcaaagcacaaggtgtcaatggatctgcgcgcaaatctgaagtctgtcaagaaggaagacacagaaaaggagagacctgtggaagtgggggattggaggaagaatgtcgaggcaatgtccgggatggaaggcaggaagaaaatgttcgacgcggctaaaagccctacaagtcagtag

SEQ ID NO: 136995 - DNA, 564 bp, Artificial Sequence
  derived and/or modified sequence
atgccagaagtgcaacgaaaaccaaaaatcaccgcatcacgcaagctgctcctcaaatcactcatgctcgccaaagccaaggagtgttgggaacaggagcacgaggagcgagaggcagagaaggtgcggtatctggccgagagaattcccactttacaaaccagggggctgtcactgagtgccttgcaggacttgtgcagggaattgcacgcgaaagttgaggtggtggatgaagagagatacgacatcgaagctaagtgcttacataatactcgtgaaatcaaggatctgaaactcaaggtaatggacctacgcggtaagtttaagagaccacccctccggagggttcgcgttagcgccgacgctatgctccgcgcattgttaggatcgaaacacaaggtcagtatggatttgagagccaacctaaaaagtgtgaagaaagaggacaccgagaaggaaagacccgttgaggtcggcgactggcggaagaacgtggaggctatgagcgggatggagggacgtaagaagatgtttgatgccgctaagagtcctacatcccagtag

SEQ ID NO: 136996 - DNA, 414 bp, Artificial Sequence
  derived and/or modified sequence
atgccagaggttgagcggaagccaaaaataactgcgtctcgtaaattgcttctgaaatctctgatgcttgctaaagccaaagagtgctgggaacaagaacatgaagagcgcgaggctgagaaagtccggtaccttgccgaacgcatcccaactctacaaacgagggggctgtccctgagcgcccttcaggacctgtgtagagagcttcacgctaaggtcgaagtggtggatgaggagcgttacgatatcgaggccaagtgcctccataacacacgagagatcaaggatctaaaactgaaggtgatggacctgagaggcaagttcaagcggccacccttgcggagggtgagggtgtctgcggatgctatgctgagggctctgctgggttctaagcacaaggttagtatggactag

SEQ ID NO: 136997 - DNA, 1750 bp, Artificial Sequence
  derived and/or modified sequence
aaactgccccagcaggccccagggaaggacggcaggctgggatgccgtccccacggactccctctcctctcttagccctggcactaagtgcgttcctctggcaaagaagaaaataatttctgtccctcgccatctgctgcatgggaagatgggaatggagtgagcacggcaagacagatgctgcgtcctgcaatggccccaccatggaccctcgtcatccaaccgaagtcgcccccttgcctggctttatcttcactatattgtgaggctgcttcattgaatcttatcccagactttaacttttccatgactgccgtgattttgccatgttgttcacacagagtgtgtctgaccttagctgcattgccaccgcctttgggaccctgagccttcttgccagcactgtcactcccagaggttgcttccactttccccttttccagaaccacttgttcctttgggtggcatcctggaaacttgctgttgaagtctcaactgcctcagtggttcttcaagggaggtcctcaggccaccacctgagaaattgttagaaatgcaagtttctgggctgcatcccagacctgctgaatcagaaatttggggaggagcacggactttggcaccagagagctgggtgcagctctcagctctgcgtcatccttgctgtgggaccctgggttattgctgagccactgtgagtctgtttcctcgtgggtatagtaggtctgcagtctacggcgaggcacaggccagcccagctccacgaggactgaacaaggtgctgtctcactgccaccatgccggaagtcgagagaaaacccaagatcactgcctcccgcaaactcttgctgaagagcctgatgctggccaaggccaaggaatgctgggagcaggagcacgaggagcgcgaggctgagaaggtgcgctacctggcagagcgcatccccacgctgcagacccgtggcctgtccctcagtgccctgcaggacctgtgccgggagctgcacgccaaggtggaggtggtggatgaggagcgatacgacattgaggccaaatgcctccacaacaccagggagattaaggacctgaagctgaaggtgatggacctccgtgggaagttcaagcgcccgcccctgcgtcgagtccgtgtctcggctgacgccatgctccgggccctgctgggctccaagcacaaggtgtccatggatctgcgggccaacctcaagtctgtgaagaaggaagacacagagaaggagcggcctgtggaggtgggtgactggaggaagaacgtggaggccatgtctggcatggaaggccggaagaagatgtttgatgccgccaagtctccgacctcacaatagaggccagcttgctgtgctgcgctctgagctcctgcttcatgcttcttctccaacccagctcactcacctctctgcctgtgtctggagcatcccttcccacctctcccccacttcttccctccagcctgcatgccctcctctggaactgggattaaacagatacccaagaggcaggaaaaacgcgagtgtctgaagacctcaccctggcagggtgggcttctatccacccatgaggcacctggggcttctcagccaccccgtggtgtaacaagtggaggaggaggagggggtgagaacacctttcctccagccctgtgccacactccttctatgtgtgtacagtgtccacaggcatcacaccttcttcattaaaaacccagtttcctggt

SEQ ID NO: 136998 - DNA, 6142 bp, Artificial Sequence
  derived and/or modified sequence
ctcggctctgcccctcacagtctgcagtctacggcgaggcacaggccagcccagctccacgaggactgaacaaggtgctgtctcactgccaccatgccggaagtacagagaaaacccaagatcactgcctcccgcaaactcttgctgaagagcctgatgctggccaaggccaaggaatgctgggagcaggagcacgaggagcgcgaggctgagaaggtgcgctacctggcagagcgcatccccacgctgcagacccgtggcctgtccctcagtgccctgcaggacctgtgccgggagctgcacgccaaggtggaggtggtggatgaggagcgatacgacattgaggccaaatgcctccacaacaccagggagattaaggacctgaagctgaaggtgatggacctccgtgggaagttcaagcgcccgcccctgcgtcgagtccgtgtctcggctgacgccatgctccgggccctgctgggctccaagcacaaggtgtccatggatctgcgggccaacctcaagtctgtgaagaaggaagacacagagaaggagcggcctgtggaggtgggtgactggaggaagaacgtggaggccatgtctggcatggaaggccggaagaagatgtttgatgccgccaagtctccgacctcacaatagaggccagcttgctgtgctgcgctctgagctcctgcttcatgcttcttctccaacccagctcactcacctctctgcctgtgtctggagcatcccttcccacctctcccccacttcttccctccagcctgcatgccctcctctggaactgggattaaacagatacccaagaggcaggaaaaacgcgagtgtctgaagacctcaccctggcagggtgggcttctatccacccatgaggcacctggggcttctcagccaccccgtggtgtaacaagtggaggaggaggagggggtgagaacacctttcctccagccctgtgccacactccttctatgtgtgtacagtgtccacaggcatcacaccttcttcattaaaaacccagtttcctggtcatttctgcagctctgactgtgagccctgagaagaaagggaagacttggggcttgggaagagagggctgtgctgggctccagtcaccctgtctgcagtccggagctcgggatctgaagggagggctaaggaattggtggctgcttgccagggtcccctggggccccttctgcccagtccctgtgacgtcacactgcacacactcaccacccaggatgctcagctcaccagagccctgacctccgagaaatgaccccgtcctgcccctgactctggccatcagaagaggcctctccattaagagccgcttctcctgccggctttcatactctccttcctctgcaaacctggattaactctccctgatgtgtgctgggttgagaggtcagggcactttcaatccctcacctagtcctgctgcacagggcaggaggcctcacagaagagatacttgcagttccaggcctggccaccaggtgacgccttccttctctcctgggctctcctgtccctccggcctctgctctccccacgttcacccaccctcctcccaattgtttccccttcacactcctgcactggtcctatcccccaggactgattctttcccggagatggggtggccacttatctgtcctctggatcaggtcctttctccatcccactacctcctgggtccaaagcctggtgagagcatagggccttctggggtggaaggggggtctggggcagcctctcttcccccaacatactcactagagtggctcctgtgaagcagagaccaaagttctgacttttctttttccttttttttttttttttgagatggagtctcgctgtgtcacccaggctggagtgcagtgacgcgatctcgactcactgcaacctccgcctcccaggttcaagcgattctcctgcttcaacctcctgagtagctgggattacaggtgcgtgccaccacaccccgctaatttttgtatttttagtagagacagggtttcaccatgttggtcaggctggtctcgaactcctgacctcgtaatctgcccacctcggcctcccaaagttctgggattacaggtgtgagcgaccacatccggtcaagttctgacttttcagggcagtgggatggtgacttctgagctaagcctgcaagggaagtggctgttcccagacctggggtcccttggcttttcgaccaccctagcactggccctaggaggggctgagttatcagagcagcaacccttctacccaccctactgagtccccattctaccttcgaatcccatgtattatcttccataagtgccagaaattggtacaaagtgcagtgccagctgctccccagggcatggtctggctctctgggctgctgggctgccagcccctttcagaaagcatggcagtgggaaccagcaacttgggctaccttaggggaagcagcactctgcccagggttcttgctataaataggtcagtgggcagagaggcagatgtgtgcaaaaagcacaaccccaatcacacacagaaacccgtaggcacggacacacccagtctcaatgcacgaagttggagaacctgacagggctggtccaggccacagaggatggggttaggcttcatgccttcatgcccaggcagccacagaaacccactcttccccgcctcacagggctcctccggttggcctggatccaaagcgatctccttgtttcacctctttccagctcttccctagagcctggccccaagttccagagtcaaatcccagttttgcagtcaactattaacctggggccctggcagattggggtatccacccagtcatgtaaaggcaggagacctgctctgggcctgactcaaagcaaacacgtgggtgcagaagacccatgggaggaggaggtggggcccactcaacacacctaagccagtggccctctaggaggggcagaagagccaaccagagggttcctggaggtcatcgggttcctccttctgcttccaggcagcaacagacctaattcatctcctgtgaggatggagcaagggcgaatataggcatagacatatctggagcgcaaggattgagaggccctgtggacaaggggaaggagagcttgggggtgggagagggatctatggaaggggctgttgtagccaagaatggggcctgggctgggggcctggcctctggagagccctgattctactccagtcttctctcaccatggagacaacaccagtagagctgggagctggggcctgccactgagtaacagctcacacatgtagcacacttatgcgtcaggcaccagcatgtacaccttaatttatttaactttcacaacaaccctaggagaaaggtacagctactattctcatggtacagtggggaaaactgaggcacagagaggttagggacttttcatgatcacacagctaataagtggtggtcccaggattcaacccaagaagtctgttagaatccatactcttatcgactattttaataacagcatttcaataatagtaatatgtgatgttaaatgctttatctgagttatatcattgcattctcacaaaaatggtacatttgttagctcaaatttacagatgaggaaatggaggcctggagagttcaagtagctcactctaagttacagggtttgctagctgcagactggagactagatctcaggtcactctgccttggggttgcccttttctgagatcagactggccttaacagagcccaactttcttggaaggacacagctgggggtcgagggtcctgcatatgcacctggggagtccccacacacccgcaccaaaggggaaacattcaaaggagatgcaggtgacatacagatgggctaaggtgaggccttcctccaacatggggccctggctgagagtggagggatagggtgctacttgggggatatctattactaatcagcacacaatagctgggtgggcaccccctctctctgcagctggtggagatgggcctggtgctcctctctgcttggtaggaatgaccagggcaggatgccacctgctacactcttgcctgtcccagagcccttgggagaccagctgttgctcccacctttccccacagggtgcccggtccccacggcgcaaggaggccaagctcagctgtgtgtctgagcccactcagcagcaggcatgatcagggcagggcccagcgctaagggctgctggggctaaagtgccttgctgaaggaggggcagagttaaacattagccacaatggccccccgcgaagtgagtcatactccccacaagtctctgggctgggcagccgggggcgggggggttagcttcgttccaggtgggtgaccaagctgcggaagcccaggacagttcgctgggaccagtgctaatggcagcttctgctcctgacccccatcaggtctctttcctcagacatccccaaagcttgtctgcctgtgggtctttcattaaaggtgacgggcaagggttttctcttccttccaagacacacttctaggctggcttgtgggtcccctgagacgaaggctgagcagggtgagcctcgaaaaccccatagcactggcccagagcactgcggtcaatgtccgaaggaccagagagggagggtgacttgctcaaggtcacaaacctaactggagctaggaagtaggtccccagactcccagtctgaggaaattggatgtggacagggctttggtctcctggccagaggcaaacgcccagggatctgaacaggctgcccatctctggcctcaactcagcaccccaactggctccagtgccaaccattggcctctctcactggttggcacaggctgggtgagcctggccctttgccctgggttcaggagagaggtatggctttgcctggcagtcaggggaggtgttccaacctgggagcccctgggggaggagcgtgtgtgtgaacgcttgtgcctgttcatcagaaggggtgagcatggtgtgtatgcgtgggcatgcagaatgcagggtgatgacctgtctgcccgccctgagtgtcacagacacctgtgtgtcccctgtactagtgcctcccagatgctcttctcctgactggctctttgtgacctaaatttcaactgctccaccccacaaggaggaaaccagggccacaaatgtagtgagattttcataaagctaaatgtattcagtggaaacgaccttcctctgatctaaaagcatgcatgcctttgttttattactggagtattaaattagcccttacttatggaataggaggacagtaggtggcaattgttttctaatgctcttacttcacaaaataaaatggtggcagcacaatgtcagtatttatattacacaatattattagtttgtaaaaaccgaaagccagggagcttactgccctggattctttagggcgtgggtcttatcacctcattcatttcttcccttcccctaagagtgccacaagcatggcagttgctcagctgagacacatgaatgggaacagaactgaaatatcaggatgtgacctcgagccagctggttggggctggggatccccctggatctccactctgtcctgtccgagaaaggggaagctgccctatgagtcttttttctgggggattccagaggttgaacgtctgttctgaggctcctcagaacctcgagggaggggacgagagagatgaccccttgcccaaccactggctgaaaaatcttgaaattccctgactttgaccagggaattcccagttgtgctaagccctgcctggtggaatgtccctggaggaagtaaccaggacacgcatacgtttttaatgtacgtataaagaatcgtaaagtgaacacccatctgccaaccactcattttaagaactaggatatggcacatacttttgaagcccttatgcgtccctccccaatcacaaccccttcctctccacaaaggtaaatacaatcctcaattttgtgtttgttattctcttggttctcttcataatgttactacgtatttatgaattcctaatacatcattcagttttggatctttttgtaaacctt

SEQ ID NO: 136999 - DNA, 5413 bp, Artificial Sequence
  derived and/or modified sequence
ctcggctctgcccctcacagtctgcagtctacggcgaggcacaggccagcccagctccacgaggactgaacaaggtgctgtctcactgccaccatgccggaagtcgagagaaaacccaagatcactgcctcccgcaaactcttgctgaagagcctgatgctggccaaggccaaggaatgctgggagcaggagcacgaggagcgcgaggctgagaaggtgcgctacctggcagagcgcatccccacgctgcagacccgtggcctgtccctcagtgccctgcaggacctgtgccgggagctgcacgccaaggtggaggtggtggatgaggagcgatacgacattgaggccaaatgcctccacaacaccagggagattaaggacctgaagctgaaggtgatggacctccgtgggaagttcaagcgcccgcccctgcgtcgagtccgtgtctcggctgacgccatgctccgggccctgctgggctccaagcacaaggtgtccatggatctgcgggccaacctcaagtctgtgaagaaggaagacacagagaaggagcggcctgtggaggtgggtgactggaggaagaacgtggaggccatgtctggcatggaaggccggaagaagatgtttgatgccgccaagtctccgacctcacaatagaggccagcttgctgtgctgcgctctgagctcctgcttcatgcttcttctccaacccagctcactcacctctctgcctgtgtctggagcatcccttcccacctctcccccacttcttccctccagcctgcatgccctcctctggaactgggattaaacagatacccaagaggcaggaaaaacgcgagtgtctgaagacctcaccctggcagggtgggcttctatccacccatgaggcacctggggcttctcagccaccccgtggtgtaacaagtggaggaggaggagggggtgagaacacctttcctccagccctgtgccacactccttctatgtgtgtacagtgtccacaggcatcacaccttcttcattaaaaacccagtttcctggtcatttctgcagctctgactgtgagccctgagaagaaagggaagacttggggcttgggaagagagggctgtgctgggctccagtcaccctgtctgcagtccggagctcgggatctgaagggagggctaaggaattggtggctgcttgccagggtcccctggggccccttctgcccagtccctgtgacgtcacactgcacacactcaccacccaggatgctcagctcaccagagccctgacctccgagaaatgaccccgtcctgcccctgactctggccatcagaagaggcctctccattaagagccgcttctcctgccggctttcatactctccttcctctgcaaacctggattaactctccctgatgtgtgctgggttgagaggtcagggcactttcaatccctcacctagtcctgctgcacagggcaggaggcctcacagaagagatacttgcagttccaggcctggccaccaggtgacgccttccttctctcctgggctctcctgtccctccggcctctgctctccccacgttcacccaccctcctcccaattgtttccccttcacactcctgcactggtcctatcccccaggactgattctttcccggagatggggtggccacttatctgtcctctggatcaggtcctttctccatcccactacctcctgggtccaaagcctggtgagagcatagggccttctggggtggaaggggggtctggggcagcctctcttcccccaacatactcactagagtggctcctgtgaagcagagaccaaagttctgacttttctttttccttttttttttttttttgagatggagtctcgctgtgtcacccaggctggagtgcagtgacgcgatctcgactcactgcaacctccgcctcccaggttcaagcgattctcctgcttcaacctcctgagtagctgggattacaggtgcgtgccaccacaccccgctaatttttgtatttttagtagagacagggtttcaccatgttggtcaggctggtctcgaactcctgacctcgtaatctgcccacctcggcctcccaaagttctgggattacaggtgtgagcgaccacatccggtcaagttctgacttttcagggcagtgggatggtgacttctgagctaagcctgcaagggaagtggctgttcccagacctggggtcccttggcttttcgaccaccctagcactggccctaggaggggctgagttatcagagcagcaacccttctacccaccctactgagtccccattctaccttcgaatcccatgtattatcttccataagtgccagaaattggtacaaagtgcagtgccagctgctccccagggcatggtctggctctctgggctgctgggctgccagcccctttcagaaagcatggcagtgggaaccagcaacttgggctaccttaggggaagcagcactctgcccagggttcttgctataaataggtcagtgggcagagaggcagatgtgtgcaaaaagcacaaccccaatcacacacagaaacccgtaggcacggacacacccagtctcaatgcacgaagttggagaacctgacagggctggtccaggccacagaggatggggttaggcttcatgccttcatgcccaggcagccacagaaacccactcttccccgcctcacagggctcctccggttggcctggatccaaagcgatctccttgtttcacctctttccagctcttccctagagcctggccccaagttccagagtcaaatcccagttttgcagtcaactattaacctggggccctggcagattggggtatccacccagtcatgtaaaggcaggagacctgctctgggcctgactcaaagcaaacacgtgggtgcagaagacccatgggaggaggaggtggggcccactcaacacacctaagccagtggccctctaggaggggcagaagagccaaccagagggttcctggaggtcatcgggttcctccttctgcttccaggcagcaacagacctaattcatctcctgtgaggatggagcaagggcgaatataggcatagacatatctggagcgcaaggattgagaggccctgtggacaaggggaaggagagcttgggggtgggagagggatctatggaaggggctgttgtagccaagaatggggcctgggctgggggcctggcctctggagagccctgattctactccagtcttctctcaccatggagacaacaccagtagagctgggagctggggcctgccactgagtaacagctcacacatgtagcacacttatgcgtcaggcaccagcatgtacaccttaatttatttaactttcacaacaaccctaggagaaaggtacagctactattctcatggtacagtggggaaaactgaggcacagagaggttagggacttttcatgatcacacagctaataagtggtggtcccaggattcaacccaagaagtctgttagaatccatactcttatcgactattttaataacagcatttcaataatagtaatatgtgatgttaaatgctttatctgagttatatcattgcattctcacaaaaatggtacatttgttagctcaaatttacagatgaggaaatggaggcctggagagttcaagtagctcactctaagttacagggtttgctagctgcagactggagactagatctcaggtcactctgccttggggttgcccttttctgagatcagactggccttaacagagcccaactttcttggaaggacacagctgggggtcgagggtcctgcatatgcacctggggagtccccacacacccgcaccaaaggggaaacattcaaaggagatgcaggtgacatacagatgggctaaggtgaggccttcctccaacatggggccctggctgagagtggagggatagggtgctacttgggggatatctattactaatcagcacacaatagctgggtgggcaccccctctctctgcagctggtggagatgggcctggtgctcctctctgcttggtaggaatgaccagggcaggatgccacctgctacactcttgcctgtcccagagcccttgggagaccagctgttgctcccacctttccccacagggtgcccggtccccacggcgcaaggaggccaagctcagctgtgtgtctgagcccactcagcagcaggcatgatcagggcagggcccagcgctaagggctgctggggctaaagtgccttgctgaaggaggggcagagttaaacattagccacaatggccccccgcgaagtgagtcatactccccacaagtctctgggctgggcagccgggggcgggggggttagcttcgttccaggtgggtgaccaagctgcggaagcccaggacagttcgctgggaccagtgctaatggcagcttctgctcctgacccccatcaggtctctttcctcagacatccccaaagcttgtctgcctgtgggtctttcattaaaggtgacgggcaagggttttctcttccttccaagacacacttctaggctggcttgtgggtcccctgagacgaaggctgagcagggtgagcctcgaaaaccccatagcactggcccagagcactgcggtcaatgtccgaaggaccagagagggagggtgacttgctcaaggtcacaaacctaactggagctaggaagtaggtccccagactcccagtctgaggaaattggatgtggacagggctttggtctcctggccagaggcaaacgcccagggatctgaacaggctgcccatctctggcctcaactcagcaccccaactggctccagtgccaaccattggcctctctcactggttggcacaggctgggtgagcctggccctttgccctgggttcaggagagaggtatggctttgcctggcagtcaggggaggtgttccaacctgggagcccctgggggaggagcgtgtgtgtgaacgcttgtgcctgttcatcagaaggggtgagcatggtgtgtatgcgtgggcatgcagaatgcagggtgatgacctgtctgcccgccctgagtgtcacagacacctgtgtgtcccctgtactagtgcctcccagatgctcttctcctgactggctctttgtgacctaaatttcaactgctccaccccacaaggaggaaaccagggccacaaatgtagtgagattttcataaagctaaatgtattcagtggaaacgaccttcctctgatctaaaagcatgcatgcctttgttttattactggagtattaaattagcccttacttatggaataggaggacagtaggtggcaattgttttctaatgctcttacttcacaaaataaaatggtggcagcacaa

SEQ ID NO: 137000 - DNA, 1100 bp, Artificial Sequence
  derived and/or modified sequence
ctacggcgaggcacaggccagcccagctccacgaggactgaacaaggtgctgtctcactgccaccatgccggaagtcgagagaaaacccaagatcactgcctcccgcaaactcttgctgaagagcctgatgctggccaaggccaaggaatgctgggagcaggagcacgaggagcgcgaggctgagaaggtgcgctacctggcagagcgcatccccacgctgcagacccgtggcctgtccctcagtgccctgcaggacctgtgccgggagctgcacgccaaggtggaggtggtggatgaggagcgatacgacattgaggccaaatgcctccacaacaccagggagattaaggacctgaagctgaaggtgatggacctccgtgggaagttcaagcgcccgcccctgcgtcgagtccgtgtctcggctgacgccatgctccgggccctgctgggctccaagcacaaggtgtccatggatctgcgggccaacctcaagtctgtgaagaaggaagacacagagaaggagcggcctgtggaggtgggtgactggaggaagaacgtggaggccatgtctggcatggaaggccggaagaagatgtttgatgccgccaagtctccgacctcacaatagaggtacctagagaccagctcccttctctggggtccatcagagtctagaggataatgagggagtccacaatgggcaggcgggttgtacttagtgtggtgcacggatgcacggactaaggcaccgatgagactgatttgagtcggctctcctgggctcagtcctggctccagcaccatgatacttgggcatgtcatttctgtttggcggccctttttgttcccattatctatgaaattgggggctgtatcaaatcagtggttctccaagtgtggtcctgggaccagcagcgtctacatcacctgggatgcaaatgatcagcccccaccccagatccactaaattggaaactctggggtgaggccagccttctaggtgattctgatgcacatgagagtttgagaaccactaggttagagggtccctgggatcccttcatctctgactttctgagaatctatgcacttttaaata

SEQ ID NO: 137001 - DNA, 1750 bp, Artificial Sequence
  derived and/or modified sequence
aaactgccccagcaggccccagggaaggacggcaggctgggatgccgtccccacggactccctctcctctcttagccctggcactaagtgcgttcctctggcaaagaagaaaataatttctgtccctcgccatctgctgcatgggaagatgggaatggagtgagcacggcaagacagatgctgcgtcctgcaatggccccaccatggaccctcgtcatccaaccgaagtcgcccccttgcctggctttatcttcactatattgtgaggctgcttcattgaatcttatcccagactttaacttttccatgactgccgtgattttgccatgttgttcacacagagtgtgtctgaccttagctgcattgccaccgcctttgggaccctgagccttcttgccagcactgtcactcccagaggttgcttccactttccccttttccagaaccacttgttcctttgggtggcatcctggaaacttgctgttgaagtctcaactgcctcagtggttcttcaagggaggtcctcaggccaccacctgagaaattgttagaaatgcaagtttctgggctgcatcccagacctgctgaatcagaaatttggggaggagcacggactttggcaccagagagctgggtgcagctctcagctctgcgtcatccttgctgtgggaccctgggttattgctgagccactgtgagtctgtttcctcgtgggtatagtaggtctgcagtctacggcgaggcacaggccagcccagctccacgaggactgaacaaggtgctgtctcactgccaccatgccggaagtacagagaaaacccaagatcactgcctcccgcaaactcttgctgaagagcctgatgctggccaaggccaaggaatgctgggagcaggagcacgaggagcgcgaggctgagaaggtgcgctacctggcagagcgcatccccacgctgcagacccgtggcctgtccctcagtgccctgcaggacctgtgccgggagctgcacgccaaggtggaggtggtggatgaggagcgatacgacattgaggccaaatgcctccacaacaccagggagattaaggacctgaagctgaaggtgatggacctccgtgggaagttcaagcgcccgcccctgcgtcgagtccgtgtctcggctgacgccatgctccgggccctgctgggctccaagcacaaggtgtccatggatctgcgggccaacctcaagtctgtgaagaaggaagacacagagaaggagcggcctgtggaggtgggtgactggaggaagaacgtggaggccatgtctggcatggaaggccggaagaagatgtttgatgccgccaagtctccgacctcacaatagaggccagcttgctgtgctgcgctctgagctcctgcttcatgcttcttctccaacccagctcactcacctctctgcctgtgtctggagcatcccttcccacctctcccccacttcttccctccagcctgcatgccctcctctggaactgggattaaacagatacccaagaggcaggaaaaacgcgagtgtctgaagacctcaccctggcagggtgggcttctatccacccatgaggcacctggggcttctcagccaccccgtggtgtaacaagtggaggaggaggagggggtgagaacacctttcctccagccctgtgccacactccttctatgtgtgtacagtgtccacaggcatcacaccttcttcattaaaaacccagtttcctggt

SEQ ID NO: 137002 - DNA, 633 bp, Artificial Sequence
  derived and/or modified sequence
cctcttcccccagctgctacttgcccctctgggccttcactgtggccctttgctctccctcattccccctcccagtcccatctctgctcagtccccacacctggtctggctgctcattctttccctttctgcagctcgagtctccccagtctgcagtctacggcgaggcacaggccagcccagctccacgaggactgaacaaggtgctgtctcactgccaccatgccggaagtcgagagaaaacccaagatcactgcctcccgcaaactcttgctgaagagcctgatgctggccaaggccaaggaatgctgggagcaggagcacgaggagcgcgaggctgagaaggtgcgctacctggcagagcgcatccccacgctgcagacccgtggcctgtccctcagtgccctgcaggacctgtgccgggagctgcacgccaaggtggaggtggtggatgaggagcgatacgacattgaggccaaatgcctccacaacaccagggagattaaggacctgaagctgaaggtgatggacctccgtgggaagttcaagcgcccgcccctgcgtcgagtccgtgtctcggctgacgccatgctccgggccctgctgggctccaagcacaaggtgtccatggat

SEQ ID NO: 137003 - protein, 182 aa, Artificial Sequence
  derived and/or modified sequence
MGDEEKRNRAITARRQHLKSVMLQIAATELEKEESRREAEKQNYLAEHCPPLHIPGSMSEVQELCKQLHAKIDAAEEEKYDMEVRVQKTSKELEDMNQKLFDLRGKFKRPPLRRVRMSADAMLKALLGSKHKVCMDLRANLKQVKKEDTEKERDLRDVGDWRKNIEEKSGMEGRKKMFESES

SEQ ID NO: 137004 - DNA, 549 bp, Artificial Sequence
  derived and/or modified sequence
atgggcgacgaggagaagagaaacagagccatcaccgccagaagacagcacctgaagagcgtgatgctgcagatcgccgccaccgagctggagaaggaggagagcagaagagaggccgagaagcagaactacctggccgagcactgcccccccctgcacatccccggcagcatgagcgaggtgcaggagctgtgcaagcagctgcacgccaagatcgacgccgccgaggaggagaagtacgacatggaggtgagagtgcagaagaccagcaaggagctggaggacatgaaccagaagctgttcgacctgagaggcaagttcaagagaccccccctgagaagagtgagaatgagcgccgacgccatgctgaaggccctgctgggcagcaagcacaaggtgtgcatggacctgagagccaacctgaagcaggtgaagaaggaggacaccgagaaggagagagacctgagagacgtgggcgactggagaaagaacatcgaggagaagagcggcatggagggcagaaagaagatgttcgagagcgagagctag

SEQ ID NO: 137005 - DNA, 549 bp, Artificial Sequence
  derived and/or modified sequence
atgggcgatgaagagaaacgcaacagggcgatcacagcacggaggcagcacctgaaatccgtgatgctccagatagcagctacggagctggaaaaggaggagtcccgaagggaagccgagaagcagaattacctcgcagaacattgtccccccctgcacattccagggtctatgtccgaggtgcaggagttgtgtaagcagctgcacgcgaaaatagacgcagccgaggaggagaaatatgacatggaggtgcgtgtgcagaagacctcaaaggaacttgaagacatgaaccaaaagcttttcgatttaagggggaaatttaagcgcccccccctgcgcagagtgagaatgtctgcagacgccatgttgaaagctcttctgggatccaaacataaagtgtgcatggacttgcgcgcaaatttgaagcaggtaaagaaagaggatacagagaaagagcgcgatcttcgcgatgtcggcgactggcggaagaatatagaagagaaaagcggcatggaagggcgcaagaagatgtttgagagtgaaagctag

SEQ ID NO: 137006 - DNA, 549 bp, Artificial Sequence
  derived and/or modified sequence
atgggggatgaggagaaacgcaatagagctatcactgcacgtcggcaacacctcaagtctgtcatgctgcagatagctgccacagagttggagaaggaagagagtaggagagaggctgaaaaacagaattatttggcagaacactgcccccccctgcacatacccggctcaatgagcgaggtgcaggaactatgtaaacagctgcatgcaaaaatcgacgctgccgaggaagagaaatatgatatggaagtgcgagtgcagaagactagcaaggaacttgaagacatgaaccagaaactttttgatcttcgaggtaagtttaaacggcctccattgaggagagtccggatgtctgccgacgctatgttaaaagccctcctcgggtcaaagcacaaggtctgcatggatctaagagcaaacctgaagcaggtcaaaaaggaagataccgagaaagagagggatctgagggacgtgggggattggcgaaagaatattgaggaaaagagcggcatggagggcaggaagaaaatgttcgaaagcgagtcttag

SEQ ID NO: 137007 - DNA, 549 bp, Artificial Sequence
  derived and/or modified sequence
atgggggacgaggaaaagcgcaaccgggccatcaccgcacggcggcagcatctaaagagtgtcatgttgcagatagctgccactgagctcgagaaggaagaatcacgccgggaagctgagaagcagaattacctcgccgagcattgcccgcccttgcatatccctggcagtatgtcggaagtgcaagaactgtgtaagcagttacatgctaagattgacgcagctgaggaggagaagtacgatatggaggttcgagtgcaaaagacctccaaagaattggaagacatgaatcaaaaactattcgatctgagggggaagtttaagcgaccaccacttcgacgagtcaggatgagtgctgacgcaatgttgaaggctcttctcggcagcaaacacaaggtatgcatggatttacgggcaaaccttaagcaagtaaagaaggaggatactgagaaagagagggacctacgggacgtcggggattggaggaaaaatatagaagaaaaaagcggcatggagggaagaaagaaaatgtttgagtcagagtcatag

SEQ ID NO: 137008 - DNA, 549 bp, Artificial Sequence
  derived and/or modified sequence
atgggagatgaggagaagaggaacagagccatcacagcccggcggcagcacctgaagtctgtgatgctgcagattgctgccacagagctggagaaggaggagagccggcgggaggccgagaagcagaactacctggccgagcactgcccccccctgcacatccctggctccatgtctgaggtgcaggagctgtgcaagcagctgcacgccaagattgatgctgctgaggaggagaagtatgacatggaggtgcgggtgcagaagaccagcaaggagctggaggacatgaaccagaagctgtttgacctgcggggcaagttcaagaggcctcccctgcggcgggtgaggatgtctgcagatgccatgctgaaggccctgctgggcagcaagcacaaggtgtgcatggacctgcgggccaacctgaagcaggtgaagaaggaggacacagagaaggagcgggacctgagagatgtgggggactggaggaagaacatcgaggagaagagcggcatggagggcaggaagaagatgtttgagagcgagagctag

SEQ ID NO: 137009 - DNA, 549 bp, Artificial Sequence
  derived and/or modified sequence
atgggcgacgaggagaagcggaaccgggccatcaccgcccggcggcagcatcttaagtcagtgatgctccagattgctgccactgagttggaaaaagaggaaagcagacgggaggcggaaaaacaaaattacctggcagagcattgtccacctttgcacatcccgggaagtatgagcgaagtccaagagctctgtaagcagctgcacgccaaaatcgacgctgccgaagaagagaagtacgacatggaggttcgagttcagaagacctcgaaagagttggaagatatgaatcaaaagttgttcgatttgaggggtaagttcaagaggccccctctacggagagttcgaatgtctgctgatgcaatgttaaaagcgctcttggggtctaagcataaagtatgtatggatttgcgggcaaacctaaagcaggtcaagaaagaggacaccgagaaggagagggatctgcgggacgtcggcgattggagaaaaaatatagaagaaaagagcggtatggaagggagaaaaaaaatgttcgagtccgagtcatag

SEQ ID NO: 137010 - DNA, 549 bp, Artificial Sequence
  derived and/or modified sequence
atgggcgacgaggagaagcggaaccgggccatcaccgcccggcggcagcatttaaaatcggtcatgctccagatcgctgctaccgagctcgaaaaggaggaaagtcgcagggaggcagagaagcaaaattacctggccgaacactgtcccccactccatattccagggagtatgtccgaggtgcaagagttgtgcaagcagttacacgctaaaatagacgctgccgaggaggagaagtatgatatggaggttcgcgttcagaagaccagcaaagaactggaagacatgaaccagaagctcttcgacctcagaggcaaattcaaaaggccccccctgaggcgggttcgtatgtctgctgacgcgatgttaaaagcactcttgggcagtaagcataaagtgtgtatggatttgagggctaatctgaaacaggtcaagaaggaggatacagagaaggaaagagacctccgtgacgtcggcgattggcggaagaatatcgaggaaaagagtggcatggagggtaggaaaaagatgtttgagagtgagtcctag

SEQ ID NO: 137011 - DNA, 549 bp, Artificial Sequence
  derived and/or modified sequence
atgggcgacgaggagaagcggaaccgggccatcaccgcccggcggcagcacttaaagtcagtcatgcttcagattgcggcaacagaacttgaaaaagaggaatcccggagggaagccgagaaacagaattacctcgctgagcattgtccgccgctgcacattccaggcagtatgtcagaggtgcaagaactatgcaagcagctgcatgcaaaaatcgatgccgccgaggaggaaaaatatgacatggaggtgcgggtgcagaagacctctaaagaactagaggatatgaatcagaagttgtttgatctccggggaaagttcaaacggcctcccctgaggcgggtgagaatgagcgccgacgcgatgttgaaggctttgctgggctccaaacataaggtttgtatggacctgcgggcgaatttgaagcaggtgaaaaaagaagataccgagaaagaacgtgacctcagggacgtcggggattggcgcaaaaatatcgaagaaaaatccggcatggaaggaagaaagaagatgttcgagagcgaatcctag

SEQ ID NO: 137012 - DNA, 549 bp, Artificial Sequence
  derived and/or modified sequence
atgggggacgaagagaagcggaaccgggcaattaccgccaggagacagcacctaaaaagtgttatgctccaaattgcagccaccgagctggaaaaggaggaatcaaggagggaagctgagaaacaaaattacctagccgagcattgccctcccttgcatataccaggctctatgagcgaggtccaggaactgtgcaaacagctccatgcgaaaatagatgccgcagaagaagagaagtacgatatggaagtgagggtacaaaagacatcgaaagagctagaagatatgaaccagaagctgtttgacttgaggggcaagtttaaacgcccacccctgcgcagggttcgaatgagcgccgatgcaatgctgaaggccttactgggttccaaacacaaggtgtgtatggatctgagggctaacctaaagcaagttaaaaaggaagacactgaaaaggagcgcgatctccgcgatgtgggagattggcgcaaaaacattgaggaaaaatctggaatggaaggccgtaagaaaatgttcgagtcagagtcttag

SEQ ID NO: 137013 - DNA, 549 bp, Artificial Sequence
  derived and/or modified sequence
atgggtgatgaggagaaacggaatagagccattacagccagaaggcaacatctgaaaagcgtgatgcttcagatcgcggctaccgaactcgagaaggaagagagcagacgcgaagccgagaagcagaactacttggctgagcactgcccacctctgcatattccagggagtatgagcgaagttcaggagctttgcaagcagttgcacgcaaagatagacgcagcggaggaagaaaagtatgatatggaggtgcgtgtacaaaagacaagtaaggaactggaggacatgaaccagaagctgttcgatctgcgcggaaagttcaagaggccacctctgcgtagggtacgcatgagcgccgatgcgatgctaaaagccctgctgggcagtaagcacaaggtctgcatggacttgagagctaatctgaaacaggttaagaaggaagacaccgaaaaggagcgagatttacgggacgtgggagattggcggaagaacattgaagaaaaatccggtatggaaggcaggaagaaaatgttcgagagtgagagttag

SEQ ID NO: 137014 - DNA, 549 bp, Artificial Sequence
  derived and/or modified sequence
atgggggatgaggaaaagcgcaaccgggcaatcacggctaggagacaacacctcaaatccgttatgctccagatagccgcaacggagcttgagaaggaggaatcgagaagagaagccgagaagcagaattatctagcggagcattgtccacccctccacatcccagggtcgatgtctgaggttcaggagctgtgtaagcagctacacgccaagatcgatgcggcagaggaagagaaatacgatatggaagtgagagtacagaagacttctaaggaactggaagacatgaaccagaagctgtttgatctccgcggtaaatttaaacggcctccacttcgccgagtgcggatgtctgccgacgcaatgctgaaggctcttttgggaagtaagcataaggtgtgtatggatctcagagccaatcttaagcaggtgaaaaaggaagacacagagaaagagcgagacctgcgcgacgttggggactggcggaagaacattgaggagaagtctgggatggagggtcgaaagaagatgttcgagtcagagagttag

SEQ ID NO: 137015 - DNA, 678 bp, Artificial Sequence
  derived and/or modified sequence
atgggagatgaggagaagcggaacagggccatcacggcccgcaggcagcacctgaagagtgtgatgctgcagatagcggccacggagctggagaaggaggagagccgccgtgaggcagagaagcagaactacctggcggagcactgcccgccgctgcatatcccgggctccatgtctgaagtgcaggagctctgcaaacagctgcacgccaagatcgatgcggctgaagaggagaagtacgacatggaggtgagggtgcagaagaccagcaaggagctggaggacatgaaccagaagctatttgatctgcggggcaagttcaagcggcccccactgcggagggtgcgcatgtcggccgatgccatgctcaaggccctgctgggctcgaagcacaaggtgtgcatggacctgagggccaacctgaagcaggtcaagaaggaggacacagagaaggagcgggacctgcgagacgtgggtgactggaggaagaacatcgaggagaagtctggcatggagggccggaagaagatgtttgagtccgagtcctaggccactcgctgcccctacgcctgccccggtgcccggctcccagcagaacatactagggagatgcacccagagcctgccagggagggctggcctcaccaccaccgtcaataaaggatttgaatccccatg

SEQ ID NO: 137016 - DNA, 745 bp, Artificial Sequence
  derived and/or modified sequence
tcttacttctcaccctggggaattccaagacattgtccttgaaggaggctccaagctcaggacctcaggatgggagatgaggagaagcggaacagggccatcacggcccgcaggcagcacctgaagagtgtgatgctgcagatagcggccacggagctggagaaggaggagagccgccgtgaggcagagaagcagaactacctggcggagcactgcccgccgctgcatatcccgggctccatgtctgaagtgcaggagctctgcaaacagctgcacgccaagatcgatgcggctgaagaggagaagtacgacatggaggtgagggtgcagaagaccagcaaggagctggaggacatgaaccagaagctatttgatctgcggggcaagttcaagcggcccccactgcggagggtgcgcatgtcggccgatgccatgctcaaggccctgctgggctcgaagcacaaggtgtgcatggacctgagggccaacctgaagcaggtcaagaaggaggacacagagaaggagcgggacctgcgagacgtgggtgactggaggaagaacatcgaggagaagtctggcatggagggccggaagaagatgtttgagtccgagtcctaggccactcgctgcccctacgcctgccccggtgcccggctcccagcagaacatactagggagatgcacccagagcctgccagggagggctggcctcaccaccaccgtcaataaaggatttgaatcccca

SEQ ID NO: 137017 - DNA, 743 bp, Artificial Sequence
  derived and/or modified sequence
gctgccggcctgacctcgctcccagccctgctgcccagattctaggctccaagctcaggacctcaggatgggagatgaggagaagcggaacagggccatcacggcccgcaggcagcacctgaagagtgtgatgctgcagatagcggccacggagctggagaaggaggagagccgccgtgaggcagagaagcagaactacctggcggagcactgcccgccgctgcatatcccgggctccatgtctgaagtgcaggagctctgcaaacagctgcacgccaagatcgatgcggctgaagaggagaagtacgacatggaggtgagggtgcagaagaccagcaaggagctggaggacatgaaccagaagctatttgatctgcggggcaagttcaagcggcccccactgcggagggtgcgcatgtcggccgatgccatgctcaaggccctgctgggctcgaagcacaaggtgtgcatggacctgagggccaacctgaagcaggtcaagaaggaggacacagagaaggagcgggacctgcgagacgtgggtgactggaggaagaacatcgaggagaagtctggcatggagggccggaagaagatgtttgagtccgagtcctaggccactcgctgcccctacgcctgccccggtgcccggctcccagcagaacatactagggagatgcacccagagcctgccagggagggctggcctcaccaccaccgtcaataaaggatttgaatcccca

SEQ ID NO: 137018 - protein, 278 aa, Artificial Sequence
  derived and/or modified sequence
MSDTEEQEYEEEQPEEEAAEEEEEAPEEPEPVAEPEEERPKPSRPVVPPLIPPKIPEGERVDFDDIHRKRMEKDLLELQTLIDVHFEQRKKEEEELVALKERIERRRSERAEQQRFRTEKERERQAKLAEEKMRKEEEEAKKRAEDDAKKKKVLSNMGAHFGGYLVKAEQKRGKRQTGREMKVRILSERKKPLDIDYMGEEQLRARSAWLPPSQPSCPAREKAQELSDWIHQLESEKFDLMAKLKQQKYEINVLYNRISHAQKFRKGAGKGRVGGRWK

SEQ ID NO: 137019 - DNA, 837 bp, Artificial Sequence
  derived and/or modified sequence
atgagcgacaccgaggagcaggagtacgaggaggagcagcccgaggaggaggccgccgaggaggaggaggaggcccccgaggagcccgagcccgtggccgagcccgaggaggagagacccaagcccagcagacccgtggtgccccccctgatcccccccaagatccccgagggcgagagagtggacttcgacgacatccacagaaagagaatggagaaggacctgctggagctgcagaccctgatcgacgtgcacttcgagcagagaaagaaggaggaggaggagctggtggccctgaaggagagaatcgagagaagaagaagcgagagagccgagcagcagagattcagaaccgagaaggagagagagagacaggccaagctggccgaggagaagatgagaaaggaggaggaggaggccaagaagagagccgaggacgacgccaagaagaagaaggtgctgagcaacatgggcgcccacttcggcggctacctggtgaaggccgagcagaagagaggcaagagacagaccggcagagagatgaaggtgagaatcctgagcgagagaaagaagcccctggacatcgactacatgggcgaggagcagctgagagccagaagcgcctggctgccccccagccagcccagctgccccgccagagagaaggcccaggagctgagcgactggatccaccagctggagagcgagaagttcgacctgatggccaagctgaagcagcagaagtacgagatcaacgtgctgtacaacagaatcagccacgcccagaagttcagaaagggcgccggcaagggcagagtgggcggcagatggaagtag

SEQ ID NO: 137020 - DNA, 837 bp, Artificial Sequence
  derived and/or modified sequence
atgtctgacacagaggagcaggagtatgaggaggagcagcccgaggaagaggcagctgaggaggaagaagaggctcctgaggaacccgagccagttgctgagcctgaggaggaacggccgaaaccttcccgacccgtggttcccccattgataccccccaagattcctgagggcgagcgagtcgatttcgacgatatccatcgaaaacggatggaaaaggatttattggagctacagacactgattgatgtgcacttcgagcagcgcaaaaaggaggaagaagaactggtggccctcaaagaaaggatcgagagaaggcgttccgaacgcgctgagcagcagcgtttcaggacagaaaaagagagagagcgtcaagctaagctcgccgaagaaaagatgcgtaaagaagaggaagaggcgaaaaaaagagcagaggacgacgctaaaaagaaaaaggtgctgtctaatatgggagcccacttcggtggatacctggttaaagccgaacagaagcggggcaaacggcaaaccggcagggagatgaaagtgcgtattctcagtgagagaaaaaagccattggacattgattacatgggcgaagaacagctccgcgcaagaagtgcgtggctaccaccatctcaaccatcttgccccgcccgggagaaagctcaggaactctctgactggatccatcagctcgagtccgaaaaatttgacctgatggccaagctcaaacaacagaaatatgaaataaatgtcctgtataaccgcatcagccatgcccagaagtttcgcaagggcgcaggaaagggccgtgtcggggggcgttggaagtag

SEQ ID NO: 137021 - DNA, 837 bp, Artificial Sequence
  derived and/or modified sequence
atgagtgacaccgaggaacaggaatacgaagaagagcaacccgaagaagaagccgccgaagaggaggaggaggcccccgaggaaccggaaccagtggcagagcctgaggaagagagacctaaaccgagtcgccctgtggtgcctccactcatcccgccaaaaatccctgaaggcgaacgcgttgactttgatgatatacatcgcaaacggatggaaaaggacctgctggaactccagactctgatcgacgtgcacttcgagcagcgtaaaaaagaagaagaggagttggtcgccctgaaggaacgtattgagaggcgacgcagtgagcgagccgagcagcaaaggtttcgaaccgaaaaggaacgagaacgccaggctaaacttgcggaagagaagatgaggaaggaggaggaagaagctaagaagcgagccgaggatgatgctaaaaagaaaaaggtgctgtcaaatatgggggctcactttggaggctacctggtcaaggctgaacaaaaaaggggcaagagacaaaccggacgggagatgaaggtgagaattttgagcgagcgtaagaagcccctagacatcgattatatgggagaggaacagttgcgagcgcggtccgcatggctccccccctcccagccttcatgccctgccagagaaaaggctcaggaactaagcgactggatccatcagctggagtcagagaaattcgacttgatggccaagctgaagcagcagaagtatgagataaatgtgctgtacaacaggatctcccacgctcagaagtttcgcaaaggcgcaggaaaggggagagtcggtggtaggtggaagtag

SEQ ID NO: 137022 - DNA, 837 bp, Artificial Sequence
  derived and/or modified sequence
atgtctgacacagaggagcaggagtatgaggaggagcagcctgaggaggaggccgctgaggaggaggaggaggcccctgaggagcctgagcctgtggccgagcctgaggaggagcggcccaagcccagcaggcctgtggtgcccccactcatcccccccaagatccctgagggggagcgggtggactttgatgacatccacaggaagaggatggagaaggacctgctggagctgcagaccctgattgatgtgcactttgagcagaggaagaaggaggaggaggagctggtggccctgaaggagagaattgaaagaagaagaagtgaaagagctgagcagcagcgcttcagaacagagaaggagcgggagcggcaggccaagctggccgaggagaagatgaggaaggaggaggaggaggccaagaagagagcagaagatgatgccaagaagaagaaggtgctgagcaacatgggcgcccactttggaggctacctggtgaaggccgagcagaagaggggcaagaggcagacaggccgggagatgaaggtgcgcatcctgtctgagaggaagaagcccctggacatcgactacatgggagaggagcagctgcgggcccggagcgcctggctgccccccagccagcccagctgcccagcccgggagaaggcccaggagctgagtgactggatccaccagctggagagcgagaagtttgacctgatggccaagctgaagcagcagaagtatgagatcaacgtgctgtacaaccgcatcagccacgcccagaagttcaggaagggggccggcaagggccgggtgggcggccgctggaagtag

SEQ ID NO: 137023 - DNA, 837 bp, Artificial Sequence
  derived and/or modified sequence
atgagcgacaccgaggagcaggagtacgaggaggagcagcccgaggaagaggctgccgaggaggaagaggaagcccctgaggagccagaaccagttgctgaacctgaggaagagcggccaaaaccctcccgcccagtcgtgccgccacttatccctcccaagattcccgagggagaacgagtagattttgacgatattcacagaaaacgaatggagaaggatctgttagagttgcaaaccctcatcgacgttcacttcgagcagcgtaaaaaggaagaggaggagctggtggctctcaaagagaggatcgaacgtcgaaggagcgagcgcgcagagcagcagaggttccgcacggaaaaggagcgcgaacggcaggcgaagttagctgaagaaaagatgcgcaaagaagaggaggaggccaagaagcgggctgaggatgacgctaaaaagaagaaagtactctctaacatgggagcgcatttcggaggatacctggttaaagctgaacagaagcggggaaagcggcagaccggccgtgagatgaaggtaagaatcttgagtgagaggaagaaacctctcgacattgattacatgggtgaggagcaactgagagccagatctgcctggctacctccatctcagccatcctgccctgcccgggagaaggcccaggagctgtccgattggattcatcaattggagtctgagaaattcgacttgatggcaaagttgaaacagcagaagtacgagataaacgtcctgtacaacaggatatcgcacgcacagaaatttaggaagggggctggcaaaggacgggtgggggggcggtggaaatag

SEQ ID NO: 137024 - DNA, 837 bp, Artificial Sequence
  derived and/or modified sequence
atgagcgacaccgaggagcaggagtacgaggaggagcagcccgaggaagaggccgccgaggaggaggaggaggccccagaggaacccgagcccgtggccgagcccgaagaggaacggcctaaaccctcacgacccgtagtgccgcctcttattcctcctaaaatcccagaaggggaaagagtggactttgatgatatccacagaaagcgaatggaaaaagatctgttggaattacagactctgatcgacgtgcacttcgagcagcgtaagaaagaagaggaagaactggtagcccttaaagagcggatagaaagaagacgctccgaaagagccgaacaacagcggttcaggacagaaaaggagagagaacgccaagctaagttggctgaggagaaaatgcgtaaagaagaagaggaggccaagaagagggccgaggacgacgccaagaaaaagaaagtcttaagtaatatgggcgctcacttcggcggatatctggtgaaagccgagcagaaaaggggcaagcgacagactgggagggaaatgaaagtgcggattctcagcgaacgtaaaaaaccactggacattgactatatgggcgaggaacagctccgtgcacgttctgcctggctcccaccctcgcagcccagttgccccgctcgagaaaaagcacaagagctctcggactggatacatcagctggagtccgagaagtttgatctcatggcaaaactcaaacagcagaaatacgagatcaacgtgttgtacaaccgcatctcccacgcgcagaagtttcgtaagggggctggtaaaggaagggtcggggggcgctggaagtag

SEQ ID NO: 137025 - DNA, 837 bp, Artificial Sequence
  derived and/or modified sequence
atgtctgacacagaggaacaggagtatgaagaggaacaaccggaggaagaggctgccgaagaagaagaagaggctccggaggagcctgagcccgtcgctgaacctgaagaggagaggccaaaaccaagtagacccgtcgtccccccactaatccctccaaagattccggaaggggaaagggtcgactttgacgacattcatcggaagaggatggaaaaagacctgcttgagcttcaaacactgatagacgtccacttcgagcagcgcaagaaggaagaagaggaactcgtagcattaaaagagaggattgaacggagaaggagcgagagagccgagcagcagagattccggacagagaaggaacgcgaacgtcaggcgaaactcgcagaggagaagatgagaaaagaggaagaagaggcaaagaagagagccgaggatgacgccaaaaagaaaaaggtcttatccaatatgggcgcacatttcggaggttatctcgtcaaggccgaacaaaaacgaggcaaaagacagaccggacgcgagatgaaggttaggattctgtctgaaagaaaaaagcctctggatatcgattacatgggggaggaacagctgcgcgctcgtagtgcctggctaccaccaagccaaccctcatgtcctgcgagagagaaggcacaggagctgtctgactggatacaccagctggaaagcgagaagtttgatctgatggccaaactgaaacaacaaaagtatgaaatcaatgtactgtacaatagaatctctcacgcgcagaaattccgaaagggagccggtaaagggagggtagggggtcggtggaaatag

SEQ ID NO: 137026 - DNA, 837 bp, Artificial Sequence
  derived and/or modified sequence
atgagcgatactgaagagcaggagtacgaggaggaacagcccgaggaagaggccgctgaggaggaagaagaggcaccggaggagcccgaacccgtggcggagcccgaagaagagcggccaaagcctagtagacccgtggtccctcctctgataccacccaaaatccccgagggcgagcgcgtggactttgacgacattcacagaaaacgcatggaaaaggacctgcttgagctacagactttgattgacgtacacttcgagcagagaaagaaagaagaggaggagctcgtggctctaaaggagcgcattgagaggcgaagaagcgaaagggccgagcaacaacgctttaggacagagaaggagagagaacgccaggccaaactcgccgaagagaagatgagaaaggaagaggaggaagcaaagaagagggccgaagacgacgctaagaagaaaaaggtgctttctaatatgggcgctcactttgggggataccttgtgaaggccgaacagaagcggggaaaaagacagaccggcagggaaatgaaagtgaggatcctctccgaaagaaagaaacctctagatattgattacatgggggaggaacagctccgcgctcggagtgcctggctgccacctagtcagcccagttgcccagcgcgtgaaaaggcccaggagttgagtgactggattcatcagttagaaagtgagaagttcgatctcatggctaagctgaaacagcagaagtacgaaattaatgttctctacaatagaatatctcacgcgcaaaagttcaggaaaggcgcaggcaaaggacgagttggcggacggtggaagtag

SEQ ID NO: 137027 - DNA, 1163 bp, Artificial Sequence
  derived and/or modified sequence
ctggactctgagtgtggagccaggggcagcagggctgtctctgaactcccaggcttgtgtttgagcaaaggaattctctccccctccctctcccctcggggcgggcccgagcctccagctataaactccccggagcttcagtgccctcagcaaggctcagcctcaagattcacagcatctcagacacagcctaggccgcaccaggatgtcggacaccgaggagcaggaatatgaggaggagcagccggaagaggaggctgcggaggaggaggaggaagcccccgaagagccggagccggtggcagagccagaagaggaacgccccaaaccaagccgccccgtggtgcctcctttgatcccgccaaagatcccagaaggggagcgcgttgacttcgatgacatccaccgcaagcgcatggagaaagacctgctggagctgcagacactcatcgatgtacatttcgagcagcggaagaaggaggaagaggagctggttgccttgaaggagcgcattgagcggcgccggtcagagagagccgagcaacagcgcttcagaactgagaaggaacgcgaacgtcaggctaagctggcggaggagaagatgaggaaggaagaggaagaggccaagaagcgggcagaggatgatgccaagaaaaagaaggtgctgtccaacatgggggcccattttggcggctacctggtcaaggcagaacagaagcgtggtaagcggcagacggggcgggagatgaaggtgcgcatcctctccgagcgtaagaagcctctggacattgactacatgggggaggaacagctccgggcccggtctgcctggctgcctccatcacagccctcctgccctgccagggagaaagcccaggagctgtcggactggatccaccagctggagtctgagaagttcgacctgatggcgaagctgaaacagcagaaatatgagatcaacgtgctgtacaaccgcatcagccacgcccagaagttccgtaagggggcagggaagggccgcgttggaggccgctggaagtgaggatgccgccccggacagtggcacctgggaagcctgggagtgtttgtcccatcggtagcttgaaataaacgctcccctcagacacccgctgggttctctgatgttattatggttgagatgc

SEQ ID NO: 137028 - DNA, 1047 bp, Artificial Sequence
  derived and/or modified sequence
agctataaactccccggagcttcagtgccctcagcaaggctcagcctcaagattcacagcatctcagacacagcctaggccgcaccaggatgtcggacaccgaggagcaggaatatgaggaggagcagccggaagaggaggctgcggaggaggaggaggaagcccccgaagagccggagccggtggcagagccagaagaggaacgccccaaaccaagccgccccgtggtgcctcctttgatcccgccaaagatcccagaaggggagcgcgttgacttcgatgacatccaccgcaagcgcatggagaaagacctgctggagctgcagacactcatcgatgtacatttcgagcagcggaagaaggaggaagaggagctggttgccttgaaggagcgcattgagcggcgccggtcagagagagccgagcaacagcgcttcagaactgagaaggaacgcgaacgtcaggctaagctggcggaggagaagatgaggaaggaagaggaagaggccaagaagcgggcagaggatgatgccaagaaaaagaaggtgctgtccaacatgggggcccattttggcggctacctggtcaaggcagaacagaagcgtggtaagcggcagacggggcgggagatgaaggtgcgcatcctctccgagcgtaagaagcctctggacattgactacatgggggaggaacagctccgggcccggtctgcctggctgcctccatcacagccctcctgccctgccagggagaaagcccaggagctgtcggactggatccaccagctggagtctgagaagttcgacctgatggcgaagctgaaacagcagaaatatgagatcaacgtgctgtacaaccgcatcagccacgcccagaagttccgtaagggggcagggaagggccgcgttggaggccgctggaagtgaggatgccgccccggacagtggcacctgggaagcctgggagtgtttgtcccatcggtagcttgaaataaacgctcccctcagacacccgctgggttctctgatgttattatggttgagatgc

SEQ ID NO: 137029 - protein, 55 aa, Artificial Sequence
  derived and/or modified sequence
MSTSRKLKSHGMRRSKSRSPHKGVKRGGSKRKYRKGNLKSRKRGDDANRNYRSHL

SEQ ID NO: 137030 - DNA, 168 bp, Artificial Sequence
  derived and/or modified sequence
atgagcaccagcagaaagctgaagagccacggcatgagaagaagcaagagcagaagcccccacaagggcgtgaagagaggcggcagcaagagaaagtacagaaagggcaacctgaagagcagaaagagaggcgacgacgccaacagaaactacagaagccacctgtag

SEQ ID NO: 137031 - DNA, 168 bp, Artificial Sequence
  derived and/or modified sequence
atgtccacaagtaggaagcttaaatctcacggaatgaggcggtcgaagtctagatcaccacataagggcgtaaagcgcggagggtctaaacggaagtacagaaaaggaaatttaaaatctcggaagcggggggatgatgcaaacagaaattatcggtcccatctttag

SEQ ID NO: 137032 - DNA, 168 bp, Artificial Sequence
  derived and/or modified sequence
atgagcaccagcaggaagctgaagagccacggcatgagaagaagcaagagccgcagcccccacaagggcgtgaagagaggaggcagcaagaggaagtacagaaaaggaaacctgaagagcaggaagagaggagatgatgccaacagaaactaccgcagccacctgtag

SEQ ID NO: 137033 - DNA, 168 bp, Artificial Sequence
  derived and/or modified sequence
atgagcaccagccggaagctgaagagccacggcatgcggcggagcaaatccagatcaccacacaagggcgtgaagcggggcggctctaaacggaaatatcggaagggtaatctcaagagccggaaaagaggggacgatgcaaacagaaattaccgttcccatctatag

SEQ ID NO: 137034 - DNA, 168 bp, Artificial Sequence
  derived and/or modified sequence
atgagtactagtcgcaaattgaagagccatggcatgcgcaggagtaagagccggtcgccccacaagggcgtgaagcggggtggctccaaaaggaagtatcgcaaagggaacctaaagtcaagaaaacgaggggatgatgcaaaccgaaattataggagtcacttgtag

SEQ ID NO: 137035 - DNA, 407 bp, Artificial Sequence
  derived and/or modified sequence
gcaaagcccctcattttggcagaacttaccatgtcgaccagccgcaaattaaagagtcatggcatgaggaggagcaagagccgatctcctcacaagggagtcaagagaggtggcagcaaaagaaaataccgtaagggcaacctgaaaagtaggaaacggggcgatgacgccaatcgcaattaccgctcccacttgtgagcccccagcgggctctgccctggtgcgcttcacacagcaccaagcagcaacaagaacagcagaaggggaactgccaaggagacctgatgttagatcaaagccagagaggagcctatggaatgtggatcaaatgccagttgtgacgaaatgaggaatgtatatgttggctgtttttccccaacatctcaataaaactttgaaagcagaaa

SEQ ID NO: 137036 - protein, 765 aa, Artificial Sequence
  derived and/or modified sequence
MSGDHLHNDSQIEADFRLNDSHKHKDKHKDREHRHKEHKKEKDREKSKHSNSEHKDSEKKHKEKEKTKHKDGSSEKHKDKHKDRDKEKRKEEKVRASGDAKIKKEKENGFSSPPQIKDEPEDDGYFVPPKEDIKPLKRPRDEDDADYKPKKIKTEDTKKEKKRKLEEEEDGKLKKPKNKDKDKKVPEPDNKKKKPKKEEEQKWKWWEEERYPEGIKWKFLEHKGPVFAPPYEPLPENVKFYYDGKVMKLSPKAEEVATFFAKMLDHEYTTKEIFRKNFFKDWRKEMTNEEKNIITNLSKCDFTQMSQYFKAQTEARKQMSKEEKLKIKEENEKLLKEYGFCIMDNHKERIANFKIEPPGLFRGRGNHPKMGMLKRRIMPEDIIINCSKDAKVPSPPPGHKWKEVRHDNKVTWLVSWTENIQGSIKYIMLNPSSRIKGEKDWQKYETARRLKKCVDKIRNQYREDWKSKEMKVRQRAVALYFIDKLALRAGNEKEEGETADTVGCCSLRVEHINLHPELDGQEYVVEFDFLGKDSIRYYNKVPVEKRVFKNLQLFMENKQPEDDLFDRLNTGILNKHLQDLMEGLTAKVFRTYNASITLQQQLKELTAPDENIPAKILSYNRANRAVAILCNHQRAPPKTFEKSMMNLQTKIDAKKEQLADARRDLKSAKADAKVMKDAKTKKVVESKKKAVQRLEEQLMKLEVQATDREENKQIALGTSKLNYLDPRITVAWCKKWGVPIEKIYNKTQREKFAWAIDMADEDYEF

SEQ ID NO: 137037 - DNA, 2298 bp, Artificial Sequence
  derived and/or modified sequence
atgagcggcgaccacctgcacaacgacagccagatcgaggccgacttcagactgaacgacagccacaagcacaaggacaagcacaaggacagagagcacagacacaaggagcacaagaaggagaaggacagagagaagagcaagcacagcaacagcgagcacaaggacagcgagaagaagcacaaggagaaggagaagaccaagcacaaggacggcagcagcgagaagcacaaggacaagcacaaggacagagacaaggagaagagaaaggaggagaaggtgagagccagcggcgacgccaagatcaagaaggagaaggagaacggcttcagcagccccccccagatcaaggacgagcccgaggacgacggctacttcgtgccccccaaggaggacatcaagcccctgaagagacccagagacgaggacgacgccgactacaagcccaagaagatcaagaccgaggacaccaagaaggagaagaagagaaagctggaggaggaggaggacggcaagctgaagaagcccaagaacaaggacaaggacaagaaggtgcccgagcccgacaacaagaagaagaagcccaagaaggaggaggagcagaagtggaagtggtgggaggaggagagataccccgagggcatcaagtggaagttcctggagcacaagggccccgtgttcgcccccccctacgagcccctgcccgagaacgtgaagttctactacgacggcaaggtgatgaagctgagccccaaggccgaggaggtggccaccttcttcgccaagatgctggaccacgagtacaccaccaaggagatcttcagaaagaacttcttcaaggactggagaaaggagatgaccaacgaggagaagaacatcatcaccaacctgagcaagtgcgacttcacccagatgagccagtacttcaaggcccagaccgaggccagaaagcagatgagcaaggaggagaagctgaagatcaaggaggagaacgagaagctgctgaaggagtacggcttctgcatcatggacaaccacaaggagagaatcgccaacttcaagatcgagccccccggcctgttcagaggcagaggcaaccaccccaagatgggcatgctgaagagaagaatcatgcccgaggacatcatcatcaactgcagcaaggacgccaaggtgcccagccccccccccggccacaagtggaaggaggtgagacacgacaacaaggtgacctggctggtgagctggaccgagaacatccagggcagcatcaagtacatcatgctgaaccccagcagcagaatcaagggcgagaaggactggcagaagtacgagaccgccagaagactgaagaagtgcgtggacaagatcagaaaccagtacagagaggactggaagagcaaggagatgaaggtgagacagagagccgtggccctgtacttcatcgacaagctggccctgagagccggcaacgagaaggaggagggcgagaccgccgacaccgtgggctgctgcagcctgagagtggagcacatcaacctgcaccccgagctggacggccaggagtacgtggtggagttcgacttcctgggcaaggacagcatcagatactacaacaaggtgcccgtggagaagagagtgttcaagaacctgcagctgttcatggagaacaagcagcccgaggacgacctgttcgacagactgaacaccggcatcctgaacaagcacctgcaggacctgatggagggcctgaccgccaaggtgttcagaacctacaacgccagcatcaccctgcagcagcagctgaaggagctgaccgcccccgacgagaacatccccgccaagatcctgagctacaacagagccaacagagccgtggccatcctgtgcaaccaccagagagccccccccaagaccttcgagaagagcatgatgaacctgcagaccaagatcgacgccaagaaggagcagctggccgacgccagaagagacctgaagagcgccaaggccgacgccaaggtgatgaaggacgccaagaccaagaaggtggtggagagcaagaagaaggccgtgcagagactggaggagcagctgatgaagctggaggtgcaggccaccgacagagaggagaacaagcagatcgccctgggcaccagcaagctgaactacctggaccccagaatcaccgtggcctggtgcaagaagtggggcgtgcccatcgagaagatctacaacaagacccagagagagaagttcgcctgggccatcgacatggccgacgaggactacgagttctag

SEQ ID NO: 137038 - DNA, 2298 bp, Artificial Sequence
  derived and/or modified sequence
atgtccggcgatcacttgcacaacgattcacagattgaagcagatttccggctgaatgatagccacaaacataaagataagcacaaagatagggagcatcgtcataaggagcacaaaaaagaaaaagatagggagaaaagcaagcattcaaactccgaacataaagactcagaaaagaagcacaaagagaaagaaaaaacaaaacacaaggacggcagctctgaaaagcacaaagataagcataaggatagggataaggagaagagaaaggaagaaaaggtacgagccagtggggacgcaaagattaagaaggaaaaggagaacggcttttcctctcccccgcagatcaaggatgagcccgaggacgatggttacttcgtgcctcccaaagaagacattaagccattgaaacggccccgcgatgaggacgacgccgattataagccgaagaagatcaagaccgaagacactaagaaggagaaaaagcgcaagctggaggaggaagaggacggtaagttaaaaaagccaaaaaataaggacaaggacaaaaaggtgccagagcctgacaacaaaaaaaaaaaaccaaagaaagaggaggagcagaagtggaagtggtgggaggaagaaagatatcctgaggggataaagtggaaatttttggagcataaaggtccggtctttgctccaccttacgaacccctccccgagaacgttaaattctactatgacggcaaagtcatgaagctgagccccaaagcagaggaagtggctaccttttttgcaaaaatgctggaccacgaatacaccactaaggagatctttcgaaagaatttcttcaaagactggcgaaaggaaatgaccaatgaggagaagaacatcattactaatcttagcaagtgcgacttcactcagatgtcccagtactttaaggctcagacagaggcgcgcaaacagatgagcaaggaagagaagctgaagattaaggaggagaatgagaaactcctcaaggagtatgggttctgcatcatggataaccataaggagaggattgccaattttaagatcgagccacctgggctgttcaggggacggggaaatcaccctaagatgggaatgctgaagcgccgaataatgcccgaagacatcataatcaattgtagtaaagacgcaaaggttccaagtcctccccctggtcacaaatggaaggaggttagacacgacaacaaggtcacttggctcgtttcctggacagaaaacatccagggaagcattaagtacataatgctgaatccttccagtagaattaagggcgagaaagactggcagaagtacgagacagcacgtcgactgaagaaatgtgtagataagattcgaaatcaatacagagaagactggaagtctaaagagatgaaagtgcgacagagggctgtcgctctgtactttattgataaactagcactgagagcaggcaacgagaaggaagagggcgagaccgccgacacggtgggttgctgctccctgcgtgtggagcacatcaatctgcacccagagcttgacgggcaggagtacgtggtggaatttgacttccttgggaaagacagcattcgttactataataaagtgcccgtcgaaaagagggtgttcaaaaacctgcagttgtttatggaaaacaaacagccagaagatgacctgttcgatcgactcaatactggcattctcaacaagcatctccaggatttgatggaaggacttacagcaaaagtgttccgcacgtacaatgcaagcatcacactgcaacagcaacttaaggagctgaccgctcccgacgagaatataccggccaagattttaagctacaaccgggctaatcgagccgtggctatcctatgtaatcatcaacgcgccccacctaagacattcgagaaatccatgatgaacctgcaaacgaaaattgatgcaaagaaagagcagctagctgacgctcgccgagatctgaagagcgccaaggccgacgccaaggttatgaaagatgccaaaacaaaaaaagtggtagagagtaagaagaaggcagtacagcgcctggaggaacagctgatgaaacttgaggttcaggcaactgatcgcgaagagaacaagcagattgcacttggaacttctaaactgaactacctggaccctcggattactgtggcctggtgtaagaaatggggagtcccgatcgaaaaaatttataataagacacagcgagaaaagttcgcctgggcgattgacatggctgacgaggattatgagttttag

SEQ ID NO: 137039 - DNA, 2298 bp, Artificial Sequence
  derived and/or modified sequence
atgtctggggaccacctgcacaatgacagccagatcgaggccgacttccggctgaatgacagccacaagcacaaggacaagcacaaggaccgggagcaccgccacaaggagcacaagaaggagaaggaccgggagaagagcaagcacagcaacagcgagcacaaggacagcgagaagaagcacaaggagaaggagaagaccaagcacaaggatggcagcagcgagaagcacaaggacaagcacaaggaccgggacaaggagaagaggaaggaggagaaggtgcgggccagcggagatgccaagatcaagaaggagaaggaaaatggcttcagcagccccccccagatcaaggatgagccagaagatgatggctactttgtgccccccaaggaggacatcaagcccctgaagaggcccagagatgaagatgatgctgactacaagcccaagaagatcaagacagaggacaccaagaaggagaagaagaggaagctggaggaggaggaggatggcaagctgaagaagcccaagaacaaggacaaggacaagaaggtgcctgagccagacaacaagaagaagaagcccaagaaggaggaggagcagaagtggaagtggtgggaggaggagcgctacccagagggcatcaagtggaagttcctggagcacaagggccctgtgtttgccccaccctatgagcccctgcctgaaaatgtgaagttctactatgatggcaaggtgatgaagctgagccccaaggccgaggaggtggccaccttctttgccaagatgctggaccacgagtacaccaccaaggagatcttcaggaagaacttcttcaaggactggaggaaggagatgaccaatgaggagaagaacatcatcaccaacctgagcaaatgtgacttcacccagatgagccagtacttcaaggcccagacagaggccaggaagcagatgagcaaggaggagaagctgaagatcaaggaggagaatgagaagctgctgaaggagtatggcttctgcatcatggacaaccacaaggagcgcatcgccaacttcaagattgagcccccaggcctcttccggggccggggcaaccaccccaagatgggcatgctgaagaggcgcatcatgcctgaggacatcatcatcaactgcagcaaggatgccaaggtgcccagccccccacctggccacaagtggaaggaggtgagacatgacaacaaggtgacctggctggtgtcctggacagagaacatccagggcagcatcaagtacatcatgctgaaccccagcagccgcatcaagggggagaaggactggcagaagtatgaaacagcccggcggctgaagaagtgtgtggacaagatccggaaccagtaccgggaggactggaagagcaaggagatgaaggtgcggcagagagctgtggccctgtacttcatcgacaagctggccctgcgggctggaaatgagaaggaggagggggagacagctgacacagtgggctgctgcagcctgcgggtggagcacatcaacctgcaccctgagctggatggccaggagtatgtggtggagtttgacttcctgggcaaggacagcatccgctactacaacaaggtgcctgtggagaagagggtcttcaagaacctgcagctgttcatggagaacaagcagccagaagatgacctgtttgaccggctgaacacaggcatcctgaacaagcacctgcaggacctgatggagggcctgacagccaaggtgttccgcacctacaatgccagcatcaccctgcagcagcagctgaaggagctgacagccccagatgagaacatcccagccaagatcctgagctacaacagagccaacagagctgtggccatcctgtgcaaccaccagagggccccacccaagacctttgagaagtccatgatgaacctgcagaccaagattgatgccaagaaggagcagctggctgatgcccggcgggacctgaagagcgccaaggcagatgccaaggtgatgaaggatgccaagaccaagaaggtggtggagagcaagaagaaggctgtgcagaggctggaggagcagctgatgaagctggaggtgcaggccacagaccgggaggagaacaagcagatcgccctgggcaccagcaagctgaactacctggacccccgcatcaccgtggcctggtgcaagaagtggggcgtgcccatcgagaagatctacaacaagacccagcgggagaagtttgcctgggccatcgacatggctgatgaagattatgagttctag

SEQ ID NO: 137040 - DNA, 2298 bp, Artificial Sequence
  derived and/or modified sequence
atgagcggcgaccacctgcacaacgacagccagatcgaggccgacttccggctgaatgatagccacaaacataaggacaagcacaaagatcgcgagcacagacacaaggaacacaagaaggaaaaagatcgggaaaagagcaagcacagtaattctgaacacaaggattctgagaagaagcacaaagaaaaagagaaaactaagcacaaagacggatcctcagagaagcacaaagacaagcacaaagacagggacaaagagaaacgaaaggaggaaaaagttcgggcgtccggggacgctaagattaaaaaggagaaagagaatggcttttcgtcgcctccccagattaaagacgagcccgaggacgatggatattttgtgcctccgaaggaggacatcaaacctttgaagaggcctcgggatgaggacgatgcagattacaagcccaagaagattaaaacagaagatacgaagaaagagaagaagcgaaaactggaggaggaggaagacggcaagctgaaaaaacctaaaaacaaggataaggacaaaaaggtgccagaacccgacaataaaaagaaaaagccaaaaaaggaagaagagcagaaatggaaatggtgggaggaggagcgttaccccgaaggcatcaagtggaagtttctggagcataagggacccgtgtttgcccccccgtatgagcctctacctgaaaacgtgaagttctactacgacggcaaagtgatgaaactctctccaaaggccgaagaagtcgctaccttctttgctaaaatgcttgaccatgaatatactacaaaggagatttttagaaagaacttcttcaaagattggaggaaggaaatgaccaatgaagagaagaacattattacgaatctcagtaaatgtgatttcactcagatgagtcaatatttcaaggcccagaccgaggccagaaagcagatgagcaaggaagagaagctcaagatcaaggaagagaacgagaagctactgaaagagtatggattctgtattatggacaatcataaagaacggattgccaattttaagattgaacctccaggtctttttcgcggccgaggaaatcatccgaaaatgggaatgctgaaacgtaggattatgcccgaagacataataatcaactgcagtaaggatgcaaaggttcccagcccacccccaggccataaatggaaagaagttcgacatgataacaaggtgacctggttggtaagttggaccgagaatattcagggatccatcaagtacatcatgcttaacccaagcagtaggattaagggtgaaaaggattggcagaagtacgagactgctaggcgactgaagaaatgcgtagataaaatcaggaatcagtatcgtgaagactggaaatctaaagaaatgaaagtccgacaacgcgccgtggcactctatttcatcgataagctggccctgagagccggaaacgaaaaagaagagggggagacagccgatacagttggatgttgttccctccgtgtggagcatatcaatttgcatcccgagcttgacggacaagaatacgttgtggagttcgactttcttggcaaggattctatccgatactacaataaagtccccgtagaaaaaagggtattcaaaaacttacagctctttatggagaacaaacagccagaggatgacctttttgaccgcctcaacaccgggattttgaataagcatcttcaggacctgatggagggactaactgccaaggtctttcgcacatacaatgcgagtatcacacttcagcagcagctgaaagagttaaccgctcctgatgaaaacattcctgctaagattctgtcatataaccgcgccaacagggctgtggctatactctgcaaccatcagcgggcgccgccaaaaaccttcgagaaatccatgatgaatctacagacaaaaattgacgccaagaaggagcaactggccgacgctcgccgggacctgaaatccgctaaggcggatgccaaagtgatgaaggatgccaagaccaagaaagtcgttgagtctaagaagaaggccgtccagcgactggaagagcagctgatgaaactcgaagtgcaggcaaccgatagggaggagaataagcagatcgcactcggaaccagcaaactaaactacttagaccccaggattaccgttgcttggtgtaagaagtggggggtgcccattgaaaaaatctacaataagacccagagggagaagttcgcctgggccatcgacatggcagacgaggattacgaattctag

SEQ ID NO: 137041 - DNA, 2298 bp, Artificial Sequence
  derived and/or modified sequence
atgtcaggcgaccatctccacaatgactctcagatcgaggctgattttagattaaatgatagccacaagcacaaggacaagcataaagacagggagcaccgtcataaagaacataagaaagagaaggatcgagagaagtcgaagcatagcaactcagagcataaagactccgaaaagaagcataaggaaaaagagaagacaaagcataaagacggctcttccgaaaagcataaagacaaacacaaagaccgcgataaagaaaaaagaaaagaagagaaagtccgggcaagcggagatgcgaaaattaaaaaagagaaagaaaacggtttctccagtcccccacagatcaaagacgagcctgaagatgatggatacttcgtacctcctaaggaggacatcaagccgctgaaacggccacgggatgaagatgacgccgactacaagcccaagaaaatcaaaactgaagacaccaagaaggagaagaaacggaagctagaggaggaggaggatggcaaacttaagaagccgaaaaacaaagacaaagacaaaaaagtgcctgaacccgataataagaagaagaagcctaaaaaggaggaagagcagaagtggaagtggtgggaagaggaaagataccccgagggaattaagtggaagttccttgaacacaaggggcctgtgtttgctcctccttacgaacctttgcccgagaatgtgaagttctactacgatggcaaggtcatgaaactgagtcccaaggccgaggaagtcgctacgttcttcgcaaaaatgctggatcatgaatataccacaaaagagatattcagaaagaactttttcaaagactggaggaaggaaatgaccaatgaggaaaaaaacatcattactaacctttcaaaatgtgatttcactcagatgtcccagtacttcaaggctcagactgaggccagaaaacagatgagcaaagaggaaaaactcaaaatcaaagaggaaaacgagaaactcctcaaagagtatggtttttgtattatggataatcacaaggaacggatcgcgaatttcaagatagagccaccaggactattcagaggcagaggcaatcacccaaaaatgggtatgctgaagaggcgcatcatgcccgaagatatcataatcaattgtagtaaggatgccaaagtgccatctccccctcccggtcacaaatggaaggaagtgcggcatgacaacaaggttacatggcttgtgagctggacagagaacatccagggttccatcaagtacatcatgttgaaccctagttctcgtattaaaggagagaaagactggcagaaatatgagactgcccgacgactaaaaaagtgtgtcgacaaaatcagaaatcagtatcgcgaagattggaagtctaaagaaatgaaggtgcggcagcgtgccgtggccctttactttatcgacaagctggccctcagagccggtaatgagaaggaagaaggtgaaaccgcagatacagttggctgctgctcgcttcgggtcgaacatatcaacttgcacccggaattagacgggcaggagtacgttgtggagttcgactttcttggcaaagattccatccgatattataataaggtgcctgtggagaaacgagtcttcaaaaatctgcagctcttcatggagaataagcaacctgaagatgatttatttgaccggctgaacactgggattctcaataagcacctgcaagacctgatggagggactgaccgccaaggtgtttagaacttacaatgccagtattaccctccagcaacaattaaaagagttaaccgccccagacgagaatatccctgctaagattctgagttataatagggccaaccgcgcagtggctatcctgtgcaaccatcaacgcgctccccctaagactttcgagaagtcgatgatgaacctgcagactaagatcgacgccaagaaggagcaacttgccgatgctagacgcgatctgaaatcagccaaagcggacgccaaggtaatgaaggatgccaaaaccaaaaaggtggtggagtctaagaagaaggccgtacagcgactggaagaacagctgatgaagctggaggtccaggctactgatcgtgaagagaataagcaaatcgccctagggacgtcaaaactaaactatctggatcccaggattactgtcgcctggtgcaaaaagtggggggtccccattgaaaaaatctacaataaaacacagcgggaaaaatttgcctgggcaatagacatggccgacgaagactatgagttctag

SEQ ID NO: 137042 - DNA, 3738 bp, Artificial Sequence
  derived and/or modified sequence
agcccaaatgcgaacttaggctgttacacaactgctggggtctgttctcgccgcccgcccggcagtcaggcagcgtcgccgccgtggtagcagcctcagccgtttctggagtctcgggcccacagtcaccgccgcttacctgcgcctcctcgagcctccggagtccccgtccgcccgcacaggccggttcgccgtctgcgtctcccccacgccgcctcgcctgccgccgcgctcgtccctccgggccgacatgagtggggaccacctccacaacgattcccagatcgaagcggatttccgattgaatgattctcataaacacaaagataaacacaaagatcgagaacaccggcacaaagaacacaagaaggagaaggaccgggaaaagtccaagcatagcaacagtgaacataaagattctgaaaagaaacacaaagagaaggagaagaccaaacacaaagatggaagctcagaaaagcataaagacaaacataaagacagagacaaggaaaaacgaaaagaggaaaaggttcgagcctctggggatgcaaaaataaagaaggagaaggaaaatggcttctctagtccaccacaaattaaagatgaacctgaagatgatggctattttgttcctcctaaagaggatataaagccattaaagagacctcgagatgaggatgatgctgattataaacctaagaaaattaaaacagaagataccaagaaggagaagaaaagaaaactagaagaagaagaggatggtaaattgaaaaaacccaagaataaagataaagataaaaaagttcctgagccagataacaagaaaaagaagccgaagaaagaagaggaacagaagtggaaatggtgggaagaagagcgctatcctgaaggcatcaagtggaaattcctagaacataaaggtccagtatttgccccaccatatgagcctcttccagagaatgtcaagttttattatgatggtaaagtcatgaagctgagccccaaagcagaggaagtagctacgttctttgcaaaaatgctcgaccatgaatatactaccaaggaaatatttaggaaaaatttctttaaagactggagaaaggaaatgactaatgaagagaagaatattatcaccaacctaagcaaatgtgattttacccagatgagccagtatttcaaagcccagacggaagctcggaaacagatgagcaaggaagagaaactgaaaatcaaagaggagaatgaaaaattactgaaagaatatggattctgtattatggataaccacaaagagaggattgctaacttcaagatagagcctcctggacttttccgtggccgcggcaaccaccccaagatgggcatgctgaagagacgaatcatgcccgaggatataatcatcaactgtagcaaagatgccaaggttccttctcctcctccaggacataagtggaaagaagtccggcatgataacaaggttacttggctggtttcctggacagagaacatccaaggttccattaaatacatcatgcttaaccctagttcacgaatcaagggtgagaaggactggcagaaatacgagactgctcggcggctgaaaaaatgtgtggacaagatccggaaccagtatcgagaagactggaagtccaaagagatgaaagtccggcagagagctgtagccctgtacttcatcgacaagcttgctctgagagcaggcaatgaaaaggaggaaggagaaacagcggacactgtgggctgctgctcacttcgtgtggagcacatcaatctacacccagagttggatggtcaggaatatgtggtagagtttgacttcctcgggaaggactccatcagatactataacaaggtccctgttgagaaacgagtttttaagaacctacaactatttatggagaacaagcagcccgaggatgatctttttgatagactcaatactggtattctgaataagcatcttcaggatctcatggagggcttgacagccaaggtattccgtacatacaatgcctccatcacgctacagcagcagctaaaagaactgacagccccggatgagaacatcccagcgaagatcctttcttataaccgtgccaatcgagctgttgcaattctttgtaaccatcagagggcaccaccaaaaacttttgagaagtctatgatgaacttgcaaactaagattgatgccaagaaggaacagctagcagatgcccggagagacctgaaaagtgctaaggctgatgccaaggtcatgaaggatgcaaagacgaagaaggtagtagagtcaaagaagaaggctgttcagagactggaggaacagttgatgaagctggaagttcaagccacagaccgagaggaaaataaacagattgccctgggaacctccaaactcaattatctggaccctaggatcacagtggcttggtgcaagaagtggggtgtcccaattgagaagatttacaacaaaacccagcgggagaagtttgcctgggccattgacatggctgatgaagactatgagttttagccagtctcaagaggcagagttctgtgaagaggaacagtgtggtttgggaaagatggataaactgagcctcacttgccctcgtgcctgggggagagaggcagcaagtcttaacaaaccaacatctttgcgaaaagataaacctggagatattataagggagagctgagccagttgtcctatggacaacttatttaaaaatatttcagatatcaaaattctagctgtatgatttgttttgaattttgtttttattttcaagagggcaagtggatgggaatttgtcagcgttctaccaggcaaattcactgtttcactgaaatgtttggattctcttagctactgtatgcaaagtccgattatattggtgcgtttttacagttagggttttgcaataacttctatattttaatagaaataaattcctaaactcccttccctctctcccatttcaggaatttaaaattaagtagaacaaaaaacccagcgcacctgttagagtcgtcactctctattgtcatggggatcaattttcattaaacttgaagcagtcgtggctttggcagtgttttggttcagacacctgttcacagaaaaagcatgatgggaaaatatttcctgacttgagtgttcctttttaaatgtgaatttttatttctttttaattattttaaaatatttaaacctttttcttgatcttaaagatcgtgtagattggggttggggagggatgaagggcgagtgaatctaaggataatgaaataatcagtgactgaaaccattttcccatcatcctttgttctgagcattcgctgtaccctttaagatatccatctttttctttttaaccctaatctttcacttgaaagattttattgtataaaaagtttcacaggtcaataaacttagaggaaaatgagtatttggtccaaaaaaaggaaaaataatcaagattttagggcttttattttttcttttgtaattgtgtaaaaaatggaaaaaaacataaaaagcagaattttaatgtgaagacattttttgctataatcattagttttagaggcattgttagtttagtgtgtgtgcagagtccatttcccacatctttcctcaagtatcttctatttttatcatgaattcccttttaatcaactgtaggttatttaaaataaattcctacaacttaatggaaa

SEQ ID NO: 137043 - protein, 204 aa, Artificial Sequence
  derived and/or modified sequence
MEAEPKGLLETEPLQGTDEDAVASADFSSMLSEEEKEELKAELVQLEDEITTLRQVLSAKERHLVEIKQKLGMNLMNELKQNFSKSWHDMQTTTAYKKTHETLSHAGQKATAAFSNVGTAISKKFGDMSYSIRHSISMPAMRNSPTFKSFEERVETTVTSLKTKVGGTNPNGGSFEEVLSSTAHASAQSLAGGSRRTKEEELQC

SEQ ID NO: 137044 - protein, 175 aa, Artificial Sequence
  derived and/or modified sequence
MLSEEEKEELKAELVQLEDEITTLRQVLSAKERHLVEIKQKLGMNLMNELKQNFSKSWHDMQTTTAYKKTHETLSHAGQKATAAFSNVGTAISKKFGDMSYSIRHSISMPAMRNSPTFKSFEERVETTVTSLKTKVGGTNPNGGSFEEVLSSTAHASAQSLAGGSRRTKEEELQC

SEQ ID NO: 137045 - protein, 204 aa, Artificial Sequence
  derived and/or modified sequence
MEAQAQGLLETEPLQGTDEDAVASADFSSMLSEEEKEELKAELVQLEDEITTLRQVLSAKERHLVEIKQKLGMNLMNELKQNFSKSWHDMQTTTAYKKTHETLSHAGQKATAAFSNVGTAISKKFGDMSYSIRHSISMPAMRNSPTFKSFEERVETTVTSLKTKVGGTNPNGGSFEEVLSSTAHASAQSLAGGSRRTKEEELQC

SEQ ID NO: 137046 - protein, 92 aa, Artificial Sequence
  derived and/or modified sequence
MLSEEEKEELKAELVQLEDEITTLRQVLSAKERHLVEIKQKLGMNLMNELKQNFSKSWHDMQTTTAYKKTHETLSHAGQKATAAFSNVGTAI

SEQ ID NO: 137047 - DNA, 615 bp, Artificial Sequence
  derived and/or modified sequence
atggaggccgagcccaagggcctgctggagaccgagcccctgcagggcaccgacgaggacgccgtggccagcgccgacttcagcagcatgctgagcgaggaggagaaggaggagctgaaggccgagctggtgcagctggaggacgagatcaccaccctgagacaggtgctgagcgccaaggagagacacctggtggagatcaagcagaagctgggcatgaacctgatgaacgagctgaagcagaacttcagcaagagctggcacgacatgcagaccaccaccgcctacaagaagacccacgagaccctgagccacgccggccagaaggccaccgccgccttcagcaacgtgggcaccgccatcagcaagaagttcggcgacatgagctacagcatcagacacagcatcagcatgcccgccatgagaaacagccccaccttcaagagcttcgaggagagagtggagaccaccgtgaccagcctgaagaccaaggtgggcggcaccaaccccaacggcggcagcttcgaggaggtgctgagcagcaccgcccacgccagcgcccagagcctggccggcggcagcagaagaaccaaggaggaggagctgcagtgctag

SEQ ID NO: 137048 - DNA, 615 bp, Artificial Sequence
  derived and/or modified sequence
atggaggcccaggcccagggcctgctggagaccgagcccctgcagggcaccgacgaggacgccgtggccagcgccgacttcagcagcatgctgagcgaggaggagaaggaggagctgaaggccgagctggtgcagctggaggacgagatcaccaccctgagacaggtgctgagcgccaaggagagacacctggtggagatcaagcagaagctgggcatgaacctgatgaacgagctgaagcagaacttcagcaagagctggcacgacatgcagaccaccaccgcctacaagaagacccacgagaccctgagccacgccggccagaaggccaccgccgccttcagcaacgtgggcaccgccatcagcaagaagttcggcgacatgagctacagcatcagacacagcatcagcatgcccgccatgagaaacagccccaccttcaagagcttcgaggagagagtggagaccaccgtgaccagcctgaagaccaaggtgggcggcaccaaccccaacggcggcagcttcgaggaggtgctgagcagcaccgcccacgccagcgcccagagcctggccggcggcagcagaagaaccaaggaggaggagctgcagtgctag

SEQ ID NO: 137049 - DNA, 615 bp, Artificial Sequence
  derived and/or modified sequence
atggaagccgaacccaagggccttctggagacagagcccctacagggaactgacgaggacgcggtggcatccgccgatttttcttccatgcttagcgaggaagagaaagaagagctcaaggctgagctcgtccagctggaggatgagattacaaccctgagacaggttctgagcgccaaagaaagacatctagttgagatcaagcaaaagttgggtatgaatctgatgaacgagttgaagcagaatttctcaaagtcttggcacgacatgcagactaccactgcgtataaaaagacacatgaaacccttagtcacgcagggcagaaagcaactgcggcttttagcaatgttgggaccgcgatcagtaaaaagtttggcgacatgagctactctatcagacactcgattagcatgcccgcaatgcgcaactcgcccactttcaagagctttgaggaacgggtcgaaaccacagtgaccagtcttaagacgaaagtcggcggtacgaacccaaatggtggctcctttgaggaggtgctctcttcgacggctcacgcaagtgctcaaagcttagcaggaggatccagacgaaccaaagaggaggaacttcaatgttag

SEQ ID NO: 137050 - DNA, 615 bp, Artificial Sequence
  derived and/or modified sequence
atggaagcccaggcccaggggctactggagactgaaccgctgcaaggcactgacgaagacgccgttgcttctgccgatttcagctcaatgctttccgaggaagagaaggaggaacttaaagctgagctcgtgcagctcgaagatgaaataaccactctacggcaagtgctcagcgctaaagagaggcacctggtcgagatcaagcagaagctgggcatgaacctcatgaatgagctgaagcagaatttctcaaaaagctggcacgacatgcaaacaacaacagcctacaagaaaacccatgaaacgctctcccacgctggacagaaagccacggccgctttctccaatgtgggcaccgcgatcagcaaaaagtttggcgacatgagctatagcattcggcattccatctctatgcccgcaatgaggaattcacctaccttcaagtcatttgaagagcgagtcgagacgaccgtgaccagcttgaagaccaaggtcggaggcactaatccaaacggtggatccttcgaggaggtgctgtctagtaccgcccacgccagtgcacaatccctagccggcggttctcgtagaacaaaggaagaagagttgcagtgttag

SEQ ID NO: 137051 - DNA, 615 bp, Artificial Sequence
  derived and/or modified sequence
atggaggccgagcccaagggcctgctggagacagagcccctgcagggcacagatgaagatgctgtggccagcgctgacttcagctccatgctgtctgaggaggagaaggaggagctgaaggccgagctggtgcagctggaggatgagatcaccaccctgcggcaggtgctgagcgccaaggagcggcacctggtggagatcaagcagaagctgggcatgaacctgatgaatgagctgaagcagaacttcagcaagtcctggcatgacatgcagaccaccacagcctacaagaagacccatgagaccctgagccacgccggccagaaggccacagctgccttcagcaatgtgggcacagccatcagcaagaagtttggagacatgagctacagcatccgccacagcatctccatgcctgccatgaggaacagccccaccttcaagagctttgaggagcgggtggagaccaccgtgaccagcctgaagaccaaggtgggcggcaccaaccccaatggaggcagctttgaggaggtgctgagcagcacagcccacgccagcgcccagagcctggccggcggcagcaggaggaccaaggaggaggagctgcagtgctag

SEQ ID NO: 137052 - DNA, 615 bp, Artificial Sequence
  derived and/or modified sequence
atggaggcccaggcccagggcctgctggagacagagcccctgcagggcacagatgaagatgctgtggccagcgctgacttcagctccatgctgtctgaggaggagaaggaggagctgaaggccgagctggtgcagctggaggatgagatcaccaccctgcggcaggtgctgagcgccaaggagcggcacctggtggagatcaagcagaagctgggcatgaacctgatgaatgagctgaagcagaacttcagcaagtcctggcatgacatgcagaccaccacagcctacaagaagacccatgagaccctgagccacgccggccagaaggccacagctgccttcagcaatgtgggcacagccatcagcaagaagtttggagacatgagctacagcatccgccacagcatctccatgcctgccatgaggaacagccccaccttcaagagctttgaggagcgggtggagaccaccgtgaccagcctgaagaccaaggtgggcggcaccaaccccaatggaggcagctttgaggaggtgctgagcagcacagcccacgccagcgcccagagcctggccggcggcagcaggaggaccaaggaggaggagctgcagtgctag

SEQ ID NO: 137053 - DNA, 1149 bp, Artificial Sequence
  derived and/or modified sequence
atggaagcagaacctaaaggtttgttggagactgaaccgttgcaaggaacagacgaagatgcagtagccagtgctgacttctctagcatgctctctgaggaggaaaaggaagagttaaaagcagagttagttcagctagaagacgaaattacaacactacgacaagttttgtcagcgaaagaaaggcatctagttgagataaaacaaaaactcggcatgaacctgatgaatgaattaaaacagaacttcagcaaaagctggcatgacatgcagactaccactgcctacaagaaaacacatgaaaccctgagtcacgcagggcaaaaggcaactgcagctttcagcaacgttggaacggccatcagcaagaagttcggagacatgagttactccattcgccattccataagtatgcctgctatgaggaattctcctactttcaaatcatttgaggagagggttgagacaactgtcacaagcctcaagacgaaagtaggcggtacgaaccctaatggaggcagttttgaggaggtcctcagctccacggcccatgccagtgcccagagcttggcaggaggctcccggcggaccaaggaggaggagctgcagtgctaagtccagccagcgtgcagctgcatccagaaaccggccactacccagcccatctctgcctgtgcttatccagataagaagaccaaaatcccgctgggaaaaacccaggccttgacattgttattcaaatggcccctccagaaagtttaatgatttccatttgtatttgtgttgatgatggaccacttgaccatcacatttcagtattcatagatgactgtcacattttaaaatgttcccacttgagcaggtacacaactggtcataattcctgtctgtgtaattcgatgtatatttttccaaacatgtagctattgtttgctttgatttttgcttggcctcctttatgatgtgcatgtccttgaaggctgaatgaacagtccctttcagttcagcagatcaacaggatggagctcttcatgactgtctccagcaataggatgatttactataaatttcatccaactacttgtgatctctctcacctacatcaattatgtatgttaatttcagcaattaaaagaattgattttaatg

SEQ ID NO: 137054 - DNA, 615 bp, Artificial Sequence
  derived and/or modified sequence
atggaggccgagcccaagggcctgctggagaccgagcccctgcaggggaccgatgaggatgcagtagcatcagctgactttagctcaatgctgtcagaggaggaaaaggaagaacttaaggccgagctggtgcagttagaagacgagatcaccactctgcgccaggtactgtctgcaaaagagagacacctcgtagagattaagcagaaactgggcatgaaccttatgaatgaattaaagcagaacttcagcaagtcttggcacgacatgcagaccactaccgcgtacaagaaaacccacgagactctgtcccatgccggccaaaaagccacagcggcgttctctaacgtgggcaccgccatctcaaagaagttcggcgatatgtcctattccattcgccattctatcagcatgcctgccatgcgaaattcccctacatttaagtccttcgaagaacgtgtggagacaaccgtcacctctctgaagactaaagttggagggaccaatccaaatggggggtcctttgaggaggttctgtcgagcactgcacatgcaagcgcacagtctctagccggcggctctagacggaccaaggaagaggagctgcaatgttag

SEQ ID NO: 137055 - DNA, 615 bp, Artificial Sequence
  derived and/or modified sequence
atggaggcccaggcccagggcctgctggagaccgagcccctgcaggggacagacgaggacgcggtggcgtcggccgatttcagttctatgctctctgaggaggagaaggaggagctgaaggccgagctggtgcagctggaagacgagattacaactcttcggcaggtgttgagcgcgaaggagaggcatctcgtggagatcaaacaaaaactggggatgaatctgatgaatgagctaaagcagaatttctccaagagctggcacgatatgcagacaaccaccgcttataaaaaaacgcacgaaacattatcccatgcaggccaaaaggccacagcagcctttagcaatgtcggtactgctatctctaagaagttcggtgatatgtcatactctatcagacattcgatttcaatgccggcaatgcgcaatagcccaacatttaagagcttcgaagaaagagtggagactaccgtgacatctctgaaaaccaaggtggggggcacgaatcctaacgggggaagttttgaagaggtcctttcatccactgcgcacgcctctgcgcagtcccttgcaggggggtccagaaggaccaaggaagaagagctgcagtgctag

SEQ ID NO: 137056 - DNA, 615 bp, Artificial Sequence
  derived and/or modified sequence
atggaggccgagcccaaaggtctcctagaaacagaaccgctgcaaggcaccgacgaggacgcagttgcctccgctgacttttcctccatgctcagtgaagaggaaaaggaggaacttaaggctgagctggtccaactggaggacgaaatcaccacactacgccaggtgctcagcgccaaagaacggcatctggtggaaatcaagcagaagctgggcatgaacctcatgaacgaactgaaacagaacttctctaaatcatggcatgatatgcagacaactactgcttataaaaaaactcacgagacactgtcacatgctgggcagaaggcaactgccgcatttagcaacgtcggtaccgctatttctaagaagtttggcgacatgtcctactctatacgccactctatttcaatgcctgctatgaggaactctcccaccttcaagtcctttgaggaacgcgtggagacaaccgttacctccctcaaaactaaggtagggggaaccaaccctaatggcggttctttcgaagaagtgttaagctctaccgcacatgccagcgcccagtctttggctggaggctccagaaggacgaaagaggaagagctgcaatgttag

SEQ ID NO: 137057 - DNA, 615 bp, Artificial Sequence
  derived and/or modified sequence
atggaggcacaggctcaggggctactggagaccgagcccctacagggcacagatgaggacgccgtggcgtctgcagacttctcctctatgctctccgaagaggagaaggaggaactgaaggcagaactggtgcagctagaggatgagatcaccacactccggcaagtgctgagtgccaaggaacggcatctcgtggagataaagcaaaagttaggaatgaatctaatgaatgaattgaagcagaactttagcaagtcatggcacgatatgcaaacgactacagcttataaaaagacacatgagactcttagccacgccggtcagaaggcaacagcagcctttagtaatgtcggaaccgctatctctaagaaatttggagatatgagttattcaatccgccattcgatctctatgccagcaatgcgaaattcccccacttttaaatcgtttgaagagagggtcgagaccacagttacaagcctgaaaaccaaagtgggcggtactaacccgaacggcggaagttttgaagaggtgctgagctccaccgcccatgccagcgcccagtccctggctgggggttctcgtagaactaaagaagaagagctccagtgctag

SEQ ID NO: 137058 - DNA, 1022 bp, Artificial Sequence
  derived and/or modified sequence
ggagaggcccctcctcaggaaatgcgcccgtggaatgctctaccctcttccgcagccagtcgcccctggccttcccaacctcgcggctgcccgaaggacctgttgtgccgggtccggaaagcgtgtttcgctccctttcccttgagggagtggggagggaatgtgactcttttcgcccagcgccgtggactcgcggcttgtggctcccaagttagggagtgagaggatcgcccgccgagggggtggctccgcagcccggctgcgcgagacgcttcccgctcggggacccgccttccgaggccaggtgaacgttaccggccccctgacctccagcagatccacacgtttgttggagactgaaccgttgcaaggaacagacgaagatgcagtagccagtgctgacttctctagcatgctctctgaggaggaaaaggaagagttaaaagcagagttagttcagctagaagacgaaattacaacactacgacaagttttgtcagcgaaagaaaggcatctagttgagataaaacaaaaactcggcatgaacctgatgaatgaattaaaacagaacttcagcaaaagctggcatgacatgcagactaccactgcctacaagaaaacacatgaaaccctgagtcacgcagggcaaaaggcaactgcagctttcagcaacgttggaacggccatcagcaagaagttcggagacatgagttactccattcgccattccataagtatgcctgctatgaggaattctcctactttcaaatcatttgaggagagggttgagacaactgtcacaagcctcaagacgaaagtaggcggtacgaaccctaatggaggcagttttgaggaggtcctcagctccacggcccatgccagtgcccagagcttggcaggaggctcccggcggaccaaggaggaggagctgcagtgctaagtccagccagcgtgcagctgcatccagaaaccggccactacccagcccatctctgcctgtgcttatccagataagaagacca

SEQ ID NO: 137059 - DNA, 2356 bp, Artificial Sequence
  derived and/or modified sequence
tagcgccgggagtgggtgccttccgccggctgtacagagcgccggcaggtggcgcccagcggcgagcttgttccagcttggtttgggccaggtggactggaaggggcggaggtaaccagaagcggctagtggcggctgcctgcgtccccaaccccctccgcgcagcgctcgcgacacgcgtgccaggagtgggagcgagcggcggggccagctgcgttctgagcctgggcgcagctgccatctgctctgggaagcaccagggtgtccccgccgccctcagctcgaagtcagccaccatggaggcgcaggcacaaggtttgttggagactgaaccgttgcaaggaacagacgaagatgcagtagccagtgctgacttctctagcatgctctctgaggaggaaaaggaagagttaaaagcagagttagttcagctagaagacgaaattacaacactacgacaagttttgtcagcgaaagaaaggcatctagttgagataaaacaaaaactcggcatgaacctgatgaatgaattaaaacagaacttcagcaaaagctggcatgacatgcagactaccactgcctacaagaaaacacatgaaaccctgagtcacgcagggcaaaaggcaactgcagctttcagcaacgttggaacggccatcagcaagaagttcggagacatgagttactccattcgccattccataagtatgcctgctatgaggaattctcctactttcaaatcatttgaggagagggttgagacaactgtcacaagcctcaagacgaaagtaggcggtacgaaccctaatggaggcagttttgaggaggtcctcagctccacggcccatgccagtgcccagagcttggcaggaggctcccggcggaccaaggaggaggagctgcagtgctaagtccagccagcgtgcagctgcatccagaaaccggccactacccagcccatctctgcctgtgcttatccagataagaagaccaaaatcccgctgggaaaaacccaggccttgacattgttattcaaatggcccctccagaaagtttaatgatttccatttgtatttgtgttgatgatggaccacttgaccatcacatttcagtattcatagatgactgtcacattttaaaatgttcccacttgagcaggtacacaactggtcataattcctgtctgtgtaattcgatgtatatttttccaaacatgtagctattgtttgctttgatttttgcttggcctcctttatgatgtgcatgtccttgaaggctgaatgaacagtccctttcagttcagcagatcaacaggatggagctcttcatgactgtctccagcaataggatgatttactataaatttcatccaactacttgtgatctctctcacctacatcaattatgtatgttaatttcagcaattaaaagaattgattttaatgactttgaattcttaatttctttgtcttaaaagttgctagttatgattttacagatgcaattttaaatcaacttttagccaggtgcggcggctcacacctgtaatcccaactattttggatgccaaggtgagaggattgcttgaggccaggagttaaagatcagcctgggcaacacagaccctgtctctacaaaaaaagaaaaaaattagccagacatagtgttgcttgcctgtagtcccagctactctagaggctgaggcaggaggattgcatgagcctaggagttcgaaactgcagtgagctatgattgcaccactgcactactccagcctgggtgacagagtgggacactgtctccaaaaatagtaataataagtagtcaacttttactgctaatttggtgaacatgagagaggatatgaaaataaatattacctcagctatcctaggatgttaaaataatctccaattttaaaattctctccaatctacatacagtagtagttagtcagataaaggatatccaaaaaagagatagctagaaaatgggagaagcagagttctgcaacccctttcagtttgtaaattgttcacatgtatgaaaataactggtatttatcaatccactcagatttctgcactaacttttatcttatatatcatatgtatctcttttctttttctaaatgggaacatatatttgttattaggtggcagagatatagccttaagatatatttgtaaaatgcacactgaatagacatccaacctaaaaaaaatcactatttaaaaagcccatataatatatacatatttgttagcatgctaattgttcatgttttgtgtttattaaatagaagtgatatatatgacattttgaagtaaagcacatctgaaaaattctactcaaa

SEQ ID NO: 137060 - protein, 206 aa, Artificial Sequence
  derived and/or modified sequence
MDSAGQDINLNSPNKGLLSDSMTDVPVDTGVAARTPAVEGLTEAEEEELRAELTKVEEEIVTLRQVLAAKERHCGELKRRLGLSTLGELKQNLSRSWHDVQVSSAYVKTSEKLGEWNEKVTQSDLYKKTQETLSQAGQKTSAALSTVGSAISRKLGDMRNSATFKSFEDRVGTIKSKVVGDRENGSDNLPSSAGSGDKPLSDPAPF

SEQ ID NO: 137061 - DNA, 621 bp, Artificial Sequence
  derived and/or modified sequence
atggacagcgccggccaggacatcaacctgaacagccccaacaagggcctgctgagcgacagcatgaccgacgtgcccgtggacaccggcgtggccgccagaacccccgccgtggagggcctgaccgaggccgaggaggaggagctgagagccgagctgaccaaggtggaggaggagatcgtgaccctgagacaggtgctggccgccaaggagagacactgcggcgagctgaagagaagactgggcctgagcaccctgggcgagctgaagcagaacctgagcagaagctggcacgacgtgcaggtgagcagcgcctacgtgaagaccagcgagaagctgggcgagtggaacgagaaggtgacccagagcgacctgtacaagaagacccaggagaccctgagccaggccggccagaagaccagcgccgccctgagcaccgtgggcagcgccatcagcagaaagctgggcgacatgagaaacagcgccaccttcaagagcttcgaggacagagtgggcaccatcaagagcaaggtggtgggcgacagagagaacggcagcgacaacctgcccagcagcgccggcagcggcgacaagcccctgagcgaccccgcccccttctag

SEQ ID NO: 137062 - DNA, 621 bp, Artificial Sequence
  derived and/or modified sequence
atggacagtgctgggcaggacataaacctgaacagcccgaataagggcctgctgagtgactccatgaccgacgtcccagtggatacaggcgtagcagcaagaacccccgctgtggagggattgactgaagctgaggaagaggagctacgggcagaactgactaaagtggaagaggagatcgtgactctccgccaggtcctcgcagcaaaggagcgtcactgcggagagctgaagcgccgactggggctgtcaactcttggtgagctgaagcagaatctgtcacgatcctggcacgatgtgcaagtgtcctctgcttacgtgaagacgagcgagaagttgggagagtggaacgagaaagtgacgcagtccgacctgtacaagaaaacacaggagactctgagccaggcagggcagaagacatcagctgcactgtccaccgtcggttctgccattagcagaaaactaggggatatgcgcaacagtgccacttttaaaagtttcgaggacagagtcggcactatcaagtcaaaagtggtaggagaccgcgaaaacggttccgacaacttacccagctctgcggggagcggagataagccactctccgaccctgctcccttttag

SEQ ID NO: 137063 - DNA, 621 bp, Artificial Sequence
  derived and/or modified sequence
atggattctgctggccaggacatcaacctgaacagccccaacaagggcctgctgagtgacagcatgacagatgtgcctgtggacacaggagtggccgcccggaccccagctgtggagggcctgacagaggccgaggaggaggagctgcgggcagagctgaccaaggtggaggaggagatcgtgaccctgcggcaggtgctggccgccaaggagcggcactgtggggagctgaagaggcggctgggcctgagcaccctgggggagctgaagcagaacctgagccgctcctggcatgatgtgcaggtgagcagcgcctacgtgaagaccagcgagaagctgggggagtggaatgagaaggtgacccagagcgacctgtacaagaagacccaggagaccctgagccaggccggccagaagaccagcgctgccctgagcacagtgggcagcgccatcagcaggaagctgggggacatgagaaattctgccaccttcaagagctttgaggacagagtgggcaccatcaagagcaaggtggtgggggacagagaaaatggaagtgacaacctgcccagcagcgctggcagcggggacaagcccctgagtgaccctgcccccttctag

SEQ ID NO: 137064 - DNA, 621 bp, Artificial Sequence
  derived and/or modified sequence
atggacagcgccggccaggacatcaacctgaacagccccaacaagggactcctgagcgacagtatgaccgacgttccagtggacactggagtggcagcccggactcctgctgtagaggggctgaccgaggctgaagaggaagaactcagagctgagcttactaaagtggaagaagaaattgtgacgctgcgccaggtgctcgccgcaaaggagcgccactgcggcgagttgaagcgaaggttagggttgtcaaccttaggggaactgaagcagaacctgtcccgaagctggcatgacgtgcaagtaagttctgcgtatgtgaagactagtgagaagctgggagagtggaacgagaaagttacccagtccgatctgtataagaaaacccaggaaactctgagccaggccggacagaagacctcagccgcactttctactgtagggtcggctatatctcgaaagctgggcgatatgcgtaactccgccacgttcaagtccttcgaagatcgcgtggggaccatcaaaagcaaagtcgttggtgatagagagaacgggagcgataacctgccctcatccgctggctctggcgacaagcctctgagtgatcctgcccctttctag

SEQ ID NO: 137065 - DNA, 621 bp, Artificial Sequence
  derived and/or modified sequence
atggacagcgccggacaggacatcaacctcaattccccgaataagggactactcagcgacagcatgaccgacgtgcctgttgatactggcgtggcggcacgaacgcccgcagtcgagggcctgaccgaggccgaagaggaggagttacgcgctgagttaaccaaagtggaggaggaaatagtaaccttacgccaagtcctagccgcaaaggagaggcattgcggcgagctgaaaagaaggttaggcctcagcactctcggcgagctcaaacagaatctttctaggagctggcatgatgtccaggtgtccagcgcgtatgtgaagaccagtgagaaattgggagaatggaacgaaaaagtgactcagtctgatctttacaagaaaacacaggaaacgctcagccaggccggtcagaagacttccgcagcactgagtaccgtagggtctgccatctcaaggaagctcggagatatgcggaacagcgccaccttcaagtcgttcgaggatcgggtaggaactattaaaagcaaagtggtgggtgaccgcgagaatggtagcgataacctgccttcgagcgctggcagcggtgataagccgctctccgatccagctcccttctag

SEQ ID NO: 137066 - DNA, 2297 bp, Artificial Sequence
  derived and/or modified sequence
acgcggcgagcttctcccggcgccgcccgctcggctcccatagcgcccgcgacagcggtccggacgccgcccgaacatggactccgccggccaagatatcaacctgaattctcctaacaaaggtctgctgtctgactccatgacggatgttcctgtcgacacaggtgtggctgcccggactcctgctgttgagggtctgacagaggctgaggaggaggagctcagggctgagcttaccaaggtggaagaggaaattgtcactctgcgccaggtcctggcagccaaggagaggcactgtggagagctcaagaggaggctgggcctctccaccctgggggagctgaaacagaacctgtccaggagctggcatgacgtgcaggtctctagcgcctatgtgaaaacttctgagaaacttggagagtggaatgagaaagtgacccagtcagacctctacaagaagactcaggaaactctttcacaggcaggacagaagacttcagctgccctgtccacagtgggctctgccatcagcaggaagcttggagacatgaggaactctgcgaccttcaagtcgtttgaggaccgagttgggaccataaagtctaaggttgtgggtgacagagagaacggcagtgacaacctcccttcctcagcggggagtggtgacaagcccctgtcggatcccgcacctttctaagcctgtggttgcttcacccgctgcagagcacacgcaacccagcctcagcatcacagccgcagctctgttcagcggagcagccagccagggcggatgagcagagccggccctgaggacagtcctgcccatccacgcggagatgtggctgccgcgtttgcatgaatttgaagaacacaggcttgtacacagatgttttacactcacgtttgtagatgaaacagatcactgtgctgtccttcctaggggtgcaggaagtggacagggcggagggtttgaaagaatattgagccaaagcccaggctccctttgggaatcatgttagcccatcagaatgttgaaggattgaagagttctaagcataaaataagtggcattttctgacttcttcctcctcctccttccctgactcacagaaggaatgcaatcacccagcaagtcctacctgttacgcaattttttatctcaaaatgccgaacgagaaaactgtccattttctgagacccccagaaaggaaactgaccctcagcagctgcctgattgttacgcgaatctagctttaacggaagcaaattcattattttttaaatgcagtggacttttcaaaaagtttaaattaggcaaagcagctttagcctcatagaatattatttctttggactcaagctgaaatacaagccttacattgccttatgctttatttctttctaatttttatatgtatatagatgagggttccttaatggttgtgagcattgtgtggaattttacacctggcctgcgtggcagcctcttccagttgaggtgttttatgtcacgcacactccatcccagtgtacaaaacctgcttctcttctcaaccgtggcagctcccgctggctcctatgccctgccctaaagggctcttgagcctctgggaatgggaggggccaagagaaggaaaaccctgtctttagcaccctttaaaagaactgtgccccccttctcagtgctgcctttgcatgggcctggcccggctcacattcgtcagtgactccaaccctcctgcttgctgtacttgggatgaaacgaccccacaggtcaggtggagggtggggcgtgggcatcagccaggattgccgttacagtctttttctcaggagctacaaagatctcttcctgttactaaatagtcgcaccccagcagcctctctcgcacaccggggccctgcatgtcagatggcgtggtctgcagggggagctctgtgccttagtggctcttggcaggacactgagggcctgcctgtggtgtgcccggctctgccactcccgggaggggaagggctgctcagctcaaggtgtcctgttcggtagagcaagtgtcctctgacagccgtgtccccggacagttcagacacccttggggatggcactccacacacgacagagatgcaggggccagggaagcccagcgctcggtgcccttcgtccagggttaaaatcggcctgtggggtgtggtgagaaggcaggttgtgcgggtgttgaccgatgtatcttttccttaaagttattataataatgggtaatttgtcaataaagcattcctttgggggaaagtccgcc

SEQ ID NO: 137067 - protein, 284 aa, Artificial Sequence
  derived and/or modified sequence
MDAIKKKMQMLKLDKENAIDRAEQAEADKKQAEDRCKQLEEEQQALQKKLKGTEDEVEKYSESVKEAQEKLEQAEKKATDAEADVASLNRRIQLVEEELDRAQERLATALQKLEEAEKAADESERGMKVIENRAMKDEEKMELQEMQLKEAKHIAEDSDRKYEEVARKLVILEGELERSEERAEVAESKCGDLEEELKIVTNNLKSLEAQADKYSTKEDKYEEEIKLLEEKLKEAETRAEFAERSVAKLEKTIDDLEDEVYAQKMKYKAISEELDNALNDITSL

SEQ ID NO: 137068 - DNA, 855 bp, Artificial Sequence
  derived and/or modified sequence
atggacgccatcaagaagaagatgcagatgctgaagctggacaaggagaacgccatcgacagagccgagcaggccgaggccgacaagaagcaggccgaggacagatgcaagcagctggaggaggagcagcaggccctgcagaagaagctgaagggcaccgaggacgaggtggagaagtacagcgagagcgtgaaggaggcccaggagaagctggagcaggccgagaagaaggccaccgacgccgaggccgacgtggccagcctgaacagaagaatccagctggtggaggaggagctggacagagcccaggagagactggccaccgccctgcagaagctggaggaggccgagaaggccgccgacgagagcgagagaggcatgaaggtgatcgagaacagagccatgaaggacgaggagaagatggagctgcaggagatgcagctgaaggaggccaagcacatcgccgaggacagcgacagaaagtacgaggaggtggccagaaagctggtgatcctggagggcgagctggagagaagcgaggagagagccgaggtggccgagagcaagtgcggcgacctggaggaggagctgaagatcgtgaccaacaacctgaagagcctggaggcccaggccgacaagtacagcaccaaggaggacaagtacgaggaggagatcaagctgctggaggagaagctgaaggaggccgagaccagagccgagttcgccgagagaagcgtggccaagctggagaagaccatcgacgacctggaggacgaggtgtacgcccagaagatgaagtacaaggccatcagcgaggagctggacaacgccctgaacgacatcaccagcctgtag

SEQ ID NO: 137069 - DNA, 855 bp, Artificial Sequence
  derived and/or modified sequence
atggacgctattaagaagaaaatgcagatgctgaaactagacaaagaaaacgctatagaccgggcagaacaagctgaagcagataagaagcaggcagaggataggtgcaagcagctggaagaagaacagcaggccctgcaaaagaaacttaaggggaccgaagatgaggtcgagaagtacagcgagtccgtaaaagaggcacaggagaaactagaacaggctgaaaagaaagctaccgatgccgaagccgatgtggctagcctgaataggagaatccagctggtggaagaagaactggatcgagcgcaggaaagactggccaccgccctccagaaacttgaggaggccgagaaggcggcagacgagtcagagcgtgggatgaaggtcattgaaaacagagctatgaaggatgaagaaaaaatggagctgcaggagatgcaacttaaggaagcgaaacatatcgccgaggatagtgaccgtaaatacgaagaagttgctcggaagttggtcattctagagggggagttggagaggtccgaagagagggcggaggttgccgagtctaagtgcggtgatctggaggaggagttgaaaattgtcaccaataacctgaaaagcctggaagcccaagcagataaatacagcactaaagaagacaaatacgaagaagaaattaaactgttggaggaaaaactcaaagaggctgagactcgggcagagttcgccgagagatcagtagccaagctggaaaagacgattgatgacctggaggacgaggtctacgcgcagaagatgaagtacaaggccatcagcgaggaactggataacgctttaaacgacatcacttcactctag

SEQ ID NO: 137070 - DNA, 855 bp, Artificial Sequence
  derived and/or modified sequence
atggatgccatcaagaagaagatgcagatgctgaagctggacaaggaaaatgccatcgacagagctgagcaggccgaggccgacaagaagcaggctgaagatcgctgcaagcagctggaggaggagcagcaggccctgcagaagaagctgaagggcacagaagatgaggtggagaagtacagcgagagcgtgaaggaggcccaggagaagctggagcaggccgagaagaaggccacagatgctgaggctgatgtggccagcctgaacagacgcatccagctggtggaggaggagctggaccgggcccaggagcggctggccacagccctgcagaagctggaggaggccgagaaggccgcagatgaaagtgagcggggcatgaaggtgattgaaaatagagccatgaaggatgaggagaagatggagctgcaggagatgcagctgaaggaggccaagcacatcgccgaggacagcgacagaaaatatgaggaggtggccaggaagctggtgatcctggagggggagctggagaggtctgaggagagagctgaggtggccgagagcaaatgtggggacctggaggaggagctgaagatcgtgaccaacaacctgaagagcctggaggcccaggccgacaagtacagcaccaaggaggacaagtatgaggaggagatcaagctgctggaggagaagctgaaggaggccgagaccagggctgagtttgctgagaggtctgtggccaagctggagaagaccattgatgacctggaggatgaggtgtatgcccagaagatgaagtacaaggccatcagcgaggagctggacaatgccctgaatgacatcaccagcctgtag

SEQ ID NO: 137071 - DNA, 855 bp, Artificial Sequence
  derived and/or modified sequence
atggacgccatcaagaagaagatgcagatgctgaagctggacaaggaaaacgcaattgaccgggccgagcaggccgaagctgataaaaagcaggcagaagataggtgcaagcagctagaggaagagcagcaggcgcttcaaaagaaactcaaaggaacggaggatgaggtcgagaagtatagcgagtccgtgaaagaagcacaagaaaaactcgaacaggcagagaagaaagcaaccgacgctgaggccgacgttgcgagcttgaatagacggatccagttagtagaggaggaactggaccgggcccaagagcgactggcaacagctctgcaaaagttagaggaggcggaaaaggccgctgacgagagcgaacgtggaatgaaagtgattgaaaaccgggctatgaaggacgaggagaaaatggagctgcaggagatgcagttgaaggaggcaaagcacattgccgaagatagtgatcggaaatatgaggaagtggcaagaaagctcgtgatacttgaaggagaactggagagatctgaggaacgcgccgaagtggcagaaagcaagtgcggcgacctagaggaggaattgaagattgtaaccaataatctcaaatccctcgaggctcaggccgacaagtacagcaccaaagaggacaaatatgaggaggagataaagctcctcgaggagaagctgaaagaagctgagacacgcgccgagtttgcagagcgaagtgttgcaaagcttgagaaaaccatcgatgacctggaggacgaggtgtatgcccagaagatgaagtataaagccatttcagaagagctcgacaatgccctaaacgacattactagtctctag

SEQ ID NO: 137072 - DNA, 855 bp, Artificial Sequence
  derived and/or modified sequence
atggatgctattaaaaaaaaaatgcaaatgcttaaactggataaggaaaatgctatcgatcgggctgagcaagccgaagcagacaaaaaacaggctgaggatcgctgtaaacagcttgaagaagaacagcaggcccttcagaaaaagcttaaggggaccgaggacgaggtagaaaagtacagtgaaagtgtgaaggaagcacaggaaaaactcgagcaagctgaaaagaaggccaccgacgcagaggccgacgtcgcctccctcaaccgccgaatccagctggtggaggaggagctcgacagggcacaggagagacttgctactgccctacaaaagttagaagaagccgagaaggccgcagacgaaagcgaacgcggaatgaaggtcatcgagaatagggccatgaaggacgaggagaaaatggagctgcaggaaatgcaacttaaggaggccaagcacatcgccgaggatagtgaccgtaagtacgaagaagtggcaagaaagctagtgatactcgagggagagttggaacggtccgaggagcgcgctgaagtggccgaatctaagtgcggcgatctggaggaggagctgaagatcgtgacaaataatttgaagtctttggaggcgcaggctgataaatactctacaaaggaggataaatacgaggaggagatcaagcttcttgaggagaagctgaaggaggcagaaaccagagcagaattcgccgagaggtctgtggccaagctggagaaaaccattgatgatctggaggacgaggtttatgctcagaaaatgaaatacaaggcaatcagcgaagagctcgacaacgcgctgaatgacatcacatctttgtag

SEQ ID NO: 137073 - DNA, 1189 bp, Artificial Sequence
  derived and/or modified sequence
cccgctccgtcctcctcgcctgccaccggtgcacccagtccgctcacccagcccagtccgtccggtcctcaccgcctgccggccggcccaccccccaccgcagccatggacgccatcaagaagaagatgcagatgctgaagctggacaaggagaacgccatcgaccgcgccgagcaggccgaagccgacaagaagcaagctgaggaccgctgcaagcagctggaggaggagcagcaggccctccagaagaagctgaaggggacagaggatgaggtggaaaagtattctgaatccgtgaaggaggcccaggagaaactggagcaggccgagaagaaggccactgatgctgaggcagatgtggcctccctgaaccgccgcattcagctggttgaggaggagctggaccgggcccaggagcgcctggctacagccctgcagaagctggaggaggccgagaaggcggctgatgagagcgagagaggaatgaaggtcatcgaaaaccgggccatgaaggatgaggagaagatggaactgcaggagatgcagctgaaggaggccaagcacatcgctgaggattcagaccgcaaatatgaagaggtggccaggaagctggtgatcctggaaggagagctggagcgctcggaggagagggctgaggtggccgagagtaaatgtggggacctagaggaggagctgaaaattgttaccaacaacttgaaatccctggaggcccaggcggacaagtattccaccaaagaagataaatatgaagaggagatcaaactgttggaggagaagctgaaggaggctgagacccgagcagagtttgccgagaggtctgtggcaaagttggagaaaaccatcgatgacctagaagatgaagtctatgcccagaagatgaagtacaaggccattagcgaggaactggacaacgcactcaatgacatcacctccctctgagccccacgccagcgtggccacctcagctctcttctctcctctcctttccattctctctatggggaggggagcaggcaggaggagcagaaattgccaacattgcacagccaggctgggagcagcctagggagagcccccatcatgcccaccacccactctggcactggcttcatcctttacctatccccttccaccctcctttgctgcttaataaattctgaacttggtc

SEQ ID NO: 137074 - protein, 248 aa, Artificial Sequence
  derived and/or modified sequence
MAGLNSLEAVKRKIQALQQQADEAEDRAQGLQRELDGERERREKAEGDVAALNRRIQLVEEELDRAQERLATALQKLEEAEKAADESERGMKVIENRAMKDEEKMEIQEMQLKEAKHIAEEADRKYEEVARKLVILEGELERAEERAEVSELKCGDLEEELKNVTNNLKSLEAASEKYSEKEDKYEEEIKLLSDKLKEAETRAEFAERTVAKLEKTIDDLEEKLAQAKEENVGLHQTLDQTLNELNCI

SEQ ID NO: 137075 - DNA, 747 bp, Artificial Sequence
  derived and/or modified sequence
atggccggcctgaacagcctggaggccgtgaagagaaagatccaggccctgcagcagcaggccgacgaggccgaggacagagcccagggcctgcagagagagctggacggcgagagagagagaagagagaaggccgagggcgacgtggccgccctgaacagaagaatccagctggtggaggaggagctggacagagcccaggagagactggccaccgccctgcagaagctggaggaggccgagaaggccgccgacgagagcgagagaggcatgaaggtgatcgagaacagagccatgaaggacgaggagaagatggagatccaggagatgcagctgaaggaggccaagcacatcgccgaggaggccgacagaaagtacgaggaggtggccagaaagctggtgatcctggagggcgagctggagagagccgaggagagagccgaggtgagcgagctgaagtgcggcgacctggaggaggagctgaagaacgtgaccaacaacctgaagagcctggaggccgccagcgagaagtacagcgagaaggaggacaagtacgaggaggagatcaagctgctgagcgacaagctgaaggaggccgagaccagagccgagttcgccgagagaaccgtggccaagctggagaagaccatcgacgacctggaggagaagctggcccaggccaaggaggagaacgtgggcctgcaccagaccctggaccagaccctgaacgagctgaactgcatctag

SEQ ID NO: 137076 - DNA, 747 bp, Artificial Sequence
  derived and/or modified sequence
atggccggtttaaattctttagaggccgtaaaacggaaaattcaagccctccagcagcaggcagacgaagccgaagatagagcgcagggcctgcaaagggagctggatggggaaagggagaggcgggagaaggccgaaggcgacgtcgctgccctcaaccggcgcatccaacttgtggaggaagagcttgatagggcccaggaacggctggctacggctctgcagaagctcgaagaggctgagaaggccgccgacgagagcgagcgaggaatgaaagtaattgagaatcgggccatgaaggacgaagagaaaatggagattcaggagatgcagctcaaagaagctaaacatatagccgaagaagccgatcgtaagtatgaggaagtggccagaaagctcgtgatcctggagggcgaattggagcgggccgaagagcgagctgaggtcagcgaacttaagtgcggcgacttggaggaggaactgaaaaatgttaccaacaatttgaagtcactcgaggctgcctcggaaaagtactccgagaaagaggataagtacgaggaggaaatcaagctcctatctgataaactgaaagaagctgaaacacgagctgagttcgccgagagaaccgttgccaagcttgagaagacaatcgatgacctggaagagaaactggcgcaggccaaggaagaaaacgtcggactgcaccagacgttagatcagacactgaatgaacttaattgcatatag

SEQ ID NO: 137077 - DNA, 747 bp, Artificial Sequence
  derived and/or modified sequence
atggccggcctgaacagcctggaggccgtgaagaggaagatccaggccctgcagcagcaggctgatgaagcagaagatcgggcccagggcctgcagcgggagctggatggagagcgggagcggcgggagaaggccgagggagatgtggccgccctgaacagacgcatccagctggtggaggaggagctggaccgggcccaggagcggctggccacagccctgcagaagctggaggaggccgagaaggccgcagatgaaagtgagcggggcatgaaggtgattgaaaatagagccatgaaggatgaggagaagatggagatccaggagatgcagctgaaggaggccaagcacatcgccgaggaggccgacagaaaatatgaggaggtggccaggaagctggtgatcctggagggggagctggagagagctgaggagagagctgaggtgtctgagctgaagtgtggggacctggaggaggagctgaagaatgtgaccaacaacctgaagagcctggaggccgccagcgagaagtacagcgagaaggaggacaagtatgaggaggagatcaagctgctgagtgacaagctgaaggaggccgagaccagggctgagtttgctgagaggacagtggccaagctggagaagaccattgatgacctggaggagaagctggcccaggccaaggaggagaatgtgggcctgcaccagaccctggaccagaccctgaatgagctgaactgcatctag

SEQ ID NO: 137078 - DNA, 747 bp, Artificial Sequence
  derived and/or modified sequence
atggccggcctgaacagcctggaggccgtgaagcggaagatccaggctctccaacaacaagctgacgaagcagaggatcgggcccagggcctacagcgggagctcgacggtgagcgggaaaggagagaaaaggccgagggtgatgtggccgctctgaatcgcagaattcagttagtggaagaggagctggaccgggcccaggaaagactggccacagcacttcaaaaactggaagaggctgagaaggccgctgatgaaagtgaaagggggatgaaggtcattgagaacagggcgatgaaggatgaagagaagatggaaattcaggagatgcagctcaaagaagccaaacacattgccgaggaagcggatcgaaagtatgaagaggtcgctagaaagctggtgattttagaaggagagctagagcgggccgaggagcgcgcagaggtaagcgaactgaaatgcggcgacttggaagaagagctcaaaaacgtcaccaataatctgaaatctctggaagccgcctccgagaagtactctgaaaaggaagataaatacgaggaggaaataaagctcctgtccgataaactcaaggaagccgaaacaagggcagagttcgcagaaagaaccgtggcaaaactggaaaaaaccattgatgaccttgaagagaagttggcccaggcaaaggaggagaatgtcggactccatcaaacactggaccagacacttaacgagttaaactgcatctag

SEQ ID NO: 137079 - DNA, 747 bp, Artificial Sequence
  derived and/or modified sequence
atggctggtcttaactccctggaggccgtgaagaggaagatccaggctctccagcagcaagccgacgaagccgaggaccgcgctcagggcctccagcgcgagctcgacggcgagcgcgagcggagggagaaggcagagggcgatgtagccgctctaaaccgaaggatccagctcgtcgaagaggagctcgacagggcccaggaaaggctcgccaccgctttacaaaaattggaggaagcagaaaaagccgctgacgagagcgaaagggggatgaaggtaatcgaaaatagagcgatgaaagatgaggaaaagatggagattcaggaaatgcagctcaaagaggccaaacacattgccgaagaagcagaccgtaagtacgaggaggtcgccaggaagctggtcatcctagagggagagctggaaagggctgaggaaagagctgaggtgtcggaacttaagtgtggcgacctggaggaggaactgaagaatgtgaccaacaatctgaagagcctggaggcagccagcgagaagtactccgaaaaggaggacaagtacgaggaagaaatcaagctgctctcagacaaactaaaagaggcagagactcgcgctgagttcgccgagcggactgttgccaagctcgagaagactatcgacgatctggaagagaagctcgcacaggcgaaggaggagaatgtgggcttgcaccagacattggaccagactctgaatgaacttaactgtatctag

SEQ ID NO: 137080 - DNA, 2645 bp, Artificial Sequence
  derived and/or modified sequence
tttccagcagctgtggccagcggtgccgacgtcaggccctcccccagcggtgctgacgtcggcggtccggccgggtgacctcatcgccccgacggcagccggcccggggggcggggagaggcgggggcggcccccgcgcaggcaaaggcttggggggccggggcgcggctgtgcagctctcgccggagccgagcccagccgagcgtccgccgctgcccgtgcgcctctgcgcctccgcgccatggccggcctcaactccctggaggcggtgaaacgcaagatccaggccctgcagcagcaggcggacgaggcggaagaccgcgcgcagggcctgcagcgggagctggacggcgagcgcgagcggcgcgagaaagctgaaggtgatgtggccgccctcaaccgacgcatccagctcgttgaggaggagttggacagggctcaggaacgactggccacggccctgcagaagctggaggaggcagaaaaagctgcagatgagagtgagagaggaatgaaggtgatagaaaaccgggccatgaaggatgaggagaagatggagattcaggagatgcagctcaaagaggccaagcacattgcggaagaggctgaccgcaaatacgaggaggtagctcgtaagctggtcatcctggagggtgagctggagagggcagaggagcgtgcggaggtgtctgaactaaaatgtggtgacctggaagaagaactcaagaatgttactaacaatctgaaatctctggaggctgcatctgaaaagtattctgaaaaggaggacaaatatgaagaagaaattaaacttctgtctgacaaactgaaagaggctgagacccgtgctgaatttgcagagagaacggttgcaaaactggaaaagacaattgatgacctggaagagaaacttgcccaggccaaagaagagaacgtgggcttacatcagacactggatcagacactaaacgaacttaactgtatataagcaaaacagaagagtcttgttccaacagaaactctggagctccgtgggtctttctcttctcttgtaagaagttccttttgttattgccatcttcgctttgctggaaatgtcaagcaaattatgaatacatgaccaaatattttgtatcggagaagctttgagcaccagttaaatctcattccttccctttttttttcaaatggcaccagctttttcagctctcttattttttccttaagtagcatttattcctaaggtaggcagggtatttcctagtaagcatactttcttaagacggaggccatttggttcctgggagaataggcagccccacactttgaagaatacagaccccagtatctagtcgtggatataattaaaacgctgaagaccataaccttttgggtcaactgttggtcaaactataggagagaccagggaccatcacatgggtagggattttccatccagagccaataaaaggactggtgggggccgggggtggctattgtgggaagtcataacccacagatagatcaacctaagaatcctggcccttctccactctccaccatgcaggacaaacatcttctcaagcagtcaacgtagaatgcttgggaaatagtcataattacccacatatagtaattaatagatggtaattaattgatccttgatgtgatgttcttttgcatatttccttcattctaaagttgttccctggccgggagcgttggctttcgcctgtaatcccaacactttgggaggccaggacagatcacttgaggtcaggagttcgagaccagcccagccaacatggcgaaaccatgtctctactaaaaatacaaaaattatggtgacgcctgcctgtagtcccagctactcgggaggctgaggcaggaggatcgcttgaacccaggaagtggagactgcagtgagccgatatcgcaccacagcgctccagcctggtcgacagagtgagactccatctcaagaaaaaataaaaataaagttgttctctgaagagcaaatgtctcattccagtaatgacccactcagcaggaatatggtggagttcagtccaattcaggtcagccatatccaaaagaccacaagtcattactaagttgagcaaaagagtttttatctattagcagaaagggcctctctggcagcagagattaaaaactggcccaacttcatttccatacttcagggaacagcaaattgaggatttacttatctaggacttgaattccttctttgggaccaagttaataaaagaccaagaaactcctgattaaactggataatgaaggattctgtagacagggctgcacgtatcggctttgtttgacttctcttttctcagttaacatctcagagctagaacattccacattccccagcagcgtgtgggggctgactaaagtttacaattccaactaaaaatcaccctgcttctggcttatctgaatcccttacccaccccaccccaccaccctactcctatttattcagcaccacactacccaggaaatacactagcaaattgtgcaatggaataaaatccacactttagattcttgcaactgtatcatatgtaatagtatcactttttctacattttggtcaaataaatttttacataaactac

SEQ ID NO: 137081 - protein, 1249 aa, Artificial Sequence
  derived and/or modified sequence
MATAATEEPFPFHGLLPKKETGAASFLCRYPEYDGRGVLIAVLDTGVDPGAPGMQVTTDGKPKIVDIIDTTGSGDVNTATEVEPKDGEIVGLSGRVLKIPASWTNPSGKYHIGIKNGYDFYPKALKERIQKERKEKIWDPVHRVALAEACRKQEEFDVANNGSSQANKLIKEELQSQVELLNSFEKKYSDPGPVYDCLVWHDGEVWRACIDSNEDGDLSKSTVLRNYKEAQEYGSFGTAEMLNYSVNIYDDGNLLSIVTSGGAHGTHVASIAAGHFPEEPERNGVAPGAQILSIKIGDTRLSTMETGTGLIRAMIEVINHKCDLVNYSYGEATHWPNSGRICEVINEAVWKHNIIYVSSAGNNGPCLSTVGCPGGTTSSVIGVGAYVSPDMMVAEYSLREKLPANQYTWSSRGPSADGALGVSISAPGGAIASVPNWTLRGTQLMNGTSMSSPNACGGIALILSGLKANNIDYTVHSVRRALENTAVKADNIEVFAQGHGIIQVDKAYDYLVQNTSFANKLGFTVTVGNNRGIYLRDPVQVAAPSDHGVGIEPVFPENTENSEKISLQLHLALTSNSSWVQCPSHLELMNQCRHINIRVDPRGLREGLHYTEVCGYDIASPNAGPLFRVPITAVIAAKVNESSHYDLAFTDVHFKPGQIRRHFIEVPEGATWAEVTVCSCSSEVSAKFVLHAVQLVKQRAYRSHEFYKFCSLPEKGTLTEAFPVLGGKAIEFCIARWWASLSDVNIDYTISFHGIVCTAPQLNIHASEGINRFDVQSSLKYEDLAPCITLKNWVQTLRPVSAKTKPLGSRDVLPNNRQLYEMVLTYNFHQPKSGEVTPSCPLLCELLYESEFDSQLWIIFDQNKRQMGSGDAYPHQYSLKLEKGDYTIRLQIRHEQISDLERLKDLPFIVSHRLSNTLSLDIHENHSFALLGKKKSSNLTLPPKYNQPFFVTSLPDDKIPKGAGPGCYLAGSLTLSKTELGKKADVIPVHYYLIPPPTKTKNGSKDKEKDSEKEKDLKEEFTEALRDLKIQWMTKLDSSDIYNELKETYPNYLPLYVARLHQLDAEKERMKRLNEIVDAANAVISHIDQTALAVYIAMKTDPRPDAATIKNDMDKQKSTLVDALCRKGCALADHLLHTQAQDGAISTDAEGKEEEGESPLDSLAETFWETTKWTDLFDNKVLTFAYKHALVNKMYGRGLKFATKLVEEKPTKENWKNCIQLMKLLGWTHCASFTENWLPIMYPPDYCVF

SEQ ID NO: 137082 - DNA, 3750 bp, Artificial Sequence
  derived and/or modified sequence
atggccaccgccgccaccgaggagcccttccccttccacggcctgctgcccaagaaggagaccggcgccgccagcttcctgtgcagataccccgagtacgacggcagaggcgtgctgatcgccgtgctggacaccggcgtggaccccggcgcccccggcatgcaggtgaccaccgacggcaagcccaagatcgtggacatcatcgacaccaccggcagcggcgacgtgaacaccgccaccgaggtggagcccaaggacggcgagatcgtgggcctgagcggcagagtgctgaagatccccgccagctggaccaaccccagcggcaagtaccacatcggcatcaagaacggctacgacttctaccccaaggccctgaaggagagaatccagaaggagagaaaggagaagatctgggaccccgtgcacagagtggccctggccgaggcctgcagaaagcaggaggagttcgacgtggccaacaacggcagcagccaggccaacaagctgatcaaggaggagctgcagagccaggtggagctgctgaacagcttcgagaagaagtacagcgaccccggccccgtgtacgactgcctggtgtggcacgacggcgaggtgtggagagcctgcatcgacagcaacgaggacggcgacctgagcaagagcaccgtgctgagaaactacaaggaggcccaggagtacggcagcttcggcaccgccgagatgctgaactacagcgtgaacatctacgacgacggcaacctgctgagcatcgtgaccagcggcggcgcccacggcacccacgtggccagcatcgccgccggccacttccccgaggagcccgagagaaacggcgtggcccccggcgcccagatcctgagcatcaagatcggcgacaccagactgagcaccatggagaccggcaccggcctgatcagagccatgatcgaggtgatcaaccacaagtgcgacctggtgaactacagctacggcgaggccacccactggcccaacagcggcagaatctgcgaggtgatcaacgaggccgtgtggaagcacaacatcatctacgtgagcagcgccggcaacaacggcccctgcctgagcaccgtgggctgccccggcggcaccaccagcagcgtgatcggcgtgggcgcctacgtgagccccgacatgatggtggccgagtacagcctgagagagaagctgcccgccaaccagtacacctggagcagcagaggccccagcgccgacggcgccctgggcgtgagcatcagcgcccccggcggcgccatcgccagcgtgcccaactggaccctgagaggcacccagctgatgaacggcaccagcatgagcagccccaacgcctgcggcggcatcgccctgatcctgagcggcctgaaggccaacaacatcgactacaccgtgcacagcgtgagaagagccctggagaacaccgccgtgaaggccgacaacatcgaggtgttcgcccagggccacggcatcatccaggtggacaaggcctacgactacctggtgcagaacaccagcttcgccaacaagctgggcttcaccgtgaccgtgggcaacaacagaggcatctacctgagagaccccgtgcaggtggccgcccccagcgaccacggcgtgggcatcgagcccgtgttccccgagaacaccgagaacagcgagaagatcagcctgcagctgcacctggccctgaccagcaacagcagctgggtgcagtgccccagccacctggagctgatgaaccagtgcagacacatcaacatcagagtggaccccagaggcctgagagagggcctgcactacaccgaggtgtgcggctacgacatcgccagccccaacgccggccccctgttcagagtgcccatcaccgccgtgatcgccgccaaggtgaacgagagcagccactacgacctggccttcaccgacgtgcacttcaagcccggccagatcagaagacacttcatcgaggtgcccgagggcgccacctgggccgaggtgaccgtgtgcagctgcagcagcgaggtgagcgccaagttcgtgctgcacgccgtgcagctggtgaagcagagagcctacagaagccacgagttctacaagttctgcagcctgcccgagaagggcaccctgaccgaggccttccccgtgctgggcggcaaggccatcgagttctgcatcgccagatggtgggccagcctgagcgacgtgaacatcgactacaccatcagcttccacggcatcgtgtgcaccgccccccagctgaacatccacgccagcgagggcatcaacagattcgacgtgcagagcagcctgaagtacgaggacctggccccctgcatcaccctgaagaactgggtgcagaccctgagacccgtgagcgccaagaccaagcccctgggcagcagagacgtgctgcccaacaacagacagctgtacgagatggtgctgacctacaacttccaccagcccaagagcggcgaggtgacccccagctgccccctgctgtgcgagctgctgtacgagagcgagttcgacagccagctgtggatcatcttcgaccagaacaagagacagatgggcagcggcgacgcctacccccaccagtacagcctgaagctggagaagggcgactacaccatcagactgcagatcagacacgagcagatcagcgacctggagagactgaaggacctgcccttcatcgtgagccacagactgagcaacaccctgagcctggacatccacgagaaccacagcttcgccctgctgggcaagaagaagagcagcaacctgaccctgccccccaagtacaaccagcccttcttcgtgaccagcctgcccgacgacaagatccccaagggcgccggccccggctgctacctggccggcagcctgaccctgagcaagaccgagctgggcaagaaggccgacgtgatccccgtgcactactacctgatccccccccccaccaagaccaagaacggcagcaaggacaaggagaaggacagcgagaaggagaaggacctgaaggaggagttcaccgaggccctgagagacctgaagatccagtggatgaccaagctggacagcagcgacatctacaacgagctgaaggagacctaccccaactacctgcccctgtacgtggccagactgcaccagctggacgccgagaaggagagaatgaagagactgaacgagatcgtggacgccgccaacgccgtgatcagccacatcgaccagaccgccctggccgtgtacatcgccatgaagaccgaccccagacccgacgccgccaccatcaagaacgacatggacaagcagaagagcaccctggtggacgccctgtgcagaaagggctgcgccctggccgaccacctgctgcacacccaggcccaggacggcgccatcagcaccgacgccgagggcaaggaggaggagggcgagagccccctggacagcctggccgagaccttctgggagaccaccaagtggaccgacctgttcgacaacaaggtgctgaccttcgcctacaagcacgccctggtgaacaagatgtacggcagaggcctgaagttcgccaccaagctggtggaggagaagcccaccaaggagaactggaagaactgcatccagctgatgaagctgctgggctggacccactgcgccagcttcaccgagaactggctgcccatcatgtacccccccgactactgcgtgttctag

SEQ ID NO: 137083 - DNA, 3750 bp, Artificial Sequence
  derived and/or modified sequence
atggccactgccgctaccgaggaaccttttccgttccacggactcctgcctaagaaggagaccggagccgccagcttcctttgtcggtatccggagtatgatggtaggggagttttgatcgctgtcctggatactggtgtggatcccggggctcctggtatgcaggtcacgacagacgggaagccaaaaatcgtggacatcattgacacaaccggttccggggacgtaaatactgccacagaggtcgaacccaaggacggggagatcgtcggcctaagtggacgggttctgaagatcccggcatcctggacaaatccctccgggaaatatcacatcggcattaagaatggctacgatttctaccctaaggccctgaaggagcgaattcaaaaagagcgtaaggagaaaatttgggacccggtccacagggtagccttggctgaggcatgtcgaaagcaggaggagttcgacgtcgccaataacggatcctcccaggcaaacaaactgattaaggaagagctccagagtcaagtggagctgctgaactcattcgagaagaaatattctgatcctgggcccgtgtacgactgtctggtctggcatgacggcgaggtttggcgggcttgtatagacagcaatgaagacggagacctgtcgaagagtaccgttttgaggaattacaaagaagctcaggaatacggatctttcggcacagctgagatgctaaattattccgttaatatttatgacgacggcaatctgctctccatcgttacgtctggcggagctcacggaacccacgtggcatctatcgcagcaggccacttccctgaggagccagagcggaatggagtggctcctggggcccagattctgagtatcaagatcggagatacccggctctcaaccatggagacaggtaccggtcttatcagagctatgatcgaagtgatcaatcacaagtgtgatctggtgaactatagttacggcgaggccacccattggccaaattccggcaggatctgcgaggtgataaacgaggcagtttggaagcacaacataatatacgtcagttccgctgggaacaatgggccctgtcttagcaccgtgggttgtcctggcggcacaacatctagcgttattggagtgggcgcctatgtctcccccgacatgatggttgccgagtatagtctgcgggagaagctccctgccaaccagtacacctggtcctcacgaggccctagcgcagatggggcactgggcgtatcaataagcgcccccggtggagccatagcttctgtccccaactggacactgcgaggtacacagctgatgaatggcaccagcatgtcctctcccaatgcctgcgggggcatcgccttgatcctctctggactgaaggctaacaatatcgactacaccgttcacagcgtgcgcagggcactcgaaaatactgctgtcaaggccgataacattgaagtgttcgcccagggacacggtatcattcaggtggataaggcgtatgattatctcgtgcagaacaccagcttcgcgaacaaactgggctttacggtcactgtcggaaacaatcgcggtatatatctgagggatcctgtccaggtggcagccccttcagaccatggcgtgggaattgagccagtctttcctgaaaacactgaaaactccgaaaagatctcactccagttacacctcgctctgacttcaaactcgtcttgggtgcagtgcccaagccatttggaactgatgaatcagtgcagacacattaatatccgcgtggacccacgggggctgcgcgaagggctccactatactgaggtttgcggatacgacatcgcgtcacctaacgccggacctctgttccgggtacctatcaccgccgtcattgctgctaaagtgaatgagtcttcccactacgatctggcattcacagacgttcatttcaaacctggccagattcgacgacacttcatagaggtccccgaaggtgccacatgggctgaggtgacagtgtgcagctgctcgtcagaagtcagtgcaaagttcgtactgcacgccgtgcagttagtgaagcaaagggcctatcgttcccacgagttctataagttctgcagtctgcctgaaaagggtacgctgaccgaagcctttcctgttcttgggggcaaagctatagaattctgcattgctagatggtgggcctccctatcagacgtgaacatagactatactatcagcttccacggtatagtctgtactgcaccacagctgaacatacacgcatccgagggcattaatcggtttgatgttcagtctagcctaaagtacgaagacctggccccttgcataactctgaaaaactgggtccagaccctaaggcccgtatctgccaaaactaaacctctgggctcacgggacgtccttcctaacaacagacagctctacgagatggtcctgacctacaactttcaccagcccaagtcaggggaagtcacgccatcatgtcctctgctgtgcgaacttctctacgagtcagagttcgacagccagctttggatcatattcgatcaaaacaagcgacagatggggtcgggggatgcctacccacatcaatactcactgaagctagagaagggcgattacacaatcagactgcaaatcagacacgagcagatctcagacctggagagactcaaggatctgcccttcatcgtatcacaccgcctgagcaacactctgtcactagacatccacgaaaaccattcgttcgctctactggggaagaagaaatctagtaatctaaccttacccccaaagtataaccagcccttcttcgtgacttccctgccagacgataaaatacccaagggagctggacctgggtgttatctggcagggagtctgacactgtcgaagaccgagcttggcaaaaaggcagacgtgatacccgtccattactacctgatccctcctcccactaagacgaagaatgggtctaaggacaaggaaaaagattctgaaaaggagaaagatttgaaggaggaatttaccgaggcactgcgcgatctgaagatacagtggatgacgaagctcgattcctccgacatttataatgaactcaaggagacataccctaactacttgcccctgtacgtcgctaggcttcaccagctggatgcagagaaagagaggatgaagcgtttgaatgagatcgtcgatgccgcaaatgcggtcatcagccacatcgatcagaccgctctggcggtgtacatcgccatgaagaccgacccaagacctgatgcggctactatcaaaaatgatatggataagcaaaaatctactctcgtggacgctctttgtcgcaagggctgcgccctggccgaccacctgttacacacccaagcacaggatggtgccatatccactgacgccgagggtaaagaagaggagggtgaatccccacttgattcactggccgagactttctgggagacaaccaagtggactgaccttttcgataataaggttctgactttcgcttataagcacgctctggtgaacaaaatgtatggacgcggtctaaaatttgctaccaagcttgtggaggaaaaacctacaaaagaaaactggaaaaattgcattcaactcatgaaactcctgggctggacacactgcgcttccttcacagagaactggctgcccattatgtatccacccgattactgtgtgttttag

SEQ ID NO: 137084 - DNA, 3750 bp, Artificial Sequence
  derived and/or modified sequence
atggccacagctgccacagaggagcccttccccttccacggcctgctgcccaagaaggagactggagctgccagcttcctgtgccgctacccagaatatgatggccggggcgtgctgattgctgtgctggacacaggagtggaccccggggcccctggcatgcaggtgaccacagatggcaagcccaagatcgtggacatcatcgacaccactggaagtggagatgtgaacacagccacagaggtggagcccaaggatggagaaattgtgggcctgagcggccgggtgctgaagatcccagcctcctggaccaaccccagcggcaagtaccacatcggcatcaagaatggctatgacttctaccccaaggccctgaaggagcgcatccagaaggagaggaaggagaagatctgggaccctgtgcaccgggtggccctggccgaggcctgcaggaagcaggaggagtttgatgtggccaacaacggcagcagccaggccaacaagctgatcaaggaggagctgcagagccaggtggagctgctgaacagctttgagaagaagtacagcgaccccggccctgtgtatgactgcctggtgtggcatgatggagaggtgtggagggcctgcatcgacagcaatgaagatggagacctgagcaagagcacagtgctgaggaactacaaggaggcccaggagtatggcagctttggaacagctgagatgctgaactacagcgtgaacatctatgatgatggcaacctgctgagcatcgtgaccagcggcggggcccacggcacccacgtggccagcattgctgctggccacttccctgaggagcctgagagaaatggagtggcccctggggcccagatcctgagcatcaagatcggggacacccggctgagcaccatggagaccggcaccggcctcatccgggccatgattgaagtcatcaaccacaagtgtgacctggtgaactacagctatggagaggccacccactggcccaacagcggccgcatctgtgaggtgatcaatgaggccgtgtggaagcacaacatcatctacgtgtcctctgctggcaacaacggcccctgcctgagcacagtgggctgccctgggggcaccaccagctctgtgattggagtgggcgcctacgtgtccccagacatgatggtggccgagtacagcctgcgggagaagctgcctgccaaccagtacacctggagcagccggggccccagcgcagatggagccctgggcgtgtccatcagcgcccctggaggagccatcgcctctgtgcccaactggaccctgcggggcacccagctgatgaatggcacctccatgagcagccccaatgcctgtggcggcatcgccctgatcctgagcggcctgaaggccaacaacatcgactacacagtgcacagcgtgagaagagccctggagaacacagctgtgaaggctgacaacatcgaggtgtttgcccagggccacggcatcatccaggtggacaaggcctatgactacctggtgcagaacaccagctttgccaacaagctgggcttcaccgtgacagtgggcaacaacagaggcatctacctgcgggaccctgtgcaggtggccgcccccagcgaccatggagtgggcatcgagcctgtgtttcctgaaaatacagagaacagcgagaagatcagcctgcagctgcacctggccctgaccagcaacagctcctgggtgcagtgccccagccacctggagctgatgaaccagtgccgccacatcaacatccgggtggacccccggggcctgcgggagggcctgcactacacagaggtgtgtggctatgacatcgccagccccaatgccggccccctcttccgggtgcccatcacagctgtgattgctgccaaggtgaatgaaagcagccactatgacctggccttcacagatgtgcacttcaagccaggccagatccgccgccacttcatcgaggtgcctgagggcgccacctgggccgaggtgacagtgtgcagctgcagcagcgaggtgtctgccaagtttgtgctgcatgctgtgcagctggtgaagcagagggcctaccgcagccatgagttctacaagttctgcagcctgcctgagaagggcaccctgacagaggccttccctgtgctgggcggcaaggccatcgagttctgcatcgcccgctggtgggccagcctgagtgatgtgaacatcgactacaccatctccttccatggaattgtgtgcacagccccccagctgaacatccacgccagcgagggcatcaacagatttgatgtgcagagcagcctgaagtatgaggacctggccccctgcatcaccctgaagaactgggtgcagaccctgcggcctgtgtctgccaagaccaagcccctgggcagcagagatgtgctgcccaacaaccggcagctgtatgagatggtgctgacctacaacttccaccagcccaagtctggagaggtgacccccagctgccccctgctgtgtgagctgctgtatgagagcgagtttgacagccagctgtggatcatctttgaccagaacaagaggcagatgggcagcggagatgcctacccccaccagtacagcctgaagctggagaagggggactacaccatccggctgcagatcagacatgagcagatcagtgacctggagcggctgaaggacctgcccttcatcgtgagccaccggctgagcaacaccctgagcctggacatccacgagaaccacagctttgccctgctgggcaagaagaagagcagcaacctgaccctgccccccaagtacaaccagcccttctttgtgaccagcctgcctgatgacaagatccccaagggagctggccctggctgctacctggccggcagcctgaccctgagcaagacagagctgggcaagaaggcagatgtgattcctgtgcactactacctgatccccccacccaccaagaccaagaatggcagcaaggacaaggagaaggacagcgagaaggagaaggacctgaaggaggagttcacagaggccctgcgggacctgaagatccagtggatgaccaagctggacagcagtgacatctacaatgagctgaaggagacctaccccaactacctgcccctgtatgtggcccggctgcaccagctggatgctgagaaggagaggatgaagaggctgaatgagatcgtggatgctgccaatgctgtgatcagccacatcgaccagacagccctggccgtgtacatcgccatgaagacagaccccaggccagatgctgccaccatcaagaatgacatggacaagcagaagagcaccctggtggatgccctgtgcaggaagggctgtgccctggccgaccacctgctgcacacccaggcccaggatggagccatcagcacagatgctgagggcaaggaggaggagggggagagccccctggacagcctggccgagaccttctgggagaccaccaagtggacagacctgtttgacaacaaggtgctgacctttgcctacaagcacgccctggtgaacaagatgtatggccggggcctgaagtttgccaccaagctggtggaggagaagcccaccaaggagaactggaagaactgcatccagctgatgaagctgctgggctggacccactgtgccagcttcacagagaactggctgcccatcatgtaccccccagactactgtgtgttctag

SEQ ID NO: 137085 - DNA, 3750 bp, Artificial Sequence
  derived and/or modified sequence
atggccaccgccgccaccgaggagcccttccccttccacggcctgctgcccaaaaaagagacaggtgcagcctcctttctgtgtagatacccggaatacgacggtagaggcgtattaatcgccgttctggacacaggcgtcgaccccggggctccgggcatgcaggtcaccacggatgggaagccaaagatcgtcgatatcatcgatactacgggctccggcgacgtgaacaccgccactgaggtggagcccaaggatggcgagattgtgggcctctcgggacgcgttttgaagattcctgcctcatggaccaatcccagtggaaaataccacatcgggatcaaaaatggttatgacttctaccctaaagcactgaaggaacgtattcagaaggagaggaaggagaaaatttgggaccccgttcaccgggtggctttggctgaggcctgccgaaagcaggaggaatttgatgttgcaaacaacggatcatcgcaggccaataaattgattaaagaggagctccagtcccaggtggagctgctgaacagctttgagaaaaaatatagtgatccaggccccgtgtacgattgtctggtgtggcatgatggggaagtctggagagcctgcatagactcgaatgaggacggggatctcagcaagagcaccgtccttaggaactacaaggaagcccaggagtacggctccttcggcacagccgagatgctcaattactccgttaacatttacgatgacggcaatctgctgtccatcgtgacatcaggtggagcgcatggcacccatgtagcctctatagccgccggtcacttccccgaggaacccgagcggaacggagtggccccgggggctcagattctgagcatcaagattggagatacacgattatctactatggaaaccggaactggactgattcgtgccatgattgaagtgatcaaccacaagtgcgacctcgtaaactactcctatggcgaggcaactcactggcccaatagcggtaggatctgcgaagttattaatgaggctgtctggaaacacaatatcatctatgtatcttctgcaggaaataacggcccatgcctgagcactgtcggctgccccggcggtacgacctcctccgtaataggtgttggggcctacgttagccctgatatgatggtggctgaatacagtctgcgggagaagctgccagccaaccagtatacctggtcctcgcggggcccgtccgccgacggagcattgggggtgtctatttcagccccaggcggagccattgctagtgtgccaaactggacactgaggggcacacagctgatgaacgggacgtcaatgtcttccccaaacgcatgtggaggcatcgccctgatcttgtcaggcctgaaagccaataatatcgattacacggtgcactcggtcaggcgcgccctagaaaacaccgccgtcaaagccgacaatattgaagtgtttgctcagggccatgggattatacaggtcgataaagcttatgattacttagtgcagaatacatccttcgccaataagctgggtttcaccgtgactgtgggaaacaacagaggcatctacctcagagatccagtccaggtggccgctcccagcgaccacggggtgggaattgaacccgtttttcctgaaaacacagaaaatagcgaaaagataagcttacagttgcaccttgcactcacatccaatagcagctgggtgcagtgtccctctcaccttgagctcatgaaccaatgtcgccatatcaacattagagtagaccctaggggtctacgcgagggcctccactacaccgaagtgtgtggatacgatattgctagtccaaatgccggacctctgttcagggttccaataaccgctgttatcgcagcgaaagtgaatgagagcagtcactacgacctcgccttcaccgacgtccacttcaagcccggacagattagacgccactttattgaggtgcctgaaggggccacctgggccgaggtcacggtttgttcttgctcctccgaagtctccgctaaattcgtcctacacgcggtgcagctggtcaagcagcgcgcgtataggtcacacgagttctacaagttttgtagtctccccgagaagggtactcttaccgaagccttccccgttctaggcggaaaagccatagagttctgtattgccagatggtgggcttcactgagtgatgtgaacatcgattatacaatcagtttccacggaatcgtgtgcaccgccccacagctgaatattcacgcatccgaagggatcaaccgttttgatgtgcaaagctctcttaagtacgaggatttggctccatgcatcacacttaagaattgggttcagacccttaggcccgtcagcgccaagacaaagccacttgggtccagagacgtgctgcctaataaccgccaattatatgagatggtactcacctacaactttcaccagccaaagagtggagaggttacgcccagctgccctctcctgtgcgagctcctgtacgagtccgagtttgattcgcagctgtggatcatctttgatcagaacaaacgacagatggggagcggagatgcctacccacatcaatattcgctgaagctggaaaagggtgactacaccattagactgcagatccggcacgagcagatatctgacctggaacgtctcaaggatctaccctttattgtgtctcatcgcctgagcaacaccttgtccctggatatccatgagaatcatagcttcgccctgctgggcaaaaagaaatcgtcgaacctgaccctcccaccgaaatacaaccaaccattctttgtaacatctctccccgacgataaaatacctaaaggagccggcccagggtgctatctggcagggtcactgaccctttctaagacagagctcggcaagaaagcggacgtgatccctgttcattattatttgattcctcctcctactaaaaccaagaacgggagcaaggacaaagaaaaagattcagagaaagaaaaggacctgaaagaggagtttaccgaagccctgcgtgacctgaagattcagtggatgactaaattggactcctctgacatttataacgagttgaaggagacctaccctaactacttgccactctacgttgctaggttacaccagctggacgccgagaaagagcggatgaagagactgaatgaaatcgtcgacgcggctaacgcggtaatatcacacattgaccagactgctctggcggtgtacattgctatgaagacagacccccgtccagacgccgccaccatcaaaaacgatatggacaagcaaaaaagcacattagtggacgcactttgccggaaaggttgtgccctcgccgatcaccttttacacacacaggcacaagatggcgcaatctccacagacgccgaggggaaagaggaggaaggagaatcacccctggacagcctcgcagaaactttttgggaaactacaaaatggactgacctgttcgacaacaaggtactcactttcgcttacaagcatgctctcgttaataagatgtacggccgtggtctgaaattcgctaccaaactggtagaggagaagccgaccaaagagaactggaaaaactgtattcagctgatgaaactacttggttggacccattgtgccagcttcaccgagaactggctgcctattatgtaccctcccgattactgcgtgttctag

SEQ ID NO: 137086 - DNA, 3750 bp, Artificial Sequence
  derived and/or modified sequence
atggctaccgctgcaacagaagaaccgttcccctttcacgggctgttgcccaagaaggagacgggcgctgccagttttttgtgcagatacccggaatacgatggacggggagtccttattgcggtgctggatacgggggtggaccccggagcccctgggatgcaggtcacgacagacggtaagccaaagattgttgatatcattgataccactggatccggagacgtcaatacagcaaccgaggtggagcctaaggacggagagatcgtcgggctctctggtcgcgtcctaaaaatcccagccagctggaccaacccctccggcaagtaccatatcgggattaaaaacggctacgacttctacccaaaggcgctcaaggaacgtatacagaaggagcgcaaggagaagatctgggacccggtgcacagagtggccctggccgaggcttgccgtaagcaagaggagttcgacgttgctaataatggttcttcacaggctaataaactcattaaggaagaactgcaatctcaggtggagctgctcaatagttttgagaagaagtactccgaccccggacctgtgtatgactgcctcgtgtggcatgatggggaagtgtggagggcttgcattgactcaaatgaggatggagatctgagtaagagcaccgtgctgcgcaactacaaggaggctcaagaatacgggtctttcgggactgctgagatgctcaactactcggtgaatatctatgacgacggaaacctgttgtcgatcgtaacttcaggaggcgctcatggtacgcatgtagcttcaattgcagcgggacacttccccgaggagccagagcgcaacggtgtggcaccgggagcacagattctgtcaatcaaaattggcgatactagattatcaactatggaaaccggtaccgggcttatccgcgcaatgatcgaggtgattaaccacaagtgcgaccttgtgaactacagctatggagaagccacccactggcccaattcagggagaatctgcgaagtcatcaacgaagcagtgtggaagcacaacatcatttatgtgagctctgcagggaataatggtccctgcctctcgactgttgggtgccccggaggaaccacctcctcggtgataggcgttggagcttatgtttcaccggacatgatggtagctgaatatagtctgcgcgaaaagcttccagcaaatcagtatacctggagctcacgcggacctagcgccgatggcgctctcggtgtgtcaatatcagcacctggcggagctattgccagtgtgcccaactggaccctacgtggcacgcagctcatgaatggaaccagcatgtccagccccaatgcatgcggagggatcgccctgattctgtccggcctgaaagccaacaatatagattacactgtccactccgtacggcgagccttggagaataccgcggtaaaggccgacaacatcgaggtatttgcccagggccacggtataatccaggtggataaagcctacgattatctggtgcaaaataccagcttcgctaacaaattggggttcaccgtaacagtggggaataatcgtggcatttatctacgggaccccgttcaggtggctgctcccagcgatcatggtgtgggcatcgagcccgtatttcccgaaaacaccgaaaacagtgaaaaaatatccctgcagctgcacttggcattaaccagcaactcctcctgggtgcaatgcccgtcacacttagaactcatgaatcagtgcaggcacatcaatatccgagtcgatccccgaggcctgagggagggactgcattacaccgaagtgtgtggttacgatattgcctctcctaacgccggtccactgttccgcgtgccaattacagctgtgattgctgcaaaggttaacgaaagcagccactacgatctcgcattcaccgacgtccacttcaagcctggccagattaggaggcatttcatcgaagttccggagggcgctacctgggccgaggtcactgtatgctcttgctcttccgaagtatctgctaaatttgtactccacgccgtacaactggttaagcagcgggcttaccggtcccatgaattctacaaattttgcagcctccccgagaagggcactctgactgaggccttcccagtgctcgggggaaaggccatcgagttttgcatagctcggtggtgggcctctctgtcggacgttaatatagactacaccatctcatttcatgggattgtctgtacagcaccccagctgaacatccacgcaagcgagggcatcaaccgtttcgacgtccagtcgtccctaaaatacgaggatctggccccttgtattacactgaaaaactgggtgcagacactgcgacccgtctccgcgaagactaaacctctcggctctagggatgttctaccaaacaaccgacagttgtatgagatggtccttacatataacttccaccagcctaaaagtggagaagttacaccatcatgcccgttgctttgcgaactgctttacgagtccgagttcgactcgcagctctggatcatttttgaccagaataaacgtcaaatggggagtggtgacgcttacccacaccagtacagcctgaaactggaaaagggcgattataccatcagattgcagatccgtcacgagcagatatcagacctagagagactgaaggatctgccgtttattgtctctcacagactgtccaacaccttgagcctggacatacatgagaatcattcattcgcactcctaggcaaaaagaagtccagtaacctcacccttccgcctaaatacaatcagccgttcttcgttacaagtcttcctgatgataaaattcccaaaggggctggtcccggttgctacctggcaggaagcctcacactcagcaaaacagagctgggaaagaaggctgatgtcatccctgtgcactactatctgattcccccaccaaccaaaaccaaaaacgggagcaaagataaggaaaaagacagcgagaaagagaaggatcttaaagaggaatttacggaggcgctgagggatttaaaaatccagtggatgacgaagctggattcatcagatatctataacgaacttaaggagacatatccgaactatctccccttatatgtggctcgactccatcagttggatgcggagaaggaaaggatgaaacgcctcaatgaaatcgtggatgccgctaatgcagtgatttcccacatcgaccagacagctctggccgtgtatatagcaatgaaaacagatcctcgcccagacgcagctacgatcaaaaatgacatggacaagcaaaagtctaccttagtagatgctctctgcaggaagggttgcgcgttggctgaccatcttctccatacacaggcccaggacggcgcaatttcaactgacgcggagggcaaggaggaggagggcgagtcgcctttggacagtctagctgagacgttttgggagacaactaagtggaccgacctcttcgataacaaggtcttgacattcgcatacaagcatgccctggtgaataaaatgtatggtagaggattgaagtttgctacaaaactagtagaggagaagcctacaaaagagaactggaagaattgcattcaattgatgaagctccttggatggacgcactgcgcatcattcactgagaattggctaccgattatgtatccaccggattattgtgtgttttag

SEQ ID NO: 137087 - DNA, 3931 bp, Artificial Sequence
  derived and/or modified sequence
gcagtttgccgcttcctcgtcctccatcctgcgtccatggccaccgctgcgactgaggagcccttcccttttcacggtctcctgccgaagaaggagaccggagccgcctccttcctctgccgctacccggagtatgatgggcggggggtgctcatcgcagtcctggacacgggggtcgacccgggggctccgggcatgcaggttacaactgatggaaaaccaaaaatcgttgatatcattgatacaacaggaagtggcgatgtgaatactgctacagaagtagagccaaaggatggtgagattgttggcctttcaggaagagtgcttaagattcctgcaagctggacaaatccctcaggcaaatatcatattggcataaaaaatggctatgacttctatcctaaggcactcaaggaaaggatacagaaagaacggaaggaaaaaatctgggaccctgttcacagagtggcccttgcagaagcctgtagaaaacaggaagaatttgatgttgccaacaacggctcttctcaagcaaataaactaatcaaggaggaacttcaaagtcaagtggaattgctaaattcttttgagaagaaatacagcgatcctggccctgtatatgactgcttggtatggcatgatggcgaagtctggagagcctgcattgattctaatgaagatggggacttgagtaaatctaccgtgttgagaaactacaaagaagcccaagaatatggctcttttggcacagctgagatgttgaattactccgttaatatatacgatgatggaaacctgctctccattgtgaccagtggaggagctcatgggacacatgtagctagtatagctgctggacactttccagaagaacctgaacggaatggggtagctcctggtgctcaaattctttccatcaagattggtgatacaagactaagcacaatggaaacaggcacaggcctcataagagctatgatagaagttataaatcataagtgtgatcttgtcaactacagttacggagaagcaactcactggccaaattctgggagaatttgtgaagtaattaatgaagcagtatggaagcataatataatttatgtttcaagtgctggaaataatggtccatgcctgtctacagttggttgtccaggtggaactacatcaagtgtgataggtgttggtgcttatgtttctcctgatatgatggttgctgagtattcactgagagagaaattacctgcaaatcaatatacttggtcttctagaggacctagtgctgacggggcccttggtgtgagtatcagtgcgccaggaggagccattgcttctgttcctaactggacactgagagggacgcagctgatgaatggaacatctatgtcttcccccaatgcatgtggaggcattgccctgatcctttcaggtctgaaagctaataacattgactacacagttcattcagtcagaagagctctagaaaacactgcagtgaaggctgacaatatagaagtatttgctcaaggacatggtattattcaggttgataaagcctatgactacctcgttcagaatacatcatttgctaataaattaggttttactgttactgttggaaataaccgtggcatctacctccgagatcctgttcaggtggctgcaccttcagatcatggcgttggcattgaacctgtatttccggagaacacagaaaactctgaaaaaatatcccttcagcttcatttagctctgacttcaaattcatcttgggttcagtgtcccagccatttggaactcatgaatcaatgtagacacataaacatacgtgtggatcccaggggcttaagagaaggattgcattatacagaggtatgtggctatgatatagcatcccctaacgcaggtccgctcttcagagttccgatcactgcagttatagcagcaaaagtaaatgaatcatcacattatgatctagcctttacagatgtacactttaaacctggtcaaattcgaaggcattttattgaggttcctgagggtgcaacatgggctgaagtgacagtgtgttcgtgttcttctgaggtgtcagcaaagtttgttctacatgcagtccagcttgtgaagcaaagagcatatcgaagccatgaattctataagttttgttctcttccagagaaaggaacactgactgaagcttttcctgtcctaggtggaaaagcaattgaattttgcattgctcgttggtgggcaagtctcagtgatgtcaacattgattataccatttctttccatgggatagtgtgtactgctcctcagttaaacattcatgcatcggaaggaatcaaccgctttgatgttcagtcctccttgaaatacgaagatctggctccctgcataactttgaagaactgggtccaaacactgcgcccagtgagtgcaaaaacaaaacctttaggatcaagagatgttttgccaaataaccgtcaactttatgagatggtcctgacatataactttcatcaacccaagagtggggaagtaactccaagctgcccactactttgtgaactattatatgaatctgaatttgacagccaactgtggattatttttgaccagaacaaaagacagatgggttcaggcgatgcctatccacatcagtattctttgaaactggagaaaggagattatacaattcgactacagattcgccatgagcaaatcagtgatttggaacgccttaaagaccttccatttattgtttctcatagattgtctaataccttgagcttagatattcatgaaaatcatagttttgcacttctagggaagaagaaatcaagcaatttgacattaccacccaaatataaccagccattctttgttacttccttacctgatgataaaatacctaaaggggcaggacctggatgctatcttgcaggatccttaacattgtcaaagactgaactaggaaagaaagctgatgtaatccctgttcattactacttaatacctccaccaacaaagactaagaatggcagcaaagataaggaaaaagattcagaaaaagagaaagatttaaaagaagagtttactgaagcattacgagatcttaaaattcagtggatgacaaagctggattctagtgacatttataacgaattgaaagaaacatatcctaattatcttcctctgtacgttgcacgacttcatcaattggatgctgaaaaggaacgaatgaaaagacttaatgaaattgttgatgcggcaaatgctgttatttctcatatagatcaaacagccctagcagtttatattgcaatgaagactgatcccaggcctgatgcagctactataaaaaatgacatggacaaacaaaaatccaccctcgtagatgccctttgtaggaaaggttgtgccctggcagaccatcttcttcacacccaggctcaagacggagccatttccactgatgcagaaggaaaggaggaggaaggagaaagtcctttggattctctggcagaaacattttgggaaactactaaatggactgatctctttgacaataaggttttgacatttgcatataaacatgcattagtaaataaaatgtatgggagaggccttaaatttgcaactaaacttgtggaagaaaaaccaacaaaagaaaactggaaaaattgtattcaactgatgaagttacttggatggacccattgtgcatcttttactgaaaactggctccccatcatgtatcctcccgattattgcgtattctaaaataggaaacaagactttaaattttaaaaaaggaagttttatagtgaatgggtataaaaacaaatttgtggcatttttagtctaatgcatgttttcatccactatccagtactgattattaaaatgacatgtatttatcagagaa

SEQ ID NO: 137088 - protein, 150 aa, Artificial Sequence
  derived and/or modified sequence
MPSSGSVSRSRQRGRSMASRGFDGSRRGSLRRAGAREPPSEVIEAAAQASGSCWSSPFFSASTPSAAATGVPGPTDMAAVLQQVLERTELNKLPKSVQNKLEKFLADQQSEIDGLKGRHEKFKVESEQQYFEIEKRLSHSQERLVNETRE

SEQ ID NO: 137089 - protein, 2363 aa, Artificial Sequence
  derived and/or modified sequence
MAAVLQQVLERTELNKLPKSVQNKLEKFLADQQSEIDGLKGRHEKFKVESEQQYFEIEKRLSHSQERLVNETRECQSLRLELEKLNNQLKALTEKNKELEIAQDRNIAIQSQFTRTKEELEAEKRDLIRTNERLSQELEYLTEDVKRLNEKLKESNTTKGELQLKLDELQASDVSVKYREKRLEQEKELLHSQNTWLNTELKTKTDELLALGREKGNEILELKCNLENKKEEVSRLEEQMNGLKTSNEHLQKHVEDLLTKLKEAKEQQASMEEKFHNELNAHIKLSNLYKSAADDSEAKSNELTRAVEELHKLLKEAGEANKAIQDHLLEVEQSKDQMEKEMLEKIGRLEKELENANDLLSATKRKGAILSEEELAAMSPTAAAVAKIVKPGMKLTELYNAYVETQDQLLLEKLENKRINKYLDEIVKEVEAKAPILKRQREEYERAQKAVASLSVKLEQAMKEIQRLQEDTDKANKQSSVLERDNRRMEIQVKDLSQQIRVLLMELEEARGNHVIRDEEVSSADISSSSEVISQHLVSYRNIEELQQQNQRLLVALRELGETREREEQETTSSKITELQLKLESALTELEQLRKSRQHQMQLVDSIVRQRDMYRILLSQTTGVAIPLHASSLDDVSLASTPKRPSTSQTVSTPAPVPVIESTEAIEAKAALKQLQEIFENYKKEKAENEKIQNEQLEKLQEQVTDLRSQNTKISTQLDFASKRYEMLQDNVEGYRREITSLHERNQKLTATTQKQEQIINTMTQDLRGANEKLAVAEVRAENLKKEKEMLKLSEVRLSQQRESLLAEQRGQNLLLTNLQTIQGILERSETETKQRLSSQIEKLEHEISHLKKKLENEVEQRHTLTRNLDVQLLDTKRQLDTETNLHLNTKELLKNAQKEIATLKQHLSNMEVQVASQSSQRTGKGQPSNKEDVDDLVSQLRQTEEQVNDLKERLKTSTSNVEQYQAMVTSLEESLNKEKQVTEEVRKNIEVRLKESAEFQTQLEKKLMEVEKEKQELQDDKRRAIESMEQQLSELKKTLSSVQNEVQEALQRASTALSNEQQARRDCQEQAKIAVEAQNKYERELMLHAADVEALQAAKEQVSKMASVRQHLEETTQKAESQLLECKASWEERERMLKDEVSKCVCRCEDLEKQNRLLHDQIEKLSDKVVASVKEGVQGPLNVSLSEEGKSQEQILEILRFIRREKEIAETRFEVAQVESLRYRQRVELLERELQELQDSLNAEREKVQVTAKTMAQHEELMKKTETMNVVMETNKMLREEKERLEQDLQQMQAKVRKLELDILPLQEANAELSEKSGMLQAEKKLLEEDVKRWKARNQHLVSQQKDPDTEEYRKLLSEKEVHTKRIQQLTEEIGRLKAEIARSNASLTNNQNLIQSLKEDLNKVRTEKETIQKDLDAKIIDIQEKVKTITQVKKIGRRYKTQYEELKAQQDKVMETSAQSSGDHQEQHVSVQEMQELKETLNQAETKSKSLESQVENLQKTLSEKETEARNLQEQTVQLQSELSRLRQDLQDRTTQEEQLRQQITEKEEKTRKAIVAAKSKIAHLAGVKDQLTKENEELKQRNGALDQQKDELDVRITALKSQYEGRISRLERELREHQERHLEQRDEPQEPSNKVPEQQRQITLKTTPASGERGIASTSDPPTANIKPTPVVSTPSKVTAAAMAGNKSTPRASIRPMVTPATVTNPTTTPTATVMPTTQVESQEAMQSEGPVEHVPVFGSTSGSVRSTSPNVQPSISQPILTVQQQTQATAFVQPTQQSHPQIEPANQELSSNIVEVVQSSPVERPSTSTAVFGTVSATPSSSLPKRTREEEEDSTIEASDQVSDDTVEMPLPKKLKSVTPVGTEEEVMAEESTDGEVETQVYNQDSQDSIGEGVTQGDYTPMEDSEETSQSLQIDLGPLQSDQQTTTSSQDGQGKGDDVIVIDSDDEEEDDDENDGEHEDYEEDEEDDDDDEDDTGMGDEGEDSNEGTGSADGNDGYEADDAEGGDGTDPGTETEESMGGGEGNHRAADSQNSGEGNTGAAESSFSQEVSREQQPSSASERQAPRAPQSPRRPPHPLPPRLTIHAPPQELGPPVQRIQMTRRQSVGRGLQLTPGIGGMQQHFFDDEDRTVPSTPTLVVPHRTDGFAEAIHSPQVAGVPRFRFGPPEDMPQTSSSHSDLGQLASQGGLGMYETPLFLAHEEESGGRSVPTTPLQVAAPVTVFTESTTSDASEHASQSVPMVTTSTGTLSTTNETATGDDGDEVFVEAESEGISSEAGLEIDSQQEEEPVQASDESDLPSTSQDPPSSSSVDTSSSQPKPFRRVRLQTTLRQGVRGRQFNRQRGVSHAMGGRGGINRGNIN

SEQ ID NO: 137090 - DNA, 453 bp, Artificial Sequence
  derived and/or modified sequence
atgcccagcagcggcagcgtgagcagaagcagacagagaggcagaagcatggccagcagaggcttcgacggcagcagaagaggcagcctgagaagagccggcgccagagagccccccagcgaggtgatcgaggccgccgcccaggccagcggcagctgctggagcagccccttcttcagcgccagcacccccagcgccgccgccaccggcgtgcccggccccaccgacatggccgccgtgctgcagcaggtgctggagagaaccgagctgaacaagctgcccaagagcgtgcagaacaagctggagaagttcctggccgaccagcagagcgagatcgacggcctgaagggcagacacgagaagttcaaggtggagagcgagcagcagtacttcgagatcgagaagagactgagccacagccaggagagactggtgaacgagaccagagagtag

SEQ ID NO: 137091 - DNA, 7092 bp, Artificial Sequence
  derived and/or modified sequence
atggccgccgtgctgcagcaggtgctggagagaaccgagctgaacaagctgcccaagagcgtgcagaacaagctggagaagttcctggccgaccagcagagcgagatcgacggcctgaagggcagacacgagaagttcaaggtggagagcgagcagcagtacttcgagatcgagaagagactgagccacagccaggagagactggtgaacgagaccagagagtgccagagcctgagactggagctggagaagctgaacaaccagctgaaggccctgaccgagaagaacaaggagctggagatcgcccaggacagaaacatcgccatccagagccagttcaccagaaccaaggaggagctggaggccgagaagagagacctgatcagaaccaacgagagactgagccaggagctggagtacctgaccgaggacgtgaagagactgaacgagaagctgaaggagagcaacaccaccaagggcgagctgcagctgaagctggacgagctgcaggccagcgacgtgagcgtgaagtacagagagaagagactggagcaggagaaggagctgctgcacagccagaacacctggctgaacaccgagctgaagaccaagaccgacgagctgctggccctgggcagagagaagggcaacgagatcctggagctgaagtgcaacctggagaacaagaaggaggaggtgagcagactggaggagcagatgaacggcctgaagaccagcaacgagcacctgcagaagcacgtggaggacctgctgaccaagctgaaggaggccaaggagcagcaggccagcatggaggagaagttccacaacgagctgaacgcccacatcaagctgagcaacctgtacaagagcgccgccgacgacagcgaggccaagagcaacgagctgaccagagccgtggaggagctgcacaagctgctgaaggaggccggcgaggccaacaaggccatccaggaccacctgctggaggtggagcagagcaaggaccagatggagaaggagatgctggagaagatcggcagactggagaaggagctggagaacgccaacgacctgctgagcgccaccaagagaaagggcgccatcctgagcgaggaggagctggccgccatgagccccaccgccgccgccgtggccaagatcgtgaagcccggcatgaagctgaccgagctgtacaacgcctacgtggagacccaggaccagctgctgctggagaagctggagaacaagagaatcaacaagtacctggacgagatcgtgaaggaggtggaggccaaggcccccatcctgaagagacagagagaggagtacgagagagcccagaaggccgtggccagcctgagcgtgaagctggagcaggccatgaaggagatccagagactgcaggaggacaccgacaaggccaacaagcagagcagcgtgctggagagagacaacagaagaatggagatccaggtgaaggacctgagccagcagatcagagtgctgctgatggagctggaggaggccagaggcaaccacgtgatcagagacgaggaggtgagcagcgccgacatcagcagcagcagcgaggtgatcagccagcacctggtgagctacagaaacatcgaggagctgcagcagcagaaccagagactgctggtggccctgagagagctgggcgagaccagagagagagaggagcaggagaccaccagcagcaagatcaccgagctgcagctgaagctggagagcgccctgaccgagctggagcagctgagaaagagcagacagcaccagatgcagctggtggacagcatcgtgagacagagagacatgtacagaatcctgctgagccagaccaccggcgtggccatccccctgcacgccagcagcctggacgacgtgagcctggccagcacccccaagagacccagcaccagccagaccgtgagcacccccgcccccgtgcccgtgatcgagagcaccgaggccatcgaggccaaggccgccctgaagcagctgcaggagatcttcgagaactacaagaaggagaaggccgagaacgagaagatccagaacgagcagctggagaagctgcaggagcaggtgaccgacctgagaagccagaacaccaagatcagcacccagctggacttcgccagcaagagatacgagatgctgcaggacaacgtggagggctacagaagagagatcaccagcctgcacgagagaaaccagaagctgaccgccaccacccagaagcaggagcagatcatcaacaccatgacccaggacctgagaggcgccaacgagaagctggccgtggccgaggtgagagccgagaacctgaagaaggagaaggagatgctgaagctgagcgaggtgagactgagccagcagagagagagcctgctggccgagcagagaggccagaacctgctgctgaccaacctgcagaccatccagggcatcctggagagaagcgagaccgagaccaagcagagactgagcagccagatcgagaagctggagcacgagatcagccacctgaagaagaagctggagaacgaggtggagcagagacacaccctgaccagaaacctggacgtgcagctgctggacaccaagagacagctggacaccgagaccaacctgcacctgaacaccaaggagctgctgaagaacgcccagaaggagatcgccaccctgaagcagcacctgagcaacatggaggtgcaggtggccagccagagcagccagagaaccggcaagggccagcccagcaacaaggaggacgtggacgacctggtgagccagctgagacagaccgaggagcaggtgaacgacctgaaggagagactgaagaccagcaccagcaacgtggagcagtaccaggccatggtgaccagcctggaggagagcctgaacaaggagaagcaggtgaccgaggaggtgagaaagaacatcgaggtgagactgaaggagagcgccgagttccagacccagctggagaagaagctgatggaggtggagaaggagaagcaggagctgcaggacgacaagagaagagccatcgagagcatggagcagcagctgagcgagctgaagaagaccctgagcagcgtgcagaacgaggtgcaggaggccctgcagagagccagcaccgccctgagcaacgagcagcaggccagaagagactgccaggagcaggccaagatcgccgtggaggcccagaacaagtacgagagagagctgatgctgcacgccgccgacgtggaggccctgcaggccgccaaggagcaggtgagcaagatggccagcgtgagacagcacctggaggagaccacccagaaggccgagagccagctgctggagtgcaaggccagctgggaggagagagagagaatgctgaaggacgaggtgagcaagtgcgtgtgcagatgcgaggacctggagaagcagaacagactgctgcacgaccagatcgagaagctgagcgacaaggtggtggccagcgtgaaggagggcgtgcagggccccctgaacgtgagcctgagcgaggagggcaagagccaggagcagatcctggagatcctgagattcatcagaagagagaaggagatcgccgagaccagattcgaggtggcccaggtggagagcctgagatacagacagagagtggagctgctggagagagagctgcaggagctgcaggacagcctgaacgccgagagagagaaggtgcaggtgaccgccaagaccatggcccagcacgaggagctgatgaagaagaccgagaccatgaacgtggtgatggagaccaacaagatgctgagagaggagaaggagagactggagcaggacctgcagcagatgcaggccaaggtgagaaagctggagctggacatcctgcccctgcaggaggccaacgccgagctgagcgagaagagcggcatgctgcaggccgagaagaagctgctggaggaggacgtgaagagatggaaggccagaaaccagcacctggtgagccagcagaaggaccccgacaccgaggagtacagaaagctgctgagcgagaaggaggtgcacaccaagagaatccagcagctgaccgaggagatcggcagactgaaggccgagatcgccagaagcaacgccagcctgaccaacaaccagaacctgatccagagcctgaaggaggacctgaacaaggtgagaaccgagaaggagaccatccagaaggacctggacgccaagatcatcgacatccaggagaaggtgaagaccatcacccaggtgaagaagatcggcagaagatacaagacccagtacgaggagctgaaggcccagcaggacaaggtgatggagaccagcgcccagagcagcggcgaccaccaggagcagcacgtgagcgtgcaggagatgcaggagctgaaggagaccctgaaccaggccgagaccaagagcaagagcctggagagccaggtggagaacctgcagaagaccctgagcgagaaggagaccgaggccagaaacctgcaggagcagaccgtgcagctgcagagcgagctgagcagactgagacaggacctgcaggacagaaccacccaggaggagcagctgagacagcagatcaccgagaaggaggagaagaccagaaaggccatcgtggccgccaagagcaagatcgcccacctggccggcgtgaaggaccagctgaccaaggagaacgaggagctgaagcagagaaacggcgccctggaccagcagaaggacgagctggacgtgagaatcaccgccctgaagagccagtacgagggcagaatcagcagactggagagagagctgagagagcaccaggagagacacctggagcagagagacgagccccaggagcccagcaacaaggtgcccgagcagcagagacagatcaccctgaagaccacccccgccagcggcgagagaggcatcgccagcaccagcgacccccccaccgccaacatcaagcccacccccgtggtgagcacccccagcaaggtgaccgccgccgccatggccggcaacaagagcacccccagagccagcatcagacccatggtgacccccgccaccgtgaccaaccccaccaccacccccaccgccaccgtgatgcccaccacccaggtggagagccaggaggccatgcagagcgagggccccgtggagcacgtgcccgtgttcggcagcaccagcggcagcgtgagaagcaccagccccaacgtgcagcccagcatcagccagcccatcctgaccgtgcagcagcagacccaggccaccgccttcgtgcagcccacccagcagagccacccccagatcgagcccgccaaccaggagctgagcagcaacatcgtggaggtggtgcagagcagccccgtggagagacccagcaccagcaccgccgtgttcggcaccgtgagcgccacccccagcagcagcctgcccaagagaaccagagaggaggaggaggacagcaccatcgaggccagcgaccaggtgagcgacgacaccgtggagatgcccctgcccaagaagctgaagagcgtgacccccgtgggcaccgaggaggaggtgatggccgaggagagcaccgacggcgaggtggagacccaggtgtacaaccaggacagccaggacagcatcggcgagggcgtgacccagggcgactacacccccatggaggacagcgaggagaccagccagagcctgcagatcgacctgggccccctgcagagcgaccagcagaccaccaccagcagccaggacggccagggcaagggcgacgacgtgatcgtgatcgacagcgacgacgaggaggaggacgacgacgagaacgacggcgagcacgaggactacgaggaggacgaggaggacgacgacgacgacgaggacgacaccggcatgggcgacgagggcgaggacagcaacgagggcaccggcagcgccgacggcaacgacggctacgaggccgacgacgccgagggcggcgacggcaccgaccccggcaccgagaccgaggagagcatgggcggcggcgagggcaaccacagagccgccgacagccagaacagcggcgagggcaacaccggcgccgccgagagcagcttcagccaggaggtgagcagagagcagcagcccagcagcgccagcgagagacaggcccccagagccccccagagccccagaagacccccccaccccctgccccccagactgaccatccacgcccccccccaggagctgggcccccccgtgcagagaatccagatgaccagaagacagagcgtgggcagaggcctgcagctgacccccggcatcggcggcatgcagcagcacttcttcgacgacgaggacagaaccgtgcccagcacccccaccctggtggtgccccacagaaccgacggcttcgccgaggccatccacagcccccaggtggccggcgtgcccagattcagattcggcccccccgaggacatgccccagaccagcagcagccacagcgacctgggccagctggccagccagggcggcctgggcatgtacgagacccccctgttcctggcccacgaggaggagagcggcggcagaagcgtgcccaccacccccctgcaggtggccgcccccgtgaccgtgttcaccgagagcaccaccagcgacgccagcgagcacgccagccagagcgtgcccatggtgaccaccagcaccggcaccctgagcaccaccaacgagaccgccaccggcgacgacggcgacgaggtgttcgtggaggccgagagcgagggcatcagcagcgaggccggcctggagatcgacagccagcaggaggaggagcccgtgcaggccagcgacgagagcgacctgcccagcaccagccaggacccccccagcagcagcagcgtggacaccagcagcagccagcccaagcccttcagaagagtgagactgcagaccaccctgagacagggcgtgagaggcagacagttcaacagacagagaggcgtgagccacgccatgggcggcagaggcggcatcaacagaggcaacatcaactag

SEQ ID NO: 137092 - DNA, 453 bp, Artificial Sequence
  derived and/or modified sequence
atgccttcatcgggatcagtatcccggagtcgccagcgaggccggagcatggcctctcggggattcgatggtagtcggaggggatcactcagaagagccggagcgcgagaaccaccatcggaggtgattgaggctgccgctcaggccagcggatcgtgttggagtagtcccttctttagtgcatctactccctctgcagccgctacaggggtcccaggcccaactgacatggcagccgtcctacagcaagtgctcgaacgaaccgagctgaataaactaccgaaatctgtacaaaacaagcttgagaaatttctggccgatcagcaaagtgaaatcgatgggctgaagggccgtcatgaaaaatttaaagtggagagcgaacagcagtatttcgagattgagaagcgattatcccactcccaggagagattggttaatgagacccgcgaatag

SEQ ID NO: 137093 - DNA, 7092 bp, Artificial Sequence
  derived and/or modified sequence
atggccgctgtcttgcaacaggtattagaacggaccgaactgaacaaactgcctaaatccgttcagaataaactggaaaagttccttgccgatcagcagtccgagatcgacgggctgaagggccggcatgaaaagttcaaggttgagtccgagcagcaatactttgagatagaaaagagactgagccacagccaggaacgcctggtcaatgagaccagggaatgccaatcactgagactagagctcgagaagctgaacaatcaattgaaagcactgaccgagaagaacaaagaactggagatagcccaggacaggaacattgccatccagtcccagtttacaagaacaaaggaggagttggaagcagaaaaacgggacttgattaggacaaatgagcggctgtcccaagaactagaatacctcactgaagatgtgaagcgccttaatgagaagctcaaggagtctaacaccactaaaggcgagctgcaactgaagttagatgagttgcaggcctccgatgtgtctgtgaaataccgcgagaaaaggctcgagcaagagaaagagctgctgcactcacagaatacatggctcaataccgaactgaaaaccaagactgacgaactgctggccctagggcgggaaaaaggaaacgaaatactcgaactgaagtgcaaccttgagaacaagaaggaggaagtttctagactggaagagcagatgaacggccttaagacctcaaacgagcacctccaaaaacacgtggaggaccttttaactaaactgaaggaggccaaggagcagcaggcatcaatggaagagaagtttcataatgaactcaatgcacatatcaagctgtctaacttgtataaaagcgccgcagatgactcggaggcgaagtctaacgagctcactcgcgccgtcgaggaactccataaactgctgaaggaagccggggaagcaaacaaagccatccaagaccacttactggaagttgaacaatcaaaggaccagatggaaaaggaaatgctcgaaaagatcggtcggctggagaaggagctagaaaacgcaaacgacctgttgagcgcaactaagcgtaaaggggcaatcctctctgaggaggaattggctgccatgagccccacagccgcggccgtagcgaagatcgttaaacccggtatgaagcttaccgagttgtataacgcttacgtagagacccaagatcagctgctgttggagaagttagaaaataaaagaattaataagtacttggacgagatcgttaaggaggtggaggcaaaagccccaatcctgaagcgccagcgagaagagtatgaacgcgcacaaaaagccgtggccagcctgagcgttaagcttgagcaggcgatgaaggagatacagagattgcaggaagacacagataaggcaaataaacagagttctgtcctggaaagggataaccggagaatggagattcaggtgaaggatctgtcccaacagatacgagtgcttttaatggagctcgaggaggcccggggcaaccacgttattagggacgaggaggtgagtagtgccgatatctcttcctcatctgaggtaatttctcagcatctggtctcctaccggaacatcgaggagctgcagcagcagaatcaacgcctgctagtcgccctcagggaactcggagaaacccgggagcgggaagagcaggagaccacgtcctccaaaataaccgagcttcagctgaagctggagtcagcactgactgaacttgaacagctgcggaagtctcgacaacatcaaatgcagcttgtggatagtatcgtgcgccagagggacatgtacagaatcctgctgagtcaaacaactggggttgcaatcccacttcatgcatccagcctggatgatgtcagcctcgcaagcaccccaaagcggcctagtacttcacagacagtgagcacacctgcccctgtgccagtgatcgagagtaccgaggctatcgaagccaaggccgcactcaaacagcttcaggaaatatttgagaattataaaaaagagaaggctgagaatgagaaaatccaaaacgaacaattggagaaattgcaggaacaggtcacagatctccgctcccagaatacaaagattagcacccagctggacttcgcatcgaaaagatacgagatgttgcaggataacgttgagggttatagaagggagatcacatcactccacgaacggaatcagaaattgaccgccacaactcagaagcaggagcagataatcaacaccatgacacaggatctacgcggagcaaatgagaagctggcagtagccgaggtgcgagcagagaacctgaagaaggagaaggaaatgctcaagctgagtgaggttaggctatcccaacagagggagtctttgctggccgagcagcgtggccagaacctgcttctgacaaatctgcaaacaatccagggaatactcgagaggtctgagacggagaccaagcagaggctttccagccagattgagaagctggaacacgagattagccacctgaaaaagaagctggagaatgaagtggaacagagacacaccctaactagaaacttggacgttcagctgcttgacaccaaaagacagctggacaccgagaccaacctgcatcttaataccaaggaactgctcaagaatgcccagaaggagatcgcaactctgaaacagcacttaagcaatatggaagtgcaggtcgcgtctcaaagttctcagcgcaccggcaagggccagccatccaataaggaagatgtggatgatcttgtatcacagctgagacagacggaggagcaagtcaatgacctgaaggaacgattaaagacctcaacatctaacgtggagcagtatcaggctatggtcaccagcctcgaagagtcattaaacaaggagaaacaggtgactgaagaagtgagaaagaacatagaagtaagactgaaagagtcagccgagtttcaaacccagttagagaagaagctgatggaggtcgagaaggaaaagcaggaactccaagacgacaaaagaagagctatagagtccatggaacaacaactgtccgagctcaaaaagacactttccagcgtccagaatgaagtccaagaagcccttcagagggcatccaccgccctgtccaacgagcagcaggctcgcagagattgccaagaacaagcaaagatcgccgtggaggcccagaataagtatgagagggagctgatgcttcacgccgcagacgtcgaggcattgcaggctgctaaggagcaggtgagcaagatggcatcggtgcggcagcacctggaggagactacacaaaaggcagaatcacaactgctcgagtgcaaagcctcgtgggaggagcgtgaacggatgttaaaggatgaggtaagtaagtgtgtgtgtcgttgcgaggatcttgagaaacagaacagattactgcacgatcaaatcgagaagctgtcagataaagttgtggcctctgtcaaagaaggcgtccagggaccccttaacgtgtcactctctgaagaggggaagagccaggagcaaatcctcgaaatccttagattcattaggcgggaaaaggaaatcgcggagaccaggtttgaggtggctcaagttgaaagcctaaggtataggcaacgcgtggagctgctcgagagggagttgcaagaactgcaggacagcctaaacgccgagcgtgaaaaagttcaggtcacagcgaagaccatggcccaacacgaagagctcatgaagaaaacagaaacaatgaatgtggtaatggaaaccaataaaatgttgcgggaagagaaggagaggctggagcaggatctccagcagatgcaggccaaagtaaggaaactcgaactggatatactaccacttcaggaagccaacgccgagctgtctgagaaaagtgggatgctacaggccgaaaagaagctgcttgaagaggacgtcaagcgatggaaggctcgcaatcagcatttggtaagccagcaaaaagatcccgacactgaggaatatagaaagctgttatctgagaaggaagttcataccaagcgcattcagcaactcaccgaggagatcggccggctgaaggctgaaatcgcgaggtccaacgctagcctcaccaataatcagaacctgattcaatccctaaaggaggatctaaataaagtgaggaccgagaaagagacgattcaaaaagatctggatgccaaaattattgatattcaagagaaggtgaagactattacacaggtcaaaaaaattggtaggagatacaaaacacagtatgaggaactaaaggcgcaacaggacaaagtgatggagacgagtgcccagtctagtggcgatcaccaggagcaacacgtgtccgtgcaggagatgcaggagctcaaggagacccttaatcaggccgaaaccaaatcaaaatcccttgaatcacaggttgaaaacttgcaaaaaaccttgagcgagaaagaaaccgaggctagaaaccttcaggagcagacagtccagttacagtccgaattgagtagactgagacaggacctgcaggaccgcaccacacaggaagagcagttaagacagcaaatcacggaaaaagaggaaaaaactaggaaggcaatagtagcggctaaatcaaaaattgctcacctcgctggagtgaaggatcagctcacgaaagagaacgaggagttaaagcagaggaacggggccttggatcagcagaaggatgaactggatgttagaatcaccgcgctaaaatcacaatacgagggcagaatcagtcggctggagcgagagctgcgcgaacaccaggaaagacacttggaacagcgcgatgaacctcaggagcccagcaataaagtgcctgaacagcagcggcagattaccctaaagacaacgcccgcctcaggagagcgtggaatcgccagcaccagcgatccccctactgcaaacatcaaaccaactcctgtagtgagtacaccctcaaaagtaactgctgctgcaatggcaggcaacaagagcactccccgagccagtatcaggcccatggttacacccgctaccgtgaccaaccccaccactacacctacagcgacagtcatgccaactacacaggtggagtcccaagaggctatgcaatccgagggtcctgtcgaacacgtccccgttttcggcagtaccagtggttctgtaagatctacttcacccaacgtgcaaccctctattagccaaccaatcctcaccgtgcagcagcagacccaagccactgccttcgttcagcccacccagcaatctcatccccagattgaaccggcaaatcaggagttgtcctctaacattgtcgaagttgttcagtcatctcctgtggaaaggccaagcacgtccacagccgtcttcggaaccgttagtgctactccctcttcatctttgcctaagaggacaagagaggaggaggaggacagcaccatcgaagctagcgatcaggtcagcgatgacacagtcgagatgccattgcctaagaagctaaagtcggtaacccccgtgggaacagaggaggaggttatggcggaagagtccaccgacggagaagtagagactcaggtctataaccaggatagtcaggacagtatcggagaaggagttactcagggggattatacccccatggaggactccgaggagaccagccagagcctgcagatcgacctcgggcccttgcagtctgaccaacagaccactacatccagccaggatggacaggggaaaggggatgacgtcatcgtgattgacagtgatgacgaggaagaggacgatgatgagaacgacggggagcacgaagactacgaagaggatgaagaggacgatgacgatgatgaggacgacacgggcatgggggacgaaggagaggacagcaacgagggcacaggcagtgctgacggcaatgacggctacgaagctgatgacgcagaggggggcgacggtaccgatccaggtacagaaaccgaggaaagcatgggaggtggggagggcaatcatcgggctgccgattctcagaactccggagaaggcaacaccggggcagcggagtcatcgttttcccaggaagtctcccgggagcagcagcctagctctgcctctgagaggcaggcaccacgggcccctcagagtcccagacggccccctcaccccttgcctcctcgtttgacaatccatgcacctccgcaggagttgggaccacccgtccaaaggatccaaatgacccggcgacagtccgtgggccgcggcctgcagttgacacctggcatcggcggaatgcagcagcatttttttgacgatgaggaccggaccgtgccgtctactcccacactggtcgtgccccatcgaacagacggtttcgctgaagcgatccacagcccacaagtcgctggtgttccccggttcaggttcggaccgcccgaggatatgcctcaaacatcatcctctcactccgatctcggccagctcgcatcccagggcgggcttggtatgtacgagacaccactattcctcgcccacgaagaagagagtggcggccggtccgtccccacgacccctttgcaggtggctgcgccagtgaccgtttttactgagtcgaccactagtgacgccagcgaacatgccagccagagcgtccctatggtcaccactagtacgggaaccctcagcacaaccaatgaaaccgcgactggcgatgacggcgacgaggttttcgtcgaggctgaaagtgagggtataagtagcgaagctggactggaaatcgactcccagcaggaagaagaaccagtgcaagctagcgatgaatccgatcttccgagcacaagccaggatcctccttcttcctcatctgtcgatacaagctccagccagccaaagccctttcgacgggtcagactgcaaactacactgcgccaaggcgttcgcggaaggcagttcaaccgtcagagaggagtcagtcatgcaatgggtggccgtggtgggatcaaccggggcaatatcaactag

SEQ ID NO: 137094 - DNA, 453 bp, Artificial Sequence
  derived and/or modified sequence
atgccctcatctggctcagtgtctcgctctcgccaacggggcaggagcatggcatcccggggcttcgacgggtccagaagaggctctctgaggcgggctggggccagagaaccaccctccgaagtaatcgaagccgcggctcaggcctctggttcatgttggagcagcccatttttcagtgcctccacccccagcgcggccgcgactggcgtgcctggacccaccgacatggccgcagtgctccaacaggtgctggaacgaaccgagctgaacaaactgccgaagtcagtacagaacaaactcgaaaagttcctggctgatcaacaaagtgagattgatggacttaagggaagacacgagaaattcaaggtagagtctgagcagcagtacttcgagattgagaagcggttatctcacagtcaggagagattggtcaatgagactcgagaatag

SEQ ID NO: 137095 - DNA, 453 bp, Artificial Sequence
  derived and/or modified sequence
atgcccagcagcggctctgtgagccgcagccggcagaggggccgctccatggccagccggggctttgatggcagccggcggggcagcctgcggcgggccggggcccgggagccccccagcgaggtgattgaagctgctgcccaggccagcggcagctgctggagcagccccttcttcagcgccagcaccccatctgctgctgccactggagtgcccggccccacagacatggctgctgtgctgcagcaggtgctggagaggacagagctgaacaagctgcccaagtctgtgcagaacaagctggagaagttcctggccgaccagcagagcgagattgatggcctgaagggcagacatgagaagttcaaggtggagagcgagcagcagtactttgaaattgagaagaggctgagccacagccaggagcggctggtgaatgagacccgggagtag

SEQ ID NO: 137096 - DNA, 7092 bp, Artificial Sequence
  derived and/or modified sequence
atggctgctgtgctgcagcaggtgctggagaggacagagctgaacaagctgcccaagtctgtgcagaacaagctggagaagttcctggccgaccagcagagcgagattgatggcctgaagggcagacatgagaagttcaaggtggagagcgagcagcagtactttgaaattgagaagaggctgagccacagccaggagcggctggtgaatgagacccgggagtgccagagcctgcggctggagctggagaagctgaacaaccagctgaaggccctgacagagaagaacaaggagctggagatcgcccaggacagaaatattgccatccagagccagttcaccaggaccaaggaggagctggaggccgagaagagggacctgatccgcaccaatgaaaggctgagccaggagctggagtacctgacagaagatgtgaagaggctgaatgagaagctgaaggagagcaacaccaccaagggggagctgcagctgaagctggatgagctgcaggccagtgatgtgtctgtgaagtaccgggagaagaggctggagcaggagaaggagctgctgcacagccagaacacctggctgaacacagagctgaagaccaagacagatgagctgctggccctgggccgggagaagggaaatgagatcctggagctgaagtgcaacctggagaacaagaaggaggaggtgtcccggctggaggagcagatgaatggcctgaagaccagcaatgagcacctgcagaagcacgtggaggacctgctgaccaagctgaaggaggccaaggagcagcaggcctccatggaggagaagttccacaatgagctgaatgcccacatcaagctgagcaacctgtacaagtctgctgctgatgacagcgaggccaagagcaatgagctgaccagggctgtggaggagctgcacaagctgctgaaggaggccggggaggccaacaaggccatccaggaccacctgctggaggtggagcagagcaaggaccagatggagaaggagatgctggagaagattggccgcctggagaaggagctggagaatgccaatgacctgctgagcgccaccaagaggaagggggccatcctgtctgaggaggagctggccgccatgagccccacagctgctgctgtggccaagatcgtgaagccaggcatgaagctgacagagctgtacaatgcctacgtggagacccaggaccagctgctgctggagaagctggagaacaagaggatcaacaagtacctggatgagatcgtgaaggaggtggaggccaaggcccccatcctgaagaggcagcgggaggagtatgaaagagcccagaaggctgtggccagcctgtctgtgaagctggagcaggccatgaaggagatccagaggctgcaggaggacacagacaaggccaacaagcagagctctgtgctggagcgggacaacagaaggatggagatccaggtgaaggacctgagccagcagatccgggtgctgctgatggagctggaggaggcccggggcaaccacgtgatcagagatgaggaggtgtcctctgctgacatcagcagcagcagcgaggtgatcagccagcacctggtgtcctacagaaatattgaggagctgcagcagcagaaccagaggctgctggtggccctgcgggagctgggggagacccgggagcgggaggagcaggagaccaccagcagcaagatcacagagctgcagctgaagctggagagcgccctgacagagctggagcagctgaggaagagccggcagcaccagatgcagctggtggacagcatcgtgcggcagagggacatgtaccgcatcctgctgagccagaccaccggggtggccatccccctgcacgccagcagcctggatgatgtgtccctggccagcacccccaagaggcccagcaccagccagacagtgtccaccccagcccctgtgcctgtgattgagagcacagaggccatcgaggccaaggccgccctgaagcagctgcaggagatctttgagaactacaagaaggagaaggccgagaatgagaagatccagaatgagcagctggagaagctgcaggagcaggtgacagacctgcggagccagaacaccaagatcagcacccagctggactttgccagcaagagatatgagatgctgcaggacaacgtggagggctaccgccgggagatcaccagcctgcatgaaagaaaccagaagctgacagccaccacccagaagcaggagcagatcatcaacaccatgacccaggacctgcggggggccaatgagaagctggccgtggccgaggtgcgggcagagaacctgaagaaggagaaggagatgctgaagctgtctgaggtgcggctgagccagcagcgggagagcctgctggccgagcagaggggccagaacctgctgctgaccaacctgcagaccatccagggcatcctggagaggagtgaaacagagaccaagcagaggctgagcagccagatcgagaagctggagcacgagatcagccacctgaagaagaagctggagaatgaggtggagcagaggcacaccctgaccaggaacctggatgtgcagctgctggacaccaagaggcagctggacacagagaccaacctgcacctgaacaccaaggagctgctgaagaatgcccagaaggagatcgccaccctgaagcagcacctgagcaacatggaggtgcaggtggccagccagagcagccagaggacaggcaagggccagcccagcaacaaggaggatgtggatgacctggtgtcccagctgcggcagacagaggagcaggtgaatgacctgaaggagcggctgaagaccagcaccagcaatgtggagcagtaccaggccatggtgaccagcctggaggagagcctgaacaaggagaagcaggtgacagaggaggtgaggaagaacatcgaggtgcggctgaaggagagcgctgagttccagacccagctggagaagaagctgatggaggtggagaaggagaagcaggagctgcaggatgacaagagaagagccatcgagagcatggagcagcagctgtctgagctgaagaagaccctgagctctgtgcagaatgaggtgcaggaggccctgcagagggccagcacagccctgagcaatgagcagcaggcccggcgggactgccaggagcaggccaagattgctgtggaggcccagaacaagtatgaaagagagctgatgctgcacgccgcagatgtggaggccctgcaggccgccaaggagcaggtgtccaagatggcctctgtgcggcagcacctggaggagaccacccagaaggccgagagccagctgctggagtgcaaggcctcctgggaggagcgggagaggatgctgaaggatgaggtgtccaaatgtgtgtgccgctgtgaggacctggagaagcagaaccggctgctgcatgaccagatcgagaagctgagtgacaaggtggtggcctctgtgaaggagggcgtgcagggccccctgaatgtgtccctgtctgaggagggcaagagccaggagcagatcctggagatcctgcgcttcatccggcgggagaaggagattgctgagaccaggtttgaggtggcccaggtggagagcctgcgctaccggcagagggtggagctgctggagcgggagctgcaggagctgcaggacagcctgaatgctgagcgggagaaggtgcaggtgacagccaagaccatggcccagcacgaggagctgatgaagaagacagagaccatgaatgtggtgatggagaccaacaagatgctgcgggaggagaaggagcggctggagcaggacctgcagcagatgcaggccaaggtgaggaagctggagctggacatcctgcccctgcaggaggccaatgctgagctgtctgagaagagcggcatgctgcaggccgagaagaagctgctggaggaggatgtgaagcgctggaaggccaggaaccagcacctggtgtcccagcagaaggaccctgacacagaggagtacaggaagctgctgtctgagaaggaggtgcacaccaagaggatccagcagctgacagaggagatcggccgcctgaaggccgagatcgcccggagcaatgccagcctgaccaacaaccagaacctgatccagagcctgaaggaggacctgaacaaggtgaggacagagaaggagaccatccagaaggacctggatgccaagatcatcgacatccaggagaaggtgaagaccatcacccaggtgaagaagattggaagacgctacaagacccagtatgaggagctgaaggcccagcaggacaaggtgatggagaccagcgcccagagcagcggggaccaccaggagcagcacgtgtctgtgcaggagatgcaggagctgaaggagaccctgaaccaggccgagaccaagagcaagagcctggagagccaggtggagaacctgcagaagaccctgtctgagaaggagacagaggccaggaacctgcaggagcagacagtgcagctgcagagcgagctgagccggctgcggcaggacctgcaggacaggaccacccaggaggagcagctgcggcagcagatcacagagaaggaggagaagaccaggaaggccatcgtggccgccaagagcaagatcgcccacctggccggcgtgaaggaccagctgaccaaggaaaatgaggagctgaagcagagaaatggagccctggaccagcagaaggatgagctggatgtgcgcatcacagccctgaagagccagtatgagggccgcatcagccggctggagcgggagctgcgggagcaccaggagcggcacctggagcagagagatgagccccaggagcccagcaacaaggtgcctgagcagcagaggcagatcaccctgaagaccaccccagccagcggggagcggggcatcgccagcaccagtgaccccccaacagccaacatcaagcccacccctgtggtgtccacccccagcaaggtgacagctgctgccatggccggcaacaagagcaccccccgggccagcatccggcccatggtgaccccagccaccgtgaccaaccccaccaccacccccacagccaccgtgatgcccaccacccaggtggagagccaggaggccatgcagagcgagggccctgtggagcacgtgcctgtgtttggcagcaccagcggctctgtgcgcagcaccagccccaacgtgcagcccagcatcagccagcccatcctgactgtgcagcagcagacccaggccacagcctttgtgcagcccacccagcagagccacccccagatcgagcccgccaaccaggagctgagcagcaacatcgtggaggtggtgcagagcagccctgtggagcggcccagcaccagcacagctgtgtttggcaccgtgtctgccacccccagcagcagcctgcccaagaggacccgggaggaggaggaggacagcaccatcgaggccagtgaccaggtgtctgatgacacagtggagatgcccctgcccaagaagctgaagtctgtgacccctgtgggcacagaggaggaggtgatggccgaggagagcacagatggagaggtggagacccaggtgtacaaccaggacagccaggacagcatcggggagggcgtgacccagggcgactacacccccatggaggacagcgaggagaccagccagagcctgcagattgacctgggccccctgcagagcgaccagcagaccaccaccagcagccaggacggccagggcaaaggagatgatgtgattgtcatcgacagtgatgatgaggaggaggatgatgatgaaaatgatggagaacatgaagattatgaagaagatgaggaggatgatgatgatgatgaagatgacaccggcatgggagatgaaggagaggacagcaatgaaggcaccggcagcgcagatggaaatgatggctatgaagcagatgatgctgagggcggagatggaacagaccccggcacagaaacagaggagagcatgggcggcggggagggcaaccacagagctgctgacagccagaacagcggggagggcaacacaggagctgctgagagcagcttcagccaggaggtgtcccgggagcagcagcccagcagcgccagcgagcggcaggccccccgggccccccagagccccaggaggcctccccaccccctgcccccccggctgaccatccacgccccaccccaggagctgggcccccctgtgcagaggatccagatgacccggcggcagagcgtgggccggggcctgcagctgaccccaggcattggaggcatgcagcagcacttctttgatgatgaggacagaacagtgcccagcacccccaccctggtggtgccccacaggacagatggctttgctgaggccatccacagcccccaggtggccggcgtgccccgcttccgcttcggccccccagaggacatgccccagaccagcagcagccacagcgacctgggccagctggccagccagggcggcctgggcatgtatgagacccccctcttcctggcccacgaggaggagagcggcggccgctctgtgcccaccacccccctgcaggtggccgcccctgtgacagtgttcacagagagcaccaccagtgatgccagcgagcacgccagccagagcgtgcccatggtgaccaccagcacaggcaccctgagcaccaccaatgaaacagccactggagatgatggagatgaggtgtttgtggaggccgagagcgagggcatcagcagcgaggccggcctggagattgacagccagcaggaggaggagcctgtgcaggccagtgatgaaagtgacctgcccagcaccagccaggacccccccagcagcagctctgtggacaccagcagcagccagcccaagcccttccggcgggtgcggctgcagaccaccctgcggcagggcgtgcggggccggcagttcaaccggcagaggggcgtgtcccatgccatgggcggccggggcggcatcaacagaggcaacatcaactag

SEQ ID NO: 137097 - DNA, 453 bp, Artificial Sequence
  derived and/or modified sequence
atgcccagcagcggcagcgtgagccggagccggcagcggggccggtcgatggcctcaaggggcttcgacggctccagacgcggcagcctgcgccgtgccggcgctagggagcctcccagcgaagtaatcgaggcagcggcacaggctagcggaagctgctggtccagcccttttttttctgctagcacaccctccgccgctgccacaggggtgccagggcccacagatatggcagcggtgttgcagcaggtgctagaaaggacagaactgaataagttacctaagtctgtgcagaataagctggaaaagttccttgctgatcagcagtctgaaattgatggtttgaaggggcgacacgaaaagtttaaggtggaatcggagcagcagtacttcgagattgagaagaggttgtcccactctcaagaacgtctggtcaatgaaacccgtgaatag

SEQ ID NO: 137098 - DNA, 7092 bp, Artificial Sequence
  derived and/or modified sequence
atggccgccgtgctgcagcaggtgctggagcggaccgagctgaacaaattgccgaagtcagtgcagaataagttggaaaagtttttggcggaccagcagtccgaaatcgacggcctgaaaggtcggcatgagaagttcaaggtagaaagcgagcagcagtacttcgagatcgagaagagactgagccattctcaggagcgtctcgttaatgagaccagggaatgccagagccttcgcctcgaactagaaaaactgaataatcagctgaaggcattgacagagaagaacaaggaacttgaaattgcgcaggatcgcaatatagccatccaatcacagttcactcgcacaaaggaagaacttgaagcagagaagcgggatttaatccggacgaacgaacggctgagccaggagctagaatatcttaccgaggacgttaaaaggctcaacgaaaagttaaaggaatccaatacgactaagggggagctgcagctaaaattggatgaactgcaggcttctgacgtgtctgtcaaatacagggaaaaacggctcgaacaggaaaaggagctgctgcacagtcagaacacttggcttaacacagaactcaaaacaaaaaccgacgaactcctggccctgggccgagagaaggggaatgagattctcgagttgaagtgtaaccttgagaacaagaaggaggaagtgtcaaggctggaagagcagatgaatggcttgaagaccagcaacgagcatctacagaaacatgtggaagacctcctgaccaaactcaaggaagcaaaagagcagcaggcctcaatggaggaaaaattccacaatgaattgaatgcacatattaaactgagcaatctctacaagtctgctgcagacgattcggaggctaagagcaacgagttaactcgggctgtcgaggaacttcataaactactaaaggaagccggtgaggccaacaaagcaatccaggatcatttactggaagtcgaacagtcaaaggatcaaatggagaaagagatgttggagaaaattggcaggctggaaaaagaattagagaacgccaatgatctgctgtctgccaccaagcggaagggagctatcctgagcgaagaagaactagcggcgatgtcccccacggcggctgccgtcgcgaagattgtgaagccaggcatgaagctgacagaactgtacaatgcctatgtcgaaacacaagaccagcttctgctggagaagctggagaataaaaggatcaacaagtaccttgacgaaattgttaaggaggttgaggccaaggcccctatactcaaacgtcagcgggaagagtacgaaagggcccaaaaagcagtggcctcgttgtccgtcaaattggagcaagccatgaaggaaatccagcgtctgcaggaggacacagataaggctaacaagcagtcatcagttctcgagcgggacaatagaaggatggagatccaggtgaaggacctctctcagcagattcgagtactgttaatggaactcgaagaggctcgcggaaatcatgtgattcgggacgaggaagtttccagcgcggacatctcttctagctccgaggttatttcacagcacctggtttcttaccgtaacatcgaggagctgcagcagcaaaatcagaggctacttgttgcgttgcgagagttaggggaaacacgcgagagggaggagcaagaaaccacttcctctaaaatcaccgagctgcagctgaagctggaaagcgccctgaccgaactggagcagctgagaaagtccagacagcaccagatgcagctagtcgacagcatcgtccgacagcgggacatgtaccgaatcctcttgtcccagacaactggagtcgctatccctctgcatgccagctccctggacgacgtaagtctggctagcacacccaagagacctagcacgtctcagacagtgagtacccctgcccccgtcccagtgattgagtccaccgaggccatcgaagctaaagccgccctcaaacagttacaagagatattcgagaattataaaaaagagaaggctgaaaatgagaagatccagaatgaacaattagaaaaactccaagagcaagtgacagacttacggagccagaatactaaaattagcacacagctggatttcgcaagcaagcggtatgagatgcttcaggacaatgttgaaggttatcgcagagaaataactagcctacacgaacgaaaccaaaagttaaccgccaccactcaaaagcaggagcaaatcattaacaccatgacccaggatctgcgtggcgcgaatgagaaattggccgttgctgaagtgcgggctgaaaatcttaaaaaagagaaagagatgctcaagctcagtgaagtacgactttctcaacagagggaatcattactcgctgagcagcgcggccagaatttgcttcttacaaaccttcaaacaattcaagggattttggagcggtcggaaacagagaccaagcagaggctctcgtcgcagattgagaagctggagcacgaaatctctcacctgaaaaagaaacttgagaacgaagttgaacagaggcataccctcactcggaatcttgacgtccagcttttggacacaaagcgacagctcgacactgagacaaaccttcatcttaatacaaaggagctgctgaagaatgctcaaaaagagatagccactctgaaacagcatctttcaaacatggaagttcaggttgccagccagtcttcacaaagaaccggtaaaggccagccctccaacaaagaggatgtcgatgacctcgtctctcagcttagacagaccgaggagcaggtgaacgacctgaaggagagactgaagactagcaccagcaacgtggaacagtatcaggctatggtgacttcgctggaagaaagtctgaacaaagagaagcaagtcacagaggaggtgaggaaaaatatcgaagttcgcctgaaggagagcgcggaatttcagactcagctggagaaaaagctaatggaagtggagaaggaaaaacaggaactgcaagatgacaagcgaagggcaatcgaaagcatggagcaacagttatccgaacttaagaaaactctctcttcggtgcagaatgaggtccaggaggcactccaaagggcatctacagcgctaagtaatgagcagcaggcacgccgtgactgccaagaacaggctaagatagcagtggaggcccagaacaaatatgaacgggaattaatgcttcatgctgctgatgttgaggcattgcaggcagcaaaggagcaggtgtccaaaatggcttctgtaagacaacacctggaagaaactactcagaaggcggagtctcaactgttggagtgtaaagcttcttgggaagagagggagcgtatgctaaaagatgaagttagcaagtgtgtttgtaggtgcgaggacttggaaaagcagaataggcttttacacgatcagatagagaagctctctgacaaggtggtggcatcagtgaaagaaggagtacaaggacccctcaacgtgtcattgtccgaggaaggcaaatcccaagaacagatcctggagattcttcggttcattaggagggaaaaggaaatagcagaaactaggttcgaagtcgcacaggtggaatccctgcgataccgacaacgggtggagcttctggagagggagctccaggagctgcaggattctcttaatgctgagcgcgaaaaggtacaggtgactgcgaagaccatggctcagcacgaggaactgatgaagaaaactgaaaccatgaacgtggtaatggaaactaacaagatgctgagagaagaaaaggagcgtctggaacaagatttgcagcagatgcaggcgaaagtgcgaaaactcgagttggacatattaccactgcaggaggccaatgccgagttgtctgagaaatcaggaatgctgcaggctgagaaaaaactgttggaagaggacgttaaaagatggaaggcgcgcaaccagcacctggtgtcacaacagaaagacccggataccgaagagtatcgaaaactcctcagcgaaaaagaggttcatacaaaacgaatccaacagctgactgaagagatcggcaggctgaaggcagagatcgcacggagcaacgcctctctcacaaacaaccaaaacctgatccaatcgctgaaagaagatctcaataaggtacggacagaaaaagaaactatccaaaaagatctggatgctaagattatcgacatccaggaaaaagtgaagacaatcacccaggttaagaaaatcgggcgacgttacaaaacccagtacgaagagcttaaggcccagcaggataaagtaatggagacgagtgcacagtcaagcggcgaccatcaagagcagcacgtctcagtgcaagagatgcaagagttgaaggagaccctgaatcaggctgaaactaaaagcaaatctctggagtcccaggtggagaaccttcagaaaactctctcagagaaggagactgaagccaggaacctacaagagcaaacggttcaattacaatccgagttatcaaggctccgccaggacctgcaggatcgcacgactcaggaggagcagctgaggcagcaaattacagagaaggaggagaagacacggaaagctatcgtggcagccaaatccaagattgcccacctggccggcgtcaaagatcaattaacgaaggagaatgaggagttaaagcagagaaacggtgccctggatcagcagaaggacgaattggacgtgcgtatcacggcattgaagtctcagtacgagggcaggattagccgactcgagcgggaactgcgggagcaccaggaacgtcatctggagcagcgggatgagccccaggagccgtccaacaaggtgcccgagcagcagagacagattactctgaaaaccacccccgccagcggggagagagggattgcatcaacgtctgatcctcccaccgccaatattaagcccaccccagtggtgtcaaccccttcaaaagtcacggctgcggccatggctggcaataagtcgacaccaagggccagcatacgtcctatggtgacgccagccaccgtgacaaaccccactaccaccccgaccgccaccgtgatgcccactactcaggttgaaagccaggaggcaatgcagtcggagggtcctgtggagcacgtgccagtgttcgggtcgacatcaggatcggtgaggtctacctcccccaacgtgcagcctagtatatctcaaccaatcctgactgttcagcagcaaacccaggccacagcctttgtgcagcccacacaacaatcacatccacagattgagccagccaatcaagagctgtcttccaacattgtggaagtagtccagtcatccccagtggagcgtcctagcacctccaccgctgtgttcggtacggtgagcgctacaccaagttccagcctgcccaagaggacgagggaggaggaggaggacagcaccattgaagccagcgaccaggtgtctgatgacacagtggagatgcccctgcctaagaaattgaaatccgtgacccccgtgggcacagaagaggaggtcatggctgaggaatcaactgacggcgaggttgaaacccaagtgtacaaccaggattctcaggattccatcggggaaggcgtcacccagggagattacacaccaatggaggactccgaagaaacaagccagtctctccagatagatcttggcccactgcaatctgatcagcagaccaccacgtcaagtcaggacgggcaggggaaaggggatgacgtaatcgtcattgattcggacgatgaagaggaggatgatgacgagaatgacggcgagcatgaggactacgaagaggatgaggaagacgacgatgatgatgaagatgatactggcatgggggacgagggcgaagactccaacgagggcactggttctgccgacgggaatgacggatacgaagccgatgatgctgagggaggcgatggtacagaccccggaacagagactgaagagtctatgggagggggggaaggtaatcatcgcgccgctgatagtcagaactcaggcgaaggaaataccggggctgccgaatcaagtttctctcaggaggtcagtcgcgaacaacagccatcatcagcaagcgaacggcaagccccacgggccccccaatccccaaggcgcccaccgcaccccctgccacctaggcttacaatacacgccccccctcaggagctcgggccacctgtccagcgtatccagatgacaagacgccagagcgtggggagaggactgcaattgacaccaggcatcgggggcatgcagcaacacttctttgacgacgaagatcgtacagtgcccagtacccctacgttggttgtcccacaccgaacagatggattcgccgaagccattcattcccctcaagtggcaggtgtgcctaggttcagattcggacctccagaagacatgccacagacctcgagttctcactcagaccttggtcaacttgcctcccaaggcggtttgggcatgtacgagacaccattatttcttgctcatgaagaggaatcaggtgggaggagcgtgcctaccacgccacttcaggttgcggcacccgttaccgtgttcacggagagtacaaccagcgacgcaagcgaacacgcttcccagagcgtgcccatggtaaccaccagcactggaaccctctccactacaaatgaaacagccaccggggacgatggagatgaggtctttgtagaagcggaatctgaaggcataagctcggaagccggtctggaaatcgattctcagcaagaggaggagccagtgcaggcgtctgacgaaagcgatcttccctcaacatctcaggatccaccgtcgtccagcagcgtggacacctctagctcccagccgaaaccgttcaggagggtgcgattgcagaccacacttaggcaaggggtgcggggccgccagttcaaccgccagcggggcgttagccacgcaatgggaggacgaggcggaatcaaccgcggaaatatcaactag

SEQ ID NO: 137099 - DNA, 453 bp, Artificial Sequence
  derived and/or modified sequence
atgcccagcagcggcagcgtgagccggagccggcagcggggccggtccatggcatctcgcggcttcgatggatccaggagggggagcctcaggcgagctggtgcccgagaacccccctcagaggttattgaagccgcagcacaagcgagcggttcatgctggtcttcacccttttttagcgcgtccaccccaagcgctgcggcaaccggcgtccctgggcctacggatatggcagcagtactgcagcaggtattggaaagaaccgaactaaacaaactcccaaaatctgtgcaaaataagctggaaaagttcctggccgatcagcaaagcgagattgacggtctcaaagggagacatgaaaagttcaaggtagagtctgagcagcaatactttgaaattgagaagcgactctctcactcccaagaacggctggtcaatgagactcgagagtag

SEQ ID NO: 137100 - DNA, 453 bp, Artificial Sequence
  derived and/or modified sequence
atgccttcatccggctctgtgtcaaggtcccggcagcgcggacggtctatggcaagcaggggcttcgatgggtccagacggggttcactccggcgtgccggagctagagaaccacccagtgaggttatcgaggccgcagcacaggcctccggtagctgttggtcctccccgtttttctctgcttctacgccgagtgcggctgccactggtgtgccaggaccgaccgatatggccgctgtgctccagcaggtgctagagaggacggaactgaacaagctgcctaaatccgtgcaaaataagctggagaagtttttggctgatcagcaaagcgagatcgacggactgaaaggcaggcacgaaaaattcaaagtagagtcagaacagcaatactttgaaatcgagaaacgactttcccactcacaagagcgcctcgtcaatgagaccagagaatag

SEQ ID NO: 137101 - DNA, 7091 bp, Artificial Sequence
  derived and/or modified sequence
atggcagcggtgctgcaacaggtactggagcggacagaactgaataagctccctaagtctgttcagaacaagctagagaagttcttggcagaccagcagtccgaaattgatggtcttaaagggagacacgagaaatttaaagtggaatcagagcagcaatacttcgaaatcgagaaacgactgtcccacagtcaggaacgcctggtaaacgaaacgcgtgagtgccagagcctgcgactggagctcgaaaagcttaacaaccagctaaaagccctcaccgaaaagaacaaggaactcgaaattgcgcaggatagaaatatagcaatccagtctcagttcacgaggacgaaggaggaattagaggccgaaaagagagacttaattcgcactaacgagagactgtcccaagagctagagtatctcactgaggacgtcaaacgcttaaatgagaaactcaaggagtcgaacacaactaagggggaactgcagctgaaactggatgagctgcaagcgtccgatgtcagtgtgaaatatcgcgagaagaggctcgagcaggaaaaagagctgctgcactctcaaaatacttggctcaataccgagctaaagactaagacggacgagctacttgccctgggacgggagaaaggaaacgaaatcctggaactcaagtgtaacctggaaaataagaaagaggaagtctccagactcgaggagcagatgaacggcctgaaaacgtccaacgaacatctccaaaagcacgtggaggatttactgaccaagttgaaagaggctaaggaacagcaggcctctatggaagagaagttccataacgagctgaacgcacacattaagctctcgaatctgtacaaaagcgcagccgatgacagcgaggccaaatccaatgagttaacaagggcagtggaggaactccacaaactgcttaaagaagctggtgaagcaaacaaggcaatacaggatcatctcctggaggtggaacagagtaaagaccaaatggaaaaagaaatgcttgaaaagattggaagattagagaaagaacttgagaatgccaacgacctgttgtcagccaccaagcgcaagggcgctatcttgtcagaggaagaattggccgcaatgagccctaccgctgccgcagtggccaagatcgtaaagcctggtatgaaacttacggaattatacaacgcatacgttgagacccaagaccagctcctgctcgagaagctggaaaataagcgcataaacaaatacttggacgagattgtaaaggaggtggaggctaaggctcccatcctgaaacgccagcgggaagaatacgagcgtgcacagaaagccgtggctagcctgtctgtaaaactggagcaggcaatgaaggagatacagagactgcaggaagataccgataaggctaataagcagagctccgtcttggaaagggacaatcgacggatggagatacaggtgaaagatctgtctcagcagatccgtgtactactgatggaactggaggaagccagaggtaaccacgttatccgcgacgaagaggttagttctgccgatattagttccagttccgaggtgatctcacaacatctggtttcttatcgtaatattgaggagctgcagcagcagaatcagaggctgctggttgccctgcgcgaattgggagagacccgcgaaagagaggagcaggaaacaacttcgagcaaaatcactgaactgcagttaaagctggagtcagcactgacagagctcgaacagttgaggaaatctagacagcaccagatgcagctggtcgacagtatcgtccgccaacgggacatgtatcgcatcctgctcagccagacaaccggtgtggccatccctctccacgccagttcgctggatgatgtctcactggcaagcacaccaaaacgcccatcaacatctcaaaccgtgagcactcctgctccagtgcctgtgatagaaagcactgaggccatcgaagctaaagccgcacttaaacagctacaggaaatctttgaaaattataagaaagagaaagctgagaacgagaagatccagaacgagcaactcgagaagctacaagaacaggtgaccgacctgcgatctcagaacaccaagatcagcacacagctagactttgctagcaagcgctacgagatgttgcaggataatgtagaaggttacaggagggaaattacatccctgcatgagcgaaatcaaaagctgaccgctacaacacagaagcaggagcagatcattaatactatgactcaagatctgcggggagccaatgagaagctggcggttgctgaagttagagctgagaacctgaagaaagaaaaggaaatgcttaagctgtcggaagtgagactgtcccaacaacgggaatcactgctagcagaacaacgcggtcagaacctgctcctaaccaatctccagaccatccaaggcatccttgagaggtcagaaaccgaaaccaagcagcggctgagcagccagattgagaagctcgaacatgagatttcacatctgaagaagaaactcgagaacgaggtggagcagcgccacacactcacaaggaatctggatgtccagctgttggacacaaagaggcagctggacaccgagaccaacctgcacctgaatactaaagagctgctaaagaacgcccagaaggaaatagctacactaaaacaacacctgtctaatatggaagtgcaggtggcatcccagagttcgcaaagaaccggaaagggacagcccagcaacaaggaagatgtcgatgacttagtgtctcagttacgccagacggaggaacaggtgaacgacctgaaagagcgcctgaagacctccacgtccaatgttgaacagtatcaagccatggttacctctctggaagagtccctgaataaggagaaacaggtgacggaggaagtgcgcaagaacattgaagtgaggcttaaagagtccgctgagtttcagacccagctggaaaagaagttaatggaggtcgaaaaggaaaagcaggagctgcaggacgataaacgcagggcaattgagtctatggagcagcaattatcagaactgaaaaagaccttatcctccgtgcagaacgaggttcaggaagccctgcaaagagcaagcaccgcgctgtctaacgaacagcaggctcgaagagactgtcaagagcaggcaaaaattgccgtggaagcgcagaacaagtacgaacgcgagcttatgctgcatgccgcagatgtggaggccctacaagcagcgaaagagcaggtctcaaaaatggcctctgtccgacaacacctggaagaaaccacccagaaagccgagagtcaacttctggaatgtaaggcctcctgggaagagagggagcgaatgctgaaggatgaggtctccaagtgcgtttgccgttgcgaggacctggagaaacagaaccggcttttgcacgaccagatagagaagctgtcggacaaggtggttgctagcgtgaaagagggggtgcagggcccactgaatgtcagtttaagcgaggagggcaagtcccaggaacagatactcgagatactgcggttcattcgtagagaaaaagagattgccgaaacccgctttgaagtggcacaggtcgagagcctgaggtaccggcaacgcgttgagttgctagagagggagcttcaagagctgcaggattcccttaatgcagaaagagagaaggtgcaggtcaccgcaaaaacaatggctcagcatgaggagcttatgaaaaagaccgagactatgaacgtggtaatggagactaacaaaatgttgcgggaggagaaggaacggctcgagcaggatctgcagcaaatgcaggcaaaagtgcggaagctggagctggatatcctccccctgcaggaggcaaacgccgagttgagcgagaagagtggcatgttacaagccgagaaaaagttattggaagaggacgtgaaacgttggaaggcaaggaaccaacacctcgtgtctcagcagaaggatcctgacaccgaagagtacaggaaactcctgtccgaaaaggaggtgcatacaaagaggatccagcagctgacagaagagatcgggagactcaaggcggagattgccaggagtaatgcctcactgacaaataatcagaatctaattcagtctttgaaggaggacctgaacaaagtccgcaccgaaaaggaaactatacaaaaggacctggacgccaaaattatcgatattcaggagaaagtaaagacaatcactcaagtgaaaaagattgggagaagatacaaaacccaatatgaggaactcaaagcacagcaggataaggtcatggaaaccagcgcgcagtcttctggagaccatcaagagcaacacgtgagtgtccaggagatgcaagagttaaaggaaaccctgaaccaagctgagacaaagagcaaatcattggagtcccaagttgaaaacctccaaaagaccctttctgaaaaagagacagaggccaggaatctacaggagcagaccgtgcagctgcagtccgaactcagcagactgcggcaagaccttcaggatagaaccacacaagaagaacagctgagacagcagattacagagaaagaagagaagactagaaaagctatagtggccgcaaaatccaaaatcgcccatctcgccggagtcaaggatcagttgactaaggaaaacgaagagctcaagcaacggaatggagccctggatcaacagaaggatgaactggacgtccgaattacagcactcaagtcccaatatgaagggaggataagcagattggagagagagttgcgtgaacaccaggagcgtcatctggaacaacgagatgaaccacaggaaccatctaacaaagtgcctgagcaacagagacagataaccctcaagacaaccccagccagtggtgaaaggggtatcgcttctacatccgaccccccaacggcaaacattaaacctacccccgttgtctccacccctagcaaggtgactgccgcagcaatggcaggaaacaagtccaccccgcgtgcttctatccggcctatggttacacctgcaacggtcaccaaccccaccaccaccccgacggcaacagtaatgcctactacgcaggtggaaagccaggaggcaatgcagtcggaggggcctgtggagcatgtgcccgtctttggatcaaccagcggatcagtgcggtccacatccccaaatgtgcagccatccatcagtcaaccaattctcaccgtgcagcagcagacccaggcaactgcatttgtgcaacccactcagcagtctcacccacaaatcgagcctgccaaccaagaactgagcagcaacatcgtggaagtggtgcagagcagccctgtggagcggccttctacctcgaccgctgtctttgggacagtatcagctacccctagctcctctctacccaagcgcacaagagaggaggaggaggactccacaatagaagcatctgatcaggtttcggatgacacagttgaaatgcccctgccaaagaaattgaaatctgttactcccgtaggaacagaggaggaagtcatggcagaggagtcaaccgacggagaagtagagactcaagtctacaaccaggacagccaggactctattggtgagggggtaacccagggcgactacacgcccatggaggactccgaggaaacctctcagagcctccaaattgatctgggtccccttcagagcgatcagcagaccactacctcctctcaggacgggcagggcaaaggggatgacgttatcgtgatagactcagacgatgaagaggaagatgacgacgagaacgatggagaacacgaagattacgaagaggacgaagaggacgatgacgacgatgaggacgatacagggatgggggacgagggagaagatagcaacgaagggacaggaagcgccgatggtaatgatggctatgaagctgatgacgctgagggtggcgatggtactgaccctggcacagagacagaggagtccatgggaggcggagagggcaatcatcgggctgccgacagtcagaatagcggtgaggggaatactggggctgctgagagtagcttttcccaggaggtatcccgtgaacagcagccaagcagcgccagcgagaggcaggccccacgcgctccccagagtcccaggcggcctccccacccgctcccacctagactcaccattcacgctccgccacaagaacttgggcctccagttcagagaatccaaatgacaagaagacagagtgtgggacgcggtctgcagttgacccccggaatcggtggaatgcaacagcactttttcgacgatgaggaccggaccgtgccaagcacccctaccttagttgtgccgcatagaaccgacggcttcgccgaggccatccacagcccacaggtcgctggcgtccctagatttcggttcgggcctcccgaggacatgccacagacctcatcctctcactctgacctgggccagctagcatcgcagggcggattagggatgtatgagactcccctcttcttggcccatgaagaggagtcgggtggacggagtgtacccacaactcccctgcaggtcgcggcaccggtcactgtttttactgagtccaccacctccgacgcctcagagcatgccagtcagtctgtgcccatggtcactacgagcaccgggaccctgtccactaccaatgagaccgccacaggcgatgacggtgatgaggtgttcgtcgaggccgagtctgagggaattagctccgaggctgggctggaaatcgacagtcagcaagaagaagagcctgttcaggccagtgatgaaagtgatcttcctagcacctctcaggacccaccgagttcatcatcggtcgatacgtcctcttcccagccaaagccattccgcagggtgcgacttcagactactctgagacagggtgtgcgtggccgtcagttcaatagacaacgcggagtttcacacgcaatgggtggtaggggcggaatcaataggggaaatatcaatta

SEQ ID NO: 137102 - DNA, 453 bp, Artificial Sequence
  derived and/or modified sequence
atgccttccagcggaagcgtttctaggagtagacagaggggccgatcaatggcgtcccgcggattcgacgggagccgccgagggagcttgcggcgagccggtgccagggaacccccaagcgaggttattgaggccgcagcccaagctagcgggagttgctggagtagcccttttttcagtgctagcaccccgtcagccgcagcaacaggcgttcctggcccaaccgatatggctgccgtcctgcagcaggtgttagagcgcactgagctcaacaagttgccaaaatctgttcagaataaactggagaagttcctggccgaccagcagagtgaaatcgacggcctgaaaggaagacacgagaagtttaaagttgagtcggagcagcaatatttcgaaatcgaaaaacggctctcccactctcaggaacggcttgtcaacgaaacccgagagtag

SEQ ID NO: 137103 - DNA, 2272 bp, Artificial Sequence
  derived and/or modified sequence
atgccctctagtggctcagtgtccagaagccgccaacgaggacgatccatggcatcccggggctttgacgggtcccgccgcgggagtctccggcgggcgggcgcgcgcgagccaccgagcgaggtgatagaggcggcggcccaggcgtctgggtcctgctggtcttcgcctttcttctccgcttctaccccgtcggccgctgccactggggtccctggccccaccgacatggcggcggtgttgcagcaagtcctggagcgcacggagctgaacaagctgcccaagtctgtccagaacaaacttgaaaagttccttgctgatcagcaatccgagatcgatggcctgaaggggcggcatgagaaatttaaggtggagagcgaacaacagtattttgaaatagaaaagaggttgtcccacagtcaggagagacttgtgaatgaaacccgagagtgtcaaagcttgcggcttgagctagagaaactcaacaatcaactgaaggcactaactgagaaaaacaaagaacttgaaattgctcaggatcgcaatattgccattcagagccaatttacaagaacaaaggaagaattagaagctgagaaaagagacttaattagaaccaatgagagactatctcaagaacttgaatacttaacagaggatgttaaacgtctgaatgaaaaacttaaagaaagcaatacaacaaagggtgaacttcagttaaaattggatgaacttcaagcttctgatgtttctgttaagtatcgagaaaaacgcttggagcaagaaaaggaattgctacatagtcagaatacatggctgaatacagagttgaaaaccaaaactgatgaacttctggctcttggaagagaaaaagggaatgagattctagagcttaaatgtaatcttgaaaataaaaaagaagaggtttctagactggaagaacaaatgaatggcttaaaaacatcaaatgaacatcttcaaaagcatgtggaggatctgttgaccaaattaaaagaggccaaggaacaacaggccagtatggaagagaaattccacaatgaattaaatgcccacataaaactttctaatttgtacaagagtgccgctgatgactcagaagcaaagagcaatgaactaacccgggcagtagaggaactacacaaacttttgaaagaagctggtgaagccaacaaagcaatacaagatcatcttctagaggtggagcaatccaaagatcaaatggaaaaagaaatgcttgagaaaatagggagattggagaaggaattagagaatgcaaatgaccttctttctgccacaaaacgtaaaggagccatattgtctgaagaagagcttgccgccatgtctcctactgcagcagctgtagctaagatagtgaaacctgggatgaaactaactgagctctataatgcttatgtggaaactcaggatcagttgcttttggagaaactagagaacaaaagaattaataagtacctagatgaaatagtgaaagaagtggaagccaaagcaccaattttgaaacgccagcgtgaggaatatgaacgtgcacagaaagctgtagcaagtttatctgttaagcttgaacaagctatgaaggagattcagcgattgcaggaggacactgataaagccaacaagcaatcatctgtacttgagagagataatcgaagaatggaaatacaagtaaaagatctttcacaacagattagagtgcttttgatggaacttgaagaagcaaggggtaaccacgtaattcgtgatgaggaagtaagctctgctgatataagtagttcatctgaggtaatatcacagcatctagtatcttacagaaatattgaagagcttcaacaacaaaatcaacgtctcttagtggcccttagagagcttggggaaaccagagaaagagaagaacaagaaacaacttcatccaaaatcactgagcttcagctcaaacttgagagtgcccttactgaactagaacaactccgcaaatcacgacagcatcaaatgcagcttgttgattccatagttcgtcagcgtgatatgtaccgtattttattgtcacaaacaacaggagttgccattccattacatgcttcaagcttagatgatgtttctcttgcatcaactccaaaacgtccaagtacatcacagactgtttccactcctgctccagtacctgttattgaatcaacagaggctatagaggctaaggctgcccttaaacagttgcaggaaatttttgagaact

SEQ ID NO: 137104 - DNA, 7538 bp, Artificial Sequence
  derived and/or modified sequence
gcgcaagaggatcagggatagcctctgagctcgggttcccagggttcgtagcttccaacggctgcgcgcgcacttcggtcgcgggcggtgaggtgctgttgctgaaacgctgccgctgagggtggactcgatttcccagggtcccgccgcgggagtctccggcgggcgggcgcgcgcgagccaccgagcgaggtgatagaggcggcggcccaggcgtctgggtcctgctggtcttcgcctttcttctccgcttctaccccgtcggccgctgccactggggtccctggccccaccgacatggcggcggtgttgcagcaagtcctggagcgcacggagctgaacaagctgcccaagtctgtccagaacaaacttgaaaagttccttgctgatcagcaatccgagatcgatggcctgaaggggcggcatgagaaatttaaggtggagagcgaacaacagtattttgaaatagaaaagaggttgtcccacagtcaggagagacttgtgaatgaaacccgagagtgtcaaagcttgcggcttgagctagagaaactcaacaatcaactgaaggcactaactgagaaaaacaaagaacttgaaattgctcaggatcgcaatattgccattcagagccaatttacaagaacaaaggaagaattagaagctgagaaaagagacttaattagaaccaatgagagactatctcaagaacttgaatacttaacagaggatgttaaacgtctgaatgaaaaacttaaagaaagcaatacaacaaagggtgaacttcagttaaaattggatgaacttcaagcttctgatgtttctgttaagtatcgagaaaaacgcttggagcaagaaaaggaattgctacatagtcagaatacatggctgaatacagagttgaaaaccaaaactgatgaacttctggctcttggaagagaaaaagggaatgagattctagagcttaaatgtaatcttgaaaataaaaaagaagaggtttctagactggaagaacaaatgaatggcttaaaaacatcaaatgaacatcttcaaaagcatgtggaggatctgttgaccaaattaaaagaggccaaggaacaacaggccagtatggaagagaaattccacaatgaattaaatgcccacataaaactttctaatttgtacaagagtgccgctgatgactcagaagcaaagagcaatgaactaacccgggcagtagaggaactacacaaacttttgaaagaagctggtgaagccaacaaagcaatacaagatcatcttctagaggtggagcaatccaaagatcaaatggaaaaagaaatgcttgagaaaatagggagattggagaaggaattagagaatgcaaatgaccttctttctgccacaaaacgtaaaggagccatattgtctgaagaagagcttgccgccatgtctcctactgcagcagctgtagctaagatagtgaaacctgggatgaaactaactgagctctataatgcttatgtggaaactcaggatcagttgcttttggagaaactagagaacaaaagaattaataagtacctagatgaaatagtgaaagaagtggaagccaaagcaccaattttgaaacgccagcgtgaggaatatgaacgtgcacagaaagctgtagcaagtttatctgttaagcttgaacaagctatgaaggagattcagcgattgcaggaggacactgataaagccaacaagcaatcatctgtacttgagagagataatcgaagaatggaaatacaagtaaaagatctttcacaacagattagagtgcttttgatggaacttgaagaagcaaggggtaaccacgtaattcgtgatgaggaagtaagctctgctgatataagtagttcatctgaggtaatatcacagcatctagtatcttacagaaatattgaagagcttcaacaacaaaatcaacgtctcttagtggcccttagagagcttggggaaaccagagaaagagaagaacaagaaacaacttcatccaaaatcactgagcttcagctcaaacttgagagtgcccttactgaactagaacaactccgcaaatcacgacagcatcaaatgcagcttgttgattccatagttcgtcagcgtgatatgtaccgtattttattgtcacaaacaacaggagttgccattccattacatgcttcaagcttagatgatgtttctcttgcatcaactccaaaacgtccaagtacatcacagactgtttccactcctgctccagtacctgttattgaatcaacagaggctatagaggctaaggctgcccttaaacagttgcaggaaatttttgagaactacaaaaaagaaaaagcagaaaatgaaaaaatacaaaatgagcagcttgagaaacttcaagaacaagttacagatttgcgatcacaaaataccaaaatttctacccagctagattttgcttctaaacgttatgaaatgctgcaagataatgttgaaggatatcgtcgagaaataacatcacttcatgagagaaatcagaaactcactgccacaactcaaaagcaagaacagattatcaatacgatgactcaagatttgagaggagcaaatgagaagctagctgtcgcagaagtaagagcagaaaatttgaagaaggaaaaggaaatgcttaaattgtctgaagttcgtctttctcagcaaagagagtctttgttagctgaacaaagggggcaaaacttactgctaactaatctgcaaacaattcagggaatactggagcgatctgaaacagaaaccaaacaaaggcttagtagccagatagaaaaactggaacatgagatctctcatctaaagaagaagttggaaaatgaggtggaacaaaggcatacacttactagaaatctagatgttcaacttttagatacaaagagacaactggatacagagacaaatcttcatcttaacacaaaagaactattaaaaaatgctcaaaaagaaattgccacattgaaacagcacctcagtaatatggaagtccaagttgcttctcagtcttcacagagaactggtaaaggtcagcctagcaacaaagaagatgtggatgatcttgtgagtcagctaagacagacagaagagcaggtgaatgacttaaaggagagactcaaaacaagtacgagcaatgtggaacaatatcaagcaatggttactagtttagaagaatccctgaacaaggaaaaacaggtgacagaagaagtgcgtaagaatattgaagttcgtttaaaagagtcagctgaatttcagacacagttggaaaagaagttgatggaagtagagaaggaaaaacaagaacttcaggatgataaaagaagagccatagagagcatggaacaacagttatctgaattgaagaaaacactttctagtgttcagaatgaagtacaagaagctcttcagagagcaagcacagctttaagtaatgagcagcaagccagacgtgactgtcaggaacaagctaaaatagctgtggaagctcagaataagtatgagagagaattgatgctgcatgctgctgatgttgaagctctacaagctgcgaaggagcaggtttcaaaaatggcatcagtccgtcagcatttggaagaaacaacacagaaagcagaatcacagttgttggagtgtaaagcatcttgggaggaaagagagagaatgttaaaggatgaagtttccaaatgtgtatgtcgctgtgaagatctggagaaacaaaacagattacttcatgatcagatcgaaaaattaagtgacaaggtcgttgcctctgtgaaggaaggtgtacaaggtccactgaatgtatctctcagtgaagaaggaaaatctcaagaacaaattttggaaattctcagatttatacgacgagaaaaagaaattgctgaaactaggtttgaggtggctcaggttgagagtctgcgttatcgacaaagggttgaacttttagaaagagagctgcaggaactgcaagatagtctaaatgctgaaagggagaaagtccaggtaactgcaaaaacaatggctcagcatgaagaactgatgaagaaaactgaaacaatgaatgtagttatggagaccaataaaatgctaagagaagagaaggagagactagaacaggatctacagcaaatgcaagcaaaggtgaggaaactggagttagatattttacccttacaagaagcaaatgctgagctgagtgagaaaagcggtatgttgcaggcagagaagaagctcttagaagaggatgtcaaacgttggaaagcacgtaaccagcatctagtaagtcaacagaaagatccagatacagaagaatatcggaagctcctttctgaaaaggaagttcatactaagcgtattcaacaattgacagaagaaattggtagacttaaagctgaaattgcaagatcaaatgcatctttgactaacaaccagaacttaattcagagtctgaaggaagatctaaataaagtaagaactgaaaaggaaaccatccagaaggacttagatgccaaaataattgatatccaagaaaaagtcaaaactattactcaagttaagaaaattggacgtaggtacaagactcaatatgaagaacttaaagcacaacaggataaggttatggagacatcggctcagtcctctggagaccatcaggagcagcatgtttcagtccaggaaatgcaggaactcaaagaaacgctcaaccaagctgaaacaaaatcaaaatcacttgaaagtcaagtagagaatctgcagaagacattatctgaaaaagagacagaagcaagaaatctccaggaacagactgtgcaacttcagtctgaactttcacgacttcgtcaggatcttcaagatagaaccacacaggaggagcagctccgacaacagataactgaaaaggaagaaaaaaccagaaaggctattgtagcagcaaagtcaaaaattgcacacttagctggtgtaaaagatcagctaactaaagaaaatgaggagcttaaacaaaggaatggagccttagatcagcagaaagatgaattggatgttcgcattactgcgctaaagtcccaatatgaaggtcgaattagtcgcttggaaagagaactcagggagcatcaagagagacaccttgagcagagagatgagcctcaagaaccttctaataaggtccctgaacagcagagacagatcacattgaaaacaactccagcttctggtgaaagaggaattgccagcacatcagacccaccaacagccaatatcaagccaactcctgttgtgtctactccaagtaaagtgacagctgcagctatggctggaaataagtcaacacccagggctagtatccgcccaatggttacacctgcaactgttacaaatcccactactaccccaacagctacagtgatgcccactacacaagtggaatcacaggaagctatgcagtcagaagggcctgtggaacatgttccagtttttggaagcacaagtggatccgttcgttctactagtcctaatgtccagccttctatctctcaacctattttaactgttcagcaacaaacacaggctacagcttttgtgcaacccactcaacagagtcatcctcagattgagcctgccaatcaagagttatcttcaaacatagtagaggttgttcagagttcaccagttgagcggccttctacttccacagcagtatttggcacagtttcggctacccccagttcttctttgccaaagcgtacacgtgaagaggaagaggatagcaccatagaagcatcagaccaagtctctgatgatacagtggaaatgcctcttccaaagaagttgaaaagtgtcacacctgtaggaactgaggaagaagttatggcagaagaaagtactgatggagaggtagagactcaggtatacaaccaggattctcaagattccattggagaaggagttacccagggagattatacacctatggaagacagtgaagaaacctctcagtctctacaaatagatcttgggccacttcaatcagatcagcagacgacaacttcatcccaggatggtcaaggcaaaggagatgatgtcattgtaattgacagtgatgatgaagaagaggatgatgatgaaaatgatggagaacatgaggattatgaagaggatgaggaagatgatgatgatgatgaagatgacacagggatgggagatgagggtgaagatagtaatgaaggaactggtagtgccgatggcaatgatggttatgaagctgatgatgctgagggtggtgatgggactgatccaggtacagaaacagaagaaagtatgggtggaggtgaaggtaatcacagagctgctgattctcaaaacagtggtgaaggaaatacaggtgctgcagaatcttctttttctcaggaggtttctagagaacaacagccatcatcagcatctgaaagacaggcccctcgagcacctcagtcaccgagacgcccaccacatccacttcccccaagactgaccattcatgccccacctcaggagttgggaccaccagttcagagaattcagatgacccgaaggcagtctgtaggacgtggccttcagttgactccaggaataggtggcatgcaacagcatttttttgatgatgaagacagaacagttccaagtactccaactcttgtggtgccacatcgtactgatggatttgctgaagcaattcattcgccgcaggttgctggtgtccctagattccggtttgggccacctgaagatatgccacaaacaagttctagtcactctgatcttggccagcttgcttctcaaggaggtttaggaatgtatgaaacacccctgttcctagctcatgaagaagagtcaggtggccgaagtgttcccactactccactacaagtagcagccccagtgactgtatttactgagagcaccacctctgatgcttcggaacatgcctctcaatctgttccaatggtgactacatccactggcactttatctacaacaaatgaaacagcaacaggtgatgatggagatgaagtatttgtggaggcagaatctgaaggtattagttcagaagcaggcctagaaattgatagccagcaggaagaagagccggttcaagcatctgatgagtcagatctcccctccaccagccaggatcctccttctagctcatctgtagatactagtagtagtcaaccaaagcctttcagacgagtaagacttcagacaacattgagacaaggtgtccgtggtcgtcagtttaacagacagagaggtgtgagccatgcaatgggagggagaggaggaataaacagaggaaatattaattaaatggtctgtaaacaataacaactgtgaataagattatcaaatctgttttagtgtaatgattgtcaagtttaaaaacatttttatatataaactggtatactcatgtcaatattctttattaataaaatgtttttcagtgtcaaaattta

SEQ ID NO: 137105 - DNA, 515 bp, Artificial Sequence
  derived and/or modified sequence
ccttctgggcgccatagagagcgtggcggtatcccggagcctgccgtccggccctaccgggaccgatgccctctagtggctcagtgtccagaagccgccaacgaggacgatccatggcatcccggggctttgacgggtcccgccgcgggagtctccggcgggcgggcgcgcgcgagccaccgagcgaggtgatagaggcggcggcccaggcgtctgggtcctgctggtcttcgcctttcttctccgcttctaccccgtcggccgctgccactggggtccctggccccaccgacatggcggcggtgttgcagcaagtcctggagcgcacggagctgaacaagctgcccaagtctgtccagaacaaacttgaaaagttccttgctgatcagcaatccgagatcgatggcctgaaggggcggcatgagaaatttaaggtggagagcgaacaacagtattttgaaatagaaaagaggttgtcccacagtcaggagagacttgtgaatgaaacccgagag

SEQ ID NO: 137106 - protein, 247 aa, Artificial Sequence
  derived and/or modified sequence
GIVGGHNAPPGKWPWQVSLRVYSYHWASWAHICGGSLIHPQWVLTAAHCIFWKDTDPSIYRIHAGDVYLYGGRGLLNVSRIIVHPNYVTAGLGADVALLQLEPHDLSNVRTVKLSPVSLELTPKDQCWVTGWGAIRMKESLPPPYRLQQASVQVLENAVCEQPYRNASGHTGDRQLILDDMLCAGSEGRDSCYGDSGGPLVCRLRGSWRLVGVVSWGYGCTLRDFPGVYTHVQIYVLWILQQVGELP

SEQ ID NO: 137107 - protein, 275 aa, Artificial Sequence
  derived and/or modified sequence
MLNLLLLALPVLASRAYAAPAPGQALQRVGIVGGQEAPRSKWPWQVSLRVHGPYWMHFCGGSLIHPQWVLTAAHCVGPDVKDLAALRVQLREQHLYYQDQLLPVSRIIVHPQFYTAQIGADIALLELEEPVNVSSHVHTVTLPPASETFPPGMPCWVTGWGDVDNDERLPPPFPLKQVKVPIMENHICDAKYHLGAYTGDDVRIVRDDMLCAGNTRRDSCQGDSGGPLVCKVNGTWLQAGVVSWGEGCAQPNRPGIYTRVTYYLDWIHHYVPKKP

SEQ ID NO: 137108 - protein, 282 aa, Artificial Sequence
  derived and/or modified sequence
MLLLAPQMLNLLLLALPVLASRAYAAPAPGQALQRVGIVGGQEAPRSKWPWQVSLRVHGPYWMHFCGGSLIHPQWVLTAAHCVGPDVKDLAALRVQLREQHLYYQDQLLPVSRIIVHPQFYTAQIGADIALLELEEPVNVSSHVHTVTLPPASETFPPGMPCWVTGWGDVDNDERLPPPFPLKQVKVPIMENHICDAKYHLGAYTGDDVRIVRDDMLCAGNTRRDSCQGDSGGPLVCKVNGTWLQAGVVSWGEGCAQPNRPGIYTRVTYYLDWIHHYVPKKP

SEQ ID NO: 137109 - DNA, 744 bp, Artificial Sequence
  derived and/or modified sequence
ggcatcgtgggcggccacaacgccccccccggcaagtggccctggcaggtgagcctgagagtgtacagctaccactgggccagctgggcccacatctgcggcggcagcctgatccacccccagtgggtgctgaccgccgcccactgcatcttctggaaggacaccgaccccagcatctacagaatccacgccggcgacgtgtacctgtacggcggcagaggcctgctgaacgtgagcagaatcatcgtgcaccccaactacgtgaccgccggcctgggcgccgacgtggccctgctgcagctggagccccacgacctgagcaacgtgagaaccgtgaagctgagccccgtgagcctggagctgacccccaaggaccagtgctgggtgaccggctggggcgccatcagaatgaaggagagcctgccccccccctacagactgcagcaggccagcgtgcaggtgctggagaacgccgtgtgcgagcagccctacagaaacgccagcggccacaccggcgacagacagctgatcctggacgacatgctgtgcgccggcagcgagggcagagacagctgctacggcgacagcggcggccccctggtgtgcagactgagaggcagctggagactggtgggcgtggtgagctggggctacggctgcaccctgagagacttccccggcgtgtacacccacgtgcagatctacgtgctgtggatcctgcagcaggtgggcgagctgccctag

SEQ ID NO: 137110 - DNA, 744 bp, Artificial Sequence
  derived and/or modified sequence
ggcatcgtgggagggcataatgcccccccaggcaagtggccatggcaagtgagcctcagagtttattcatatcactgggcctcctgggctcacatttgcggaggctccctcatccatcctcagtgggtcctgaccgccgcgcactgtattttttggaaggatacagaccctagtatatatcggatccatgcgggggatgtttacttgtatggtggccgagggctgttgaacgtgtctcgcattattgttcatcccaactacgttactgccggcttaggagccgacgtggctcttctccagcttgaaccacacgacctcagcaacgttagaacagtaaagctgtcgccagtgtcattggaattgactcctaaggaccagtgttgggtcaccgggtggggcgccattaggatgaaagagtctcttcctcctccctaccgactccagcaggcgtctgtgcaggtactggagaatgctgtgtgcgaacagccgtaccgaaacgcaagcggacacacaggggatcgacagctgatcctggacgacatgctatgtgctgggagtgaaggaagggacagctgttatggggacagcgggggtcccttggtgtgcaggctgaggggaagctggagactggtgggagtggtcagctggggctacggatgcactctgcgagactttccaggtgtgtatacacacgtgcagatttatgtcctttggatactgcagcaggtgggcgagttgccctag

SEQ ID NO: 137111 - DNA, 744 bp, Artificial Sequence
  derived and/or modified sequence
ggcatcgtgggcggccacaatgcccctcctgggaagtggccctggcaggtgtccctgcgggtgtacagctaccactgggcctcctgggcccacatctgtggcggcagcctcatccacccccagtgggtgctgacagctgcccactgcatcttctggaaggacacagaccccagcatctaccgcatccacgccggagatgtgtacctgtatggaggccggggcctgctgaatgtgagccgcatcatcgtgcaccccaactacgtgacagctggcctgggcgcagatgtggccctgctgcagctggagccccatgacctgagcaatgtgaggacagtgaagctgagccctgtgtccctggagctgacccccaaggaccagtgctgggtgacaggctggggcgccatccgcatgaaggagagcctgcccccaccctaccgcctgcagcaggcctctgtgcaggtgctggagaatgctgtgtgtgagcagccctacagaaatgccagcggccacactggagaccggcagctgatcctggatgacatgctgtgtgccggcagcgagggccgggacagctgctatggagacagcggcggccccctggtgtgccgcctgcggggctcctggaggctggtgggcgtggtgtcctggggctacggctgcaccctgcgggacttccctggggtgtacacccacgtgcagatctacgtgctgtggatcctgcagcaggtgggggagctgccctag

SEQ ID NO: 137112 - DNA, 744 bp, Artificial Sequence
  derived and/or modified sequence
ggcatcgtgggcggccacaacgccccccccggcaagtggccctggcaggtatctctcagagtatactcttaccattgggccagctgggcccatatatgcgggggatccctgattcatccccagtgggtcctaactgctgcacactgcatattctggaaagataccgatccctctatctaccgcatccatgctggcgacgtctacttgtacggtggccgggggcttctcaatgttagcaggatcattgtacatccaaattacgtgacagccgggctgggtgccgatgtcgccttactgcagctggagcctcatgacctgtctaacgtccggacggtcaagctgtctccagtctccctcgaactgacccccaaggaccaatgttgggtgacggggtggggggccattcgcatgaaggagtcactgccgcccccctaccggctccagcaagcgtccgtgcaggtcctcgaaaatgccgtttgtgagcagccataccggaatgcctctgggcacactggagacagacagttaatactcgacgacatgctgtgtgccgggtcagaggggagggactcctgctacggcgactcaggtggtccactggtatgcaggctgagggggtcctggcgcttggtaggagtcgtctcatggggctacgggtgcaccctccgggatttcccgggcgtctacacccatgtgcaaatttacgtgctgtggatactgcaacaggttggggagctcccttag

SEQ ID NO: 137113 - DNA, 744 bp, Artificial Sequence
  derived and/or modified sequence
ggtatagtgggcggacacaacgcccctccgggaaagtggccgtggcaagtgtctttgagagtctattcttatcattgggcttcatgggcacacatttgtggtgggagtttaattcacccacagtgggtgctgacagctgctcactgtattttctggaaagacactgacccaagcatttatcgaattcacgctggcgacgtatacctctacggcggtagaggtctattgaacgtctccagaatcatcgtgcaccctaactacgtgactgccggtctgggcgctgacgtcgccctgctgcagctggaaccccacgatctaagtaacgtaagaacagtgaagctgagtcccgttagtttggagctgacacccaaggaccaatgttgggtcacaggctggggtgcaattagaatgaaggagtccctacccccaccatataggttacagcaggctagtgtccaagttctggagaacgcggtctgtgagcagccataccgaaatgcgagcggacatacaggggaccggcagctcattctggatgatatgctgtgcgcgggaagcgaaggcagggacagttgctacggagactccgggggtccacttgtttgcagacttcggggaagctggcgtctggtgggagttgtgtcttggggatacggttgcaccctgagggacttcccaggcgtgtatacgcacgtgcagatctacgtactttggatccttcagcaggttggcgagctgccctag

SEQ ID NO: 137114 - DNA, 1090 bp, Artificial Sequence
  derived and/or modified sequence
ggcattgtggggggccacaatgcccccccggggaagtggccgtggcaggtcagcctgagggtctacagctaccactgggcctcctgggcgcacatctgtgggggctccctcatccacccccagtgggtgctgactgctgcccactgcattttctggaaggacaccgacccgtccatctaccggatccacgctggggacgtgtatctctacgggggccgggggctgctgaacgtcagccggatcatcgtccaccccaactatgtcactgcggggctgggtgcggatgtggccctgctccagctggagccccatgatctgagcaatgtcaggacggtcaagctctccccggtctcgctggagctcaccccgaaggaccagtgctgggtgactggctggggagcgatcaggatgaaagagtcgctgccgccgccctaccgcctgcagcaggcgagtgtgcaggtgctggagaacgccgtctgtgagcagccctaccgcaacgcctcagggcacactggcgaccggcagctcatcctggatgacatgctgtgtgccggcagcgagggccgagactcctgctacggtgactccggcggccctctggtctgcaggctgcgggggtcctggcgcctggtgggggtggtcagctggggctacggctgtaccctgcgggactttcccggcgtctacacccacgtccagatctacgtgctctggatcctgcagcaagtcggggagttgccctgagcaggctgggctgggctcccacctgggtcggctgaggagggaccaggaccttcctcctcccagcgatctccgcttcggcctccgctgcaggccaccgtcttgagcccggcttctctggctcctcagcgcccaggacctccctgatgccggggtggggaaggggccggggaagggagggtgggggcctcgctgcgtctctgtctgattaaagagcaagagcagagtgtgtggcgtctctgtgggatggatttgcattccaagctgcagccaggtgcggtttgctcagccacctcctgttggaggcctccacattttggctatggtaataaagatgctgagaacattc

SEQ ID NO: 137115 - DNA, 828 bp, Artificial Sequence
  derived and/or modified sequence
atgctgaacctgctgctgctggccctgcccgtgctggccagcagagcctacgccgcccccgcccccggccaggccctgcagagagtgggcatcgtgggcggccaggaggcccccagaagcaagtggccctggcaggtgagcctgagagtgcacggcccctactggatgcacttctgcggcggcagcctgatccacccccagtgggtgctgaccgccgcccactgcgtgggccccgacgtgaaggacctggccgccctgagagtgcagctgagagagcagcacctgtactaccaggaccagctgctgcccgtgagcagaatcatcgtgcacccccagttctacaccgcccagatcggcgccgacatcgccctgctggagctggaggagcccgtgaacgtgagcagccacgtgcacaccgtgaccctgccccccgccagcgagaccttcccccccggcatgccctgctgggtgaccggctggggcgacgtggacaacgacgagagactgcccccccccttccccctgaagcaggtgaaggtgcccatcatggagaaccacatctgcgacgccaagtaccacctgggcgcctacaccggcgacgacgtgagaatcgtgagagacgacatgctgtgcgccggcaacaccagaagagacagctgccagggcgacagcggcggccccctggtgtgcaaggtgaacggcacctggctgcaggccggcgtggtgagctggggcgagggctgcgcccagcccaacagacccggcatctacaccagagtgacctactacctggactggatccaccactacgtgcccaagaagccctag

SEQ ID NO: 137116 - DNA, 849 bp, Artificial Sequence
  derived and/or modified sequence
atgctgctgctggccccccagatgctgaacctgctgctgctggccctgcccgtgctggccagcagagcctacgccgcccccgcccccggccaggccctgcagagagtgggcatcgtgggcggccaggaggcccccagaagcaagtggccctggcaggtgagcctgagagtgcacggcccctactggatgcacttctgcggcggcagcctgatccacccccagtgggtgctgaccgccgcccactgcgtgggccccgacgtgaaggacctggccgccctgagagtgcagctgagagagcagcacctgtactaccaggaccagctgctgcccgtgagcagaatcatcgtgcacccccagttctacaccgcccagatcggcgccgacatcgccctgctggagctggaggagcccgtgaacgtgagcagccacgtgcacaccgtgaccctgccccccgccagcgagaccttcccccccggcatgccctgctgggtgaccggctggggcgacgtggacaacgacgagagactgcccccccccttccccctgaagcaggtgaaggtgcccatcatggagaaccacatctgcgacgccaagtaccacctgggcgcctacaccggcgacgacgtgagaatcgtgagagacgacatgctgtgcgccggcaacaccagaagagacagctgccagggcgacagcggcggccccctggtgtgcaaggtgaacggcacctggctgcaggccggcgtggtgagctggggcgagggctgcgcccagcccaacagacccggcatctacaccagagtgacctactacctggactggatccaccactacgtgcccaagaagccctag

SEQ ID NO: 137117 - DNA, 828 bp, Artificial Sequence
  derived and/or modified sequence
atgctgaatctgctactactggctctgcctgtgctggcatcaagggcatatgcggcccctgcccccggccaggctctgcagagagtgggcatagttggcggccaggaagcaccaaggtccaagtggccttggcaagtcagcttgagagttcacggtccatattggatgcacttctgcgggggatctttgatccatccgcagtgggtgctcacagctgcccattgcgtgggaccggatgtgaaggatctagcagctttacgcgtgcagctccgcgaacagcacctttattaccaggatcagttactgccggtcagccggataatcgttcaccctcagttttacaccgcccaaataggcgcagatatcgccctcctcgagctggaggaacctgtcaatgtttcaagccatgttcatacagtgacattaccgccggcctcggaaacatttccaccaggcatgccttgttgggtcacaggctggggcgatgttgacaacgatgaaaggctaccaccacctttccctctgaagcaggtgaaggttccaatcatggaaaaccacatctgcgatgctaagtaccatctgggtgcatatactggggatgacgtgaggattgtgcgagatgacatgctctgtgcaggtaatacccgcagggattcctgtcagggggatagtggcggtccgttggtttgcaaggtcaatgggacttggctgcaggccggggtcgtgagctggggcgagggctgcgcgcagccaaatcgacccgggatctatacccgggtgacgtactatctggattggattcaccactacgtgccaaaaaaaccatag

SEQ ID NO: 137118 - DNA, 849 bp, Artificial Sequence
  derived and/or modified sequence
atgcttcttctcgcaccccagatgctgaacttactgctgctggcccttccagttcttgcatcccgcgcgtacgctgccccggcacctggccaggccctgcaacgtgtcgggattgtgggtggccaggaggctccacgaagcaaatggccttggcaagtgtccttgcgggtgcacgggccttactggatgcatttctgcggggggtccttgatccacccacagtgggtcctcactgcagcacactgtgtgggcccagacgtcaaagatctcgccgcgctgagggtgcagcttcgcgagcaacacctgtactaccaggatcagcttctgccagtatcccggataatcgtgcacccacagttttacaccgctcagatcggcgctgacattgcgctgctggagctggaggagcctgtgaacgtcagttcccacgtccacacagttacactgcctcccgctagtgagacgtttcccccaggaatgccctgctgggtgacagggtggggagacgtggataacgacgagcggcttccccctcccttccctttaaaacaggttaaagtgccaataatggagaaccatatttgtgacgcaaagtaccacctgggtgcctatactggtgacgatgtccggatagtgcgagacgacatgctgtgtgctggcaatacgcgcagggactcttgtcagggcgactctggcgggcctttagtgtgcaaggtgaacggaacctggcttcaggcaggggtcgtctcttggggggagggctgtgctcaacccaataggcctgggatctatacacgcgtcacatattacctcgactggattcatcattatgtaccaaaaaagccctag

SEQ ID NO: 137119 - DNA, 828 bp, Artificial Sequence
  derived and/or modified sequence
atgctgaacctgctgctgctggccctgcctgtgctggccagccgggcctatgctgccccagcccctggccaggccctgcagagggtgggcatcgtgggcggccaggaggcccccaggagcaagtggccctggcaggtgtccctgcgggtgcacggcccctactggatgcacttctgtggcggcagcctcatccacccccagtgggtgctgacagctgcccactgtgtgggcccagatgtgaaggacctggccgccctgcgggtgcagctgcgggagcagcacctgtactaccaggaccagctgctgcctgtgagccgcatcatcgtgcacccccagttctacacagcccagatcggggctgacatcgccctgctggagctggaggagcctgtgaatgtgagcagccacgtgcacacagtgaccctgcccccagccagcgagaccttccccccaggcatgccctgctgggtgacaggctggggagatgtggacaatgatgagcggctgcccccacccttccccctgaagcaggtgaaggtgcccatcatggagaaccacatctgtgatgccaagtaccacctgggcgcctacacaggagatgatgtgcgcatcgtgagagatgacatgctgtgtgccggcaacacccggcgggacagctgccagggcgacagcggcggccccctggtgtgcaaggtgaatggcacctggctgcaggccggcgtggtgtcctggggcgagggctgtgcccagcccaaccggcccggcatctacaccagggtgacctactacctggactggatccaccactacgtgcccaagaagccctag

SEQ ID NO: 137120 - DNA, 849 bp, Artificial Sequence
  derived and/or modified sequence
atgctgctgctggccccccagatgctgaacctgctgctgctggccctgcctgtgctggccagccgggcctatgctgccccagcccctggccaggccctgcagagggtgggcatcgtgggcggccaggaggcccccaggagcaagtggccctggcaggtgtccctgcgggtgcacggcccctactggatgcacttctgtggcggcagcctcatccacccccagtgggtgctgacagctgcccactgtgtgggcccagatgtgaaggacctggccgccctgcgggtgcagctgcgggagcagcacctgtactaccaggaccagctgctgcctgtgagccgcatcatcgtgcacccccagttctacacagcccagattggagctgacatcgccctgctggagctggaggagcctgtgaatgtgagcagccacgtgcacacagtgaccctgcccccagccagcgagaccttccccccaggcatgccctgctgggtgacaggctggggagatgtggacaatgatgagcggctgcccccacccttccccctgaagcaggtgaaggtgcccatcatggagaaccacatctgtgatgccaagtaccacctgggcgcctacacaggagatgatgtgagaattgtgagagatgacatgctgtgtgccggcaacacccggcgggacagctgccagggcgacagcggcggccccctggtgtgcaaggtgaatggcacctggctgcaggccggcgtggtgtcctggggcgagggctgtgcccagcccaacagacctggcatctacaccagggtgacctactacctggactggatccaccactacgtgcccaagaagccctag

SEQ ID NO: 137121 - DNA, 828 bp, Artificial Sequence
  derived and/or modified sequence
atgctgaacctgctgctgctggccctgcccgtgctggccagccgggcttatgccgcgccagcaccaggacaagcgctccagagagtcggaattgtcggtggccaggaagcaccaagaagcaaatggccttggcaggtctccctcagagtgcacgggccatattggatgcatttttgtggtggtagcctgattcatccgcagtgggtgctcaccgccgcgcactgcgtgggacctgacgtgaaggatctcgcagccctccgagtacaactgcgcgagcagcacctatactatcaggaccagctgctgcccgtgtctagaataatcgtgcacccccaattttatacagcccagatcggcgccgatatcgccttgttagagcttgaggaacccgttaatgtaagctcacacgttcatacagtgacactgccccctgcgagtgagactttcccaccagggatgccatgctgggtgactgggtggggagatgtggacaatgacgaacgcctgcctcctccttttcctcttaagcaggtcaaggttcctatcatggagaatcatatctgtgatgctaaataccatctgggcgcttacactggcgacgacgtcaggatcgtccgagatgacatgctttgtgccgggaacacaagacgcgattcatgccagggagactcggggggacctctcgtatgtaaggtaaacggaacttggcttcaggccggcgtcgtgtcctggggtgagggctgtgcacagccaaacagaccaggaatatatacaagggtcacctactatctggattggatacaccattatgtgcctaagaaaccctag

SEQ ID NO: 137122 - DNA, 849 bp, Artificial Sequence
  derived and/or modified sequence
atgctgctgctggccccccagatgctgaacctgctgctgctggccttgcccgtgctggcctctcgcgcatacgccgctccagcacccggccaagctctgcagagggtaggcattgtcgggggccaagaggccccacggagcaaatggccatggcaagtttctttgagagtgcatggaccatactggatgcatttctgtggtgggtcattgattcacccccagtgggtcctaacagccgcacactgcgtgggcccggacgtgaaagacctcgccgctctgagggtgcagctgcgcgagcagcacttgtattaccaggatcagttgctgccagtgtctcggatcattgtgcacccacagttctatactgctcagatcggagctgacattgctctcttggagttggaagagccggtgaacgtctcgtctcatgtccatacggtaaccctgcccccggcatcagaaacttttcctccagggatgccctgctgggtcacaggatggggagacgtggataatgatgaacgccttccaccgccctttccattgaaacaggtaaaggtacccataatggagaaccatatctgcgatgcaaagtaccacctgggcgcatacaccggtgacgatgtaaggattgtgcgggacgacatgttatgcgctgggaacacacgaagagactcatgtcagggggatagtgggggtcccctggtgtgtaaggtgaacgggacatggctgcaggccggagttgtatcttggggagaaggatgcgcacaaccaaatcgcccagggatctacaccagagtaacctattatctcgattggattcatcattatgtgcccaaaaagccctag

SEQ ID NO: 137123 - DNA, 828 bp, Artificial Sequence
  derived and/or modified sequence
atgttaaatcttctgcttctcgcgttaccagtcctcgctagtcgcgcttatgccgctcccgctcctggccaagccctgcagcgggtgggaattgttgggggtcaggaggcgccacgatccaaatggccttggcaggtcagtctgcgagtgcatggcccatattggatgcacttttgcggcggatcgctgattcatccccagtgggtgctcactgcagcacactgcgttggccctgacgttaaggatttggctgccctgcgcgtgcaacttcgggagcagcatctgtactatcaggatcagctgcttccagtctctagaattattgtccatcctcagttctacacggcacagattggtgctgacattgccctgctcgaactggaggaacctgtcaacgtgtcctcccatgtgcacactgtcaccctgcccccagcgagcgagaccttccctcctgggatgccttgctgggtcacagggtggggtgacgttgacaatgatgaaaggttgccccctccctttcctttaaagcaagtgaaagtgcctattatggaaaaccatatctgcgacgcgaaataccatctgggcgcttatacaggggatgatgtccgaatagtacgcgacgacatgctctgcgcaggaaataccagacgcgattcttgccagggcgattcgggcggaccgctggtgtgcaaagtaaatggtacctggctgcaggctggcgttgtgagctggggcgaggggtgcgctcagcctaaccgcccaggcatctacactagagtcacgtactatttggattggatccaccattatgtgccgaagaaaccttag

SEQ ID NO: 137124 - DNA, 849 bp, Artificial Sequence
  derived and/or modified sequence
atgttgctcttggcccctcagatgctcaacctcctgctgttagcactgcccgtactggccagtagagcgtacgctgctcctgccccagggcaagcccttcagcgggttgggatcgtgggtggtcaggaagccccaaggtcaaagtggccatggcaggtgtctttgagggtgcatgggccatattggatgcacttttgcggtggctcactgatccacccccaatgggtattgaccgctgcgcactgtgtcggaccggatgtgaaggacctggcagctctgcgggtgcagttgcgcgagcaacacttgtactaccaggatcagctcctgccagtctctcgcattatcgtgcatcctcagttctacaccgctcagataggcgctgacattgccctgcttgaactggaagagcccgtaaacgtgtcatcgcacgtccacaccgtgactctgccccctgctagcgagactttcccccctggtatgccctgttgggtgacagggtggggggacgttgacaatgatgagcgcctcccacctccgtttcctcttaagcaggtcaaagttccaataatggagaatcatatatgcgatgcaaagtaccatcttggcgcttatactggcgatgacgtaagaattgtcagagacgatatgctgtgcgcaggaaatacacgcagggattcttgccagggtgattccgggggacccctggtatgcaaggtaaatggcacatggctgcaagctggagtggtctcctggggggagggttgcgcccagccaaacaggccaggcatctatacacgcgtaacatactacctcgactggattcatcactacgtgccaaaaaaaccatag

SEQ ID NO: 137125 - DNA, 828 bp, Artificial Sequence
  derived and/or modified sequence
atgttgaacctccttcttctggccctgcccgttctcgcttcccgcgcgtatgctgcaccagcgccaggacaagcattgcaaagagtagggatcgtgggcggtcaggaagcgccccgatcgaagtggccttggcaggttagtttgagagttcacggtccatactggatgcatttctgcggcgggagtttgatacatccccaatgggtgctgactgccgcacactgtgttggtccagacgttaaagacctggccgctctccgggtgcagttgcgggagcagcacctgtactatcaggaccaactgctgcccgtcagccgtattatagtacatccacagttttacaccgctcagattggcgcagacattgctcttctggaattggaagaacccgttaatgtatcaagccacgtccataccgtaactcttcctcccgcttccgaaacctttcccccaggcatgccatgctgggtaacagggtggggggatgttgataatgatgaaaggctcccacccccatttcccctcaagcaggtgaaggttcccataatggaaaaccacatatgtgatgccaagtaccacctgggcgcatacaccggcgatgatgttcgcatcgttcgggatgacatgttatgcgcgggcaatacaaggagagattcttgccaaggagacagtggtggccctctagtgtgtaaggtcaacgggacttggctgcaagcgggcgtcgtgtcatggggagaagggtgcgcccagcccaacaggcctggcatttacaccagggttacatactatctcgactggatccatcattacgtgccaaagaagccatag

SEQ ID NO: 137126 - DNA, 849 bp, Artificial Sequence
  derived and/or modified sequence
atgctgctccttgctcctcagatgttaaacctcctcctcctcgccctgcccgtattagcgtctcgtgcgtatgccgcgcccgctcccggacaggcacttcagagggtcggaattgtgggcggccaagaagcaccccgatccaaatggccttggcaggtttcactgcgggtgcacggcccatactggatgcatttttgcggtggctccctgattcatccccagtgggtcttgacagcggcgcactgtgtaggtcccgatgttaaagacctggctgccctaagggtacagcttcgcgagcagcatctttactaccaggaccaactgctccccgtctcacgtatcatcgtccatccccagttctacaccgcacaaatcggggccgatatcgccctactagaattggaagaaccagttaatgttagttcccatgttcatactgtcaccctgccaccagccagtgagacttttcctcctgggatgccgtgctgggtcactggctggggagatgtggataacgacgagaggctgcccccgccattccccctgaagcaagtgaaagtcccaatcatggagaatcacatttgcgacgctaagtatcacctgggggcttacaccggtgatgatgtgcgcattgtgcgagatgatatgctctgcgccgggaacacaagacgggacagttgccagggcgattcgggtggcccactagtctgcaaggttaatggcacttggctgcaagccggcgtggtttcttggggcgagggctgcgcccaacccaaccgccctggtatttacactagagttacgtattacctagactggatccaccactatgtgcccaagaagccctag

SEQ ID NO: 137127 - DNA, 828 bp, Artificial Sequence
  derived and/or modified sequence
atgctcaaccttctgttactagctttaccggttcttgcctcccgcgcctatgctgcgccagctcccggacaagccttacagagggtagggattgtggggggacaagaagccccaaggagtaaatggccctggcaggtatcattgcgcgtgcacggtccttactggatgcacttttgtggcggttctttgattcatccccaatgggtgcttacagccgcccactgcgtagggccggacgtgaaagacctggctgccttgagggttcaattaagggagcagcatctgtattaccaggaccagctgctgcccgtcagccgtattatagtacatccacagttttacaccgctcagattggcgcagacattgctcttctggaattggaagaacccgttaatgtatcaagccacgtccataccgtaactcttcctcccgcttccgaaacctttcccccaggcatgccatgctgggtaacagggtggggggatgttgataatgatgaaaggctcccacccccatttcccctcaagcaggtgaaggttcccataatggaaaaccacatatgtgatgccaagtaccacctgggcgcatacaccggcgatgacgtgagaatcgtgcgcgacgacatgctatgtgccggcaacacgcgacgtgattcctgccagggtgatagcggaggcccactagtgtgcaaagttaacggcacttggctgcaagccggagtggtgtcatggggcgaagggtgcgcacagcctaacagaccgggcatttatacaagagtcacatactatctagactggatccatcattatgtgcctaagaagccgtag

SEQ ID NO: 137128 - DNA, 849 bp, Artificial Sequence
  derived and/or modified sequence
atgctgctcctcgccccccagatgctgaacctgctccttctggcattacccgtgcttgcctctcgcgcgtatgccgcacccgcccccggacaggctctccagcgcgtcggaatagtgggtggtcaagaggccccacgatctaagtggccttggcaggtgtcgttgcgagtccacggcccttattggatgcacttttgtggaggatccctcatccatccccaatgggtactgacagcagcccattgtgtgggccctgatgtaaaagatctggccgccctgagggtacagcttcgagaacagcacctatactatcaggaccagttacttccagtgagccgcattatcgttcatcctcaattctatactgcacagatcggcgccgatatcgccctccttgagttagaagagccagtgaatgtcagctcccacgttcatacagttactttgccccccgccagcgaaacctttccgcccggaatgccctgttgggtcactggatggggggatgtagacaacgacgaacgtctcccaccccctttccctctgaagcaggtaaaagtccctattatggaaaaccatatctgtgacgcaaagtatcatttgggtgcctataccggtgacgatgtgcggatcgtgcgcgatgacatgctgtgtgcaggaaatacgagacgggattcttgccagggggactcagggggtccacttgtctgcaaggtcaatgggacttggctccaggccggcgtggtgagctggggggagggctgtgctcaacctaacagacctggaatctacactagagtgacatattatcttgattggattcaccattacgttcccaagaagccttag

SEQ ID NO: 137129 - DNA, 1175 bp, Artificial Sequence
  derived and/or modified sequence
cccactgggtagaaggaacagggagcggccaggatgctgaatctgctgctgctggcgctgcccgtcctggcgagccgcgcctacgcggcccctgccccaggccaggccctgcagcgagtgggcatcgtcgggggtcaggaggcccccaggagcaagtggccctggcaggtgagcctgagagtccacggcccatactggatgcacttctgcgggggctccctcatccacccccagtgggtgctgaccgcagcgcactgcgtgggaccggacgtcaaggatctggccgccctcagggtgcaactgcgggagcagcacctctactaccaggaccagctgctgccggtcagcaggatcatcgtgcacccacagttctacaccgcccagatcggagcggacatcgccctgctggagctggaggagccggtgaacgtctccagccacgtccacacggtcaccctgccccctgcctcagagaccttccccccggggatgccgtgctgggtcactggctggggcgatgtggacaatgatgagcgcctcccaccgccatttcctctgaagcaggtgaaggtccccataatggaaaaccacatttgtgacgcaaaataccaccttggcgcctacacgggagacgacgtccgcatcgtccgtgacgacatgctgtgtgccgggaacacccggagggactcatgccagggcgactccggagggcccctggtgtgcaaggtgaatggcacctggctgcaggcgggcgtggtcagctggggcgagggctgtgcccagcccaaccggcctggcatctacacccgtgtcacctactacttggactggatccaccactatgtccccaaaaagccgtgagtcaggcctgggttggccacctgggtcactggaggaccaacccctgctgtccaaaacaccactgcttcctacccaggtggcgactgccccccacaccttccctgccccgtcctgagtgccccttcctgtcctaagccccctgctctcttctgagccccttcccctgtcctgaggacccttccctatcctgagcccccttccctgtcctaagcctgacgcctgcaccgggccctccagccctcccctgcccagatagctggtggtgggcgctaatcctcctgagtgctggacctcattaaagtgcatggaaatca

SEQ ID NO: 137130 - DNA, 1353 bp, Artificial Sequence
  derived and/or modified sequence
ggtaagtccccactctcagagaccctgacatcagcgtcacctggagcagagtggcccagcctcagactcagagcaccaagacccaggcccgcaggcctggacccaccccggtccccccgtcccagctccattcttcaccccacaatctgtagcccccagccctgccctgtgaggcccggccaggcccacgatgctcctccttgctccccagatgctgaatctgctgctgctggcgctgcccgtcctggcgagccgcgcctacgcggcccctgccccaggccaggccctgcagcgagtgggcatcgtcgggggtcaggaggcccccaggagcaagtggccctggcaggtgagcctgagagtccacggcccatactggatgcacttctgcgggggctccctcatccacccccagtgggtgctgaccgcagcgcactgcgtgggaccggacgtcaaggatctggccgccctcagggtgcaactgcgggagcagcacctctactaccaggaccagctgctgccggtcagcaggatcatcgtgcacccacagttctacaccgcccagatcggagcggacatcgccctgctggagctggaggagccggtgaacgtctccagccacgtccacacggtcaccctgccccctgcctcagagaccttccccccggggatgccgtgctgggtcactggctggggcgatgtggacaatgatgagcgcctcccaccgccatttcctctgaagcaggtgaaggtccccataatggaaaaccacatttgtgacgcaaaataccaccttggcgcctacacgggagacgacgtccgcatcgtccgtgacgacatgctgtgtgccgggaacacccggagggactcatgccagggcgactccggagggcccctggtgtgcaaggtgaatggcacctggctgcaggcgggcgtggtcagctggggcgagggctgtgcccagcccaaccggcctggcatctacacccgtgtcacctactacttggactggatccaccactatgtccccaaaaagccgtgagtcaggcctgggttggccacctgggtcactggaggaccaacccctgctgtccaaaacaccactgcttcctacccaggtggcgactgccccccacaccttccctgccccgtcctgagtgccccttcctgtcctaagccccctgctctcttctgagccccttcccctgtcctgaggacccttccctatcctgagcccccttccctgtcctaagcctgacgcctgcaccgggccctccagccctcccctgcccagatagctggtggtgggcgctaatcctcctgagtgctggacctcattaaagtgcatggaaatca

SEQ ID NO: 137131 - protein, 188 aa, Artificial Sequence
  derived and/or modified sequence
MIIYRDLISHDEMFSDIYKIREIADGLCLEVEGKMVSRTEGNIDDSLIGGNASAEGPEGEGTESTVITGVDIVMNHHLQETSFTKEAYKKYIKDYMKSIKGKLEEQRPERVKPFMTGAAEQIKHILANFKNYQFFIGENMNPDGMVALLDYREDGVTPYMIFFKDGLEMEKCVSTRKWVKINNVKKTF

SEQ ID NO: 137132 - protein, 138 aa, Artificial Sequence
  derived and/or modified sequence
MVSRTEGNIDDSLIGGNASAEGPEGEGTESTVITGVDIVMNHHLQETSFTKEAYKKYIKDYMKSIKGKLEEQRPERVKPFMTGAAEQIKHILANFKNYQFFIGENMNPDGMVALLDYREDGVTPYMIFFKDGLEMEKC

SEQ ID NO: 137133 - protein, 160 aa, Artificial Sequence
  derived and/or modified sequence
MFSDIYKIREIADGLCLEVEGKMVSRTEGNIDDSLIGGNASAEGPEGEGTESTVITGVDIVMNHHLQETSFTKEAYKKYIKDYMKSIKGKLEEQRPERVKPFMTGAAEQIKHILANFKNYQFFIGENMNPDGMVALLDYREDGVTPYMIFFKDGLEMEKC

SEQ ID NO: 137134 - protein, 172 aa, Artificial Sequence
  derived and/or modified sequence
MIIYRDLISHDEMFSDIYKIREIADGLCLEVEGKMVSRTEGNIDDSLIGGNASAEGPEGEGTESTVITGVDIVMNHHLQETSFTKEAYKKYIKDYMKSIKGKLEEQRPERVKPFMTGAAEQIKHILANFKNYQFFIGENMNPDGMVALLDYREDGVTPYMIFFKDGLEMEKC

SEQ ID NO: 137135 - DNA, 567 bp, Artificial Sequence
  derived and/or modified sequence
atgatcatctacagagacctgatcagccacgacgagatgttcagcgacatctacaagatcagagagatcgccgacggcctgtgcctggaggtggagggcaagatggtgagcagaaccgagggcaacatcgacgacagcctgatcggcggcaacgccagcgccgagggccccgagggcgagggcaccgagagcaccgtgatcaccggcgtggacatcgtgatgaaccaccacctgcaggagaccagcttcaccaaggaggcctacaagaagtacatcaaggactacatgaagagcatcaagggcaagctggaggagcagagacccgagagagtgaagcccttcatgaccggcgccgccgagcagatcaagcacatcctggccaacttcaagaactaccagttcttcatcggcgagaacatgaaccccgacggcatggtggccctgctggactacagagaggacggcgtgaccccctacatgatcttcttcaaggacggcctggagatggagaagtgcgtgagcaccagaaagtgggtgaagatcaacaacgtgaagaagaccttctag

SEQ ID NO: 137136 - DNA, 483 bp, Artificial Sequence
  derived and/or modified sequence
atgttcagcgacatctacaagatcagagagatcgccgacggcctgtgcctggaggtggagggcaagatggtgagcagaaccgagggcaacatcgacgacagcctgatcggcggcaacgccagcgccgagggccccgagggcgagggcaccgagagcaccgtgatcaccggcgtggacatcgtgatgaaccaccacctgcaggagaccagcttcaccaaggaggcctacaagaagtacatcaaggactacatgaagagcatcaagggcaagctggaggagcagagacccgagagagtgaagcccttcatgaccggcgccgccgagcagatcaagcacatcctggccaacttcaagaactaccagttcttcatcggcgagaacatgaaccccgacggcatggtggccctgctggactacagagaggacggcgtgaccccctacatgatcttcttcaaggacggcctggagatggagaagtgctag

SEQ ID NO: 137137 - DNA, 519 bp, Artificial Sequence
  derived and/or modified sequence
atgatcatctacagagacctgatcagccacgacgagatgttcagcgacatctacaagatcagagagatcgccgacggcctgtgcctggaggtggagggcaagatggtgagcagaaccgagggcaacatcgacgacagcctgatcggcggcaacgccagcgccgagggccccgagggcgagggcaccgagagcaccgtgatcaccggcgtggacatcgtgatgaaccaccacctgcaggagaccagcttcaccaaggaggcctacaagaagtacatcaaggactacatgaagagcatcaagggcaagctggaggagcagagacccgagagagtgaagcccttcatgaccggcgccgccgagcagatcaagcacatcctggccaacttcaagaactaccagttcttcatcggcgagaacatgaaccccgacggcatggtggccctgctggactacagagaggacggcgtgaccccctacatgatcttcttcaaggacggcctggagatggagaagtgctag

SEQ ID NO: 137138 - DNA, 567 bp, Artificial Sequence
  derived and/or modified sequence
atgatcatttatagggatcttatctcccatgatgagatgttttccgacatttataaaatccgcgagatcgctgatggactctgtctcgaggtagaaggaaaaatggttagtcgcaccgagggcaatattgatgattcgctgatcggaggcaatgcatctgcagagggcccagagggagagggcacagaatcgacagtgataaccggagtggatatcgtgatgaaccaccatttgcaggaaacatcgtttacgaaagaagcttacaagaaatacataaaggactatatgaaaagcatcaaaggcaaactggaagagcaaaggcctgagcgggtcaaaccgtttatgaccggcgccgccgagcagatcaaacacattctggctaacttcaaaaattatcaattctttatcggtgaaaacatgaaccccgatgggatggtggccttgcttgactaccgcgaagacggcgttactccgtacatgattttctttaaagacggactggagatggaaaaatgcgtgagcacccgcaaatgggtcaagattaacaacgtgaagaaaacattttag

SEQ ID NO: 137139 - DNA, 483 bp, Artificial Sequence
  derived and/or modified sequence
atgttctcggacatttacaagatccgtgaaatagctgacgggctgtgtctcgaagtggaggggaaaatggtgagtagaacagaggggaatatcgacgactctttgatcggaggtaatgccagcgcagaaggcccagagggagaagggaccgagagcaccgtgattaccggggtggacatcgtgatgaaccaccacttacaagaaactagttttactaaggaagcatacaagaaatacatcaaagactacatgaaaagtattaagggcaagttggaggagcagcggcccgaacgggtaaagccgtttatgactggtgcggccgagcaaatcaaacatatcctggcgaacttcaagaattaccagttcttcatcggtgaaaacatgaatcctgatgggatggtggccctgctggattatcgggaggacggcgtgaccccttacatgatatttttcaaagatggcctcgagatggagaaatgttag

SEQ ID NO: 137140 - DNA, 519 bp, Artificial Sequence
  derived and/or modified sequence
atgatcatctatcgcgacttaatatcccatgatgagatgttttccgatatttataagatccgtgaaatcgccgacggcctatgcctcgaggtggagggcaaaatggtcagtcgcaccgaaggcaacatcgacgacagcctgatcggcggcaacgccagcgccgaaggtcctgagggggaaggcactgaatccacagtgataaccggggtcgatatcgtgatgaatcaccatctccaggagacctcctttacaaaggaggcctacaaaaaatatatcaaggactatatgaaaagtatcaagggaaagctcgaggagcaacgacctgagagggtgaaaccgttcatgaccggtgccgctgagcagattaagcatattttggcaaactttaaaaactaccaattctttatcggggaaaatatgaatccggatggaatggtggccctgcttgattacagggaagatggggtgacgccttacatgatcttctttaaggacggactcgaaatggagaagtgctag

SEQ ID NO: 137141 - DNA, 567 bp, Artificial Sequence
  derived and/or modified sequence
atgatcatctacagagacctgatcagccatgatgagatgttcagtgacatctacaagatccgggagattgctgatggcctgtgcctggaggtggagggcaagatggtgtccaggacagagggcaacattgatgacagcctcatcggcggcaatgccagcgctgagggccctgagggggagggcacagagagcaccgtcatcaccggggtggacatcgtgatgaaccaccacctgcaggagaccagcttcaccaaggaggcctacaagaagtacatcaaggactacatgaagagcatcaagggcaagctggaggagcagaggcctgagcgggtgaagcccttcatgaccggggctgctgagcagatcaagcacatcctggccaacttcaagaactaccagttcttcatcggggagaacatgaacccagatggcatggtggccctgctggactacagagaagatggagtgaccccctacatgatcttcttcaaggatggcctggagatggagaagtgtgtgtccaccaggaagtgggtgaagatcaacaacgtgaagaagaccttctag

SEQ ID NO: 137142 - DNA, 483 bp, Artificial Sequence
  derived and/or modified sequence
atgttcagtgacatctacaagatccgggagattgctgatggcctgtgcctggaggtggagggcaagatggtgtccaggacagagggcaacattgatgacagcctcatcggcggcaatgccagcgctgagggccctgagggggagggcacagagagcaccgtcatcaccggggtggacatcgtgatgaaccaccacctgcaggagaccagcttcaccaaggaggcctacaagaagtacatcaaggactacatgaagagcatcaagggcaagctggaggagcagaggcctgagcgggtgaagcccttcatgaccggggctgctgagcagatcaagcacatcctggccaacttcaagaactaccagttcttcatcggggagaacatgaacccagatggcatggtggccctgctggactacagagaagatggagtgaccccctacatgatcttcttcaaggatggcctggagatggagaagtgctag

SEQ ID NO: 137143 - DNA, 519 bp, Artificial Sequence
  derived and/or modified sequence
atgatcatctacagagacctgatcagccatgatgagatgttcagtgacatctacaagatccgggagattgctgatggcctgtgcctggaggtggagggcaagatggtgtccaggacagagggcaacattgatgacagcctcatcggcggcaatgccagcgctgagggccctgagggggagggcacagagagcaccgtcatcaccggggtggacatcgtgatgaaccaccacctgcaggagaccagcttcaccaaggaggcctacaagaagtacatcaaggactacatgaagagcatcaagggcaagctggaggagcagaggcctgagcgggtgaagcccttcatgaccggggctgctgagcagatcaagcacatcctggccaacttcaagaactaccagttcttcatcggggagaacatgaacccagatggcatggtggccctgctggactacagagaagatggagtgaccccctacatgatcttcttcaaggatggcctggagatggagaagtgctag

SEQ ID NO: 137144 - DNA, 567 bp, Artificial Sequence
  derived and/or modified sequence
atgatcatctaccgggacctgatcagccacgacgagatgttcagcgatatttacaagatcagagaaatcgcagatggcttgtgccttgaggtggaaggaaagatggtcagtaggacggaaggcaatattgacgactcattgattggggggaatgcatctgccgagggccccgagggggaaggcaccgagtcaacagtgattacgggggtggacattgttatgaatcaccacttacaagagaccagctttacaaaagaggcatataagaagtatatcaaggattacatgaagtccatcaagggaaagctcgaagagcaaagaccagaaagggtaaagccatttatgacaggcgcggccgagcaaatcaaacatatactcgccaacttcaaaaactatcagttctttatcggagagaacatgaaccccgacggcatggtggccctgttggattatcgcgaggacggcgttacaccatacatgatattcttcaaggacggtctggagatggagaagtgtgtctccactcgtaaatgggtaaagattaataatgtgaaaaagaccttctag

SEQ ID NO: 137145 - DNA, 483 bp, Artificial Sequence
  derived and/or modified sequence
atgttcagcgacatctacaagatccgggagatcgccgacggcctgtgcttagaagtggagggtaagatggtgtccaggactgagggaaatattgacgactcgttgataggggggaatgcttccgccgaaggaccggagggggaagggacagaatctacagtcatcaccggcgttgacatcgttatgaatcaccaccttcaggaaacatcttttactaaggaggcctacaaaaagtatatcaaagactacatgaaatcaattaaggggaagttagaggagcaacggcccgaacgtgtcaaaccatttatgactggggctgcggagcagatcaaacatattcttgccaacttcaagaattaccagttcttcatcggcgagaacatgaacccagatggcatggttgcactgctcgactatcgcgaagatggagtgactccctacatgatcttcttcaaagatggactggagatggaaaagtgttag

SEQ ID NO: 137146 - DNA, 519 bp, Artificial Sequence
  derived and/or modified sequence
atgatcatctaccgggacctgatcagccacgacgagatgttcagcgatatttacaagatcagggagattgccgacggcctgtgcctggaggtggaaggcaagatggtgagccgaactgaagggaatattgatgacagcttgattggaggcaacgcctccgcagagggaccggaaggcgaggggaccgagagtaccgtcatcacaggagttgacattgtgatgaaccaccacttacaggagacctcctttacaaaggaagcttataaaaaatacattaaggactatatgaagtcaatcaaaggaaaactggaggagcaacgaccagaaagggttaagccttttatgactggcgccgctgagcagatcaaacacattttagccaattttaagaactaccagttctttattggggagaacatgaaccccgacggcatggtggctctgttggattatagggaggatggcgtgaccccatatatgatttttttcaaagatggactggagatggaaaaatgttag

SEQ ID NO: 137147 - DNA, 567 bp, Artificial Sequence
  derived and/or modified sequence
atgatcatctatcgcgacctgattagccacgatgagatgtttagcgatatctacaaaatacgagagattgctgacggcctgtgcctggaggtggagggaaaaatggtcagccgcaccgagggaaatatcgacgactcactgattggcggtaatgctagcgccgaggggcctgaaggtgagggaaccgagtccacagtgatcaccggggtagatatcgttatgaatcaccatctgcaagaaacttcgttcactaaagaggcgtataaaaaatatatcaaagattatatgaagagtattaaaggcaagctggaagagcaacggcctgaacgcgtgaaaccctttatgacgggcgctgcagagcagatcaagcacatcctggcaaatttcaaaaactaccagttctttatcggggaaaacatgaaccctgatgggatggtggccctcctggattaccgcgaagatggcgtgacaccatacatgattttcttcaaggacggccttgagatggagaagtgcgtcagcacgcgcaagtgggtgaaaattaacaatgtaaaaaagactttctag

SEQ ID NO: 137148 - DNA, 483 bp, Artificial Sequence
  derived and/or modified sequence
atgttctcagatatttataagattcgggaaattgccgatggcctatgcctggaggtggaagggaagatggtttccaggacagagggtaacatcgacgatagtctcataggagggaacgcctctgcagagggccctgaaggcgaagggaccgagtctactgtgatcactggggtggatatcgtcatgaatcaccatctgcaggagacaagtttcaccaaggaggcctacaaaaaatatatcaaggattatatgaagtccattaaggggaagcttgaggagcaacgacccgaaagggtgaagccattcatgaccggtgcggctgaacagatcaagcacatactcgccaattttaagaactaccagttttttatcggcgagaatatgaaccccgacggcatggttgccctgctggattaccgcgaggatggtgtcaccccgtatatgattttctttaaggacggccttgagatggagaagtgctag

SEQ ID NO: 137149 - DNA, 519 bp, Artificial Sequence
  derived and/or modified sequence
atgataatttaccgtgatcttatctctcacgacgaaatgttttcagatatttataaaatccgcgaaattgctgacgggttatgcctcgaggttgaaggcaagatggtttcaagaactgaaggcaacattgacgactctctgattggtggaaacgccagcgctgaggggccagagggtgaaggaactgaatctacagtgattactggggtagatatcgttatgaaccaccacctgcaggagacgtcttttacgaaagaagcctataagaaatacatcaaggactatatgaagtccatcaaaggaaagctggaagagcagcgtcctgaaagggtcaaacccttcatgaccggggcagccgagcagatcaagcatatcctggctaacttcaaaaactaccagttctttatcggcgaaaatatgaaccccgacggcatggtcgctctgctcgactatcgcgaggacggcgttacaccttatatgatcttcttcaaggatgggcttgaaatggagaagtgctag

SEQ ID NO: 137150 - DNA, 567 bp, Artificial Sequence
  derived and/or modified sequence
atgattatctacagagacctcattagccacgatgagatgtttagcgatatctacaagatacgagaaatagcagacggcctgtgccttgaggttgaaggcaagatggtaagtcggactgaaggaaatattgacgattccctgatcggggggaatgcatctgccgaggggcccgaaggagagggaacagaatcaactgtgatcaccggggtcgacatcgtcatgaatcatcacctgcaggagacctcttttacaaaggaagcctacaaaaagtacatcaaggactatatgaaatcaattaagggcaaattggaagaacagaggccagagagggtgaaaccattcatgactggggccgcagaacagatcaagcacattttagccaatttcaaaaactaccagtttttcatcggagagaatatgaaccctgatggcatggtggctctgctggactaccgagaggatggagtgaccccatacatgatattcttcaaggacggactcgagatggaaaagtgcgtgtctactagaaagtgggtaaaaatcaataacgtgaaaaagactttctag

SEQ ID NO: 137151 - DNA, 483 bp, Artificial Sequence
  derived and/or modified sequence
atgtttagcgatatctataagattcgggaaatcgcggatggactgtgtctcgaagtcgaaggtaagatggtttcaagaacagagggtaatatcgatgatagtctgatagggggcaatgcaagcgccgagggtcctgaaggagagggcactgagtcaaccgtgattacaggcgtcgacatcgtgatgaatcatcacctgcaggaaacttctttcaccaaggaggcttacaagaaatacattaaagactacatgaaaagtattaagggcaaattagaagaacagaggcccgagagagtgaaacctttcatgacgggcgccgcagaacagatcaagcacatccttgcaaactttaagaactaccagtttttcattggcgaaaacatgaatcctgacgggatggtggctctgctcgactaccgtgaagatggcgtgactccatatatgattttttttaaggatggactggaaatggagaaatgttag

SEQ ID NO: 137152 - DNA, 519 bp, Artificial Sequence
  derived and/or modified sequence
atgattatttatagagacctaatctcacatgacgagatgttctctgatatctacaaaatccgcgagatcgcagacgggctgtgcctggaagtcgaaggcaagatggtgtcccggaccgagggcaatatagatgactcattaattgggggtaatgcctctgcagagggtcctgaaggtgaggggacagagagtacagttattactggcgtggatatcgtcatgaaccatcatcttcaagagacttcatttactaaagaggcctataaaaaatatatcaaggactatatgaaatctatcaaaggtaaactagaagagcaacggcctgaaagagtgaaaccctttatgactggcgctgccgagcagataaagcatatcttggcaaactttaagaattaccagtttttcattggcgaaaatatgaacccagatggaatggtggccctattggattacagggaggacggagtgaccccgtacatgatttttttcaaagacgggttagagatggaaaagtgctag

SEQ ID NO: 137153 - DNA, 567 bp, Artificial Sequence
  derived and/or modified sequence
atgataatttacagagatctcattagccatgatgaaatgttcagcgatatttataaaatcagggagattgccgatggcctttgcttagaagtcgagggaaagatggtttctaggacagaaggaaacatcgatgatagtttaatcggcgggaacgcgtcggccgagggacccgagggagagggaacagagagtaccgtaattaccggagttgacatcgtgatgaaccatcatcttcaggagacttcatttacaaaagaggcttataaaaagtacataaaagattacatgaaatccattaagggtaagctagaagagcagaggcccgaacgtgtgaaacccttcatgaccggagcggcagaacagattaagcatatactggcgaactttaagaactaccaattctttatcggagaaaacatgaacccagacggcatggtggctctgcttgattacagggaggacggagttactccttacatgatttttttcaaggacggtcttgagatggagaaatgcgtatcaacaagaaaatgggttaaaataaacaatgtgaaaaagactttctag

SEQ ID NO: 137154 - DNA, 483 bp, Artificial Sequence
  derived and/or modified sequence
atgtttagcgatatctataagattcgggaaatcgcggatggactgtgtctcgaagtcgaaggtaagatggtttcaagaacagagggtaatatcgatgatagtctgatagggggcaatgcaagcgccgagggtcctgaaggagagggcactgagtcaaccgtgattacaggcgtcgacatcgtgatgaatcatcacctgcaggaaacttctttcaccaaggaggcttacaagaaatacattaaagactacatgaaaagtattaagggcaaattagaagaacagaggcccgagagagtgaaaccctttatgacaggagccgccgaacagatcaaacatattttagcaaactttaaaaactaccaattttttatcggagagaacatgaaccccgacggcatggtggcattgctggattatcgcgaggatggcgtgacaccctatatgatcttttttaaggacggattagaaatggaaaagtgttag

SEQ ID NO: 137155 - DNA, 519 bp, Artificial Sequence
  derived and/or modified sequence
atgattatttacagagacctgatttcccacgacgagatgttctctgatatctacaagatccgggaaattgccgatggactctgtctcgaagtggaaggcaaaatggtcagccgtacggagggaaatattgacgattcactcattggcgggaacgcaagcgcagagggaccagaaggagagggaactgaatcaaccgtgattaccggagttgacatcgtgatgaaccaccacctgcaggagacatcctttactaaggaggcttacaaaaagtacattaaagactacatgaaaagcatcaagggaaagctggaggagcagcgcccggagcgcgtaaagcccttcatgactggagcagcggaacagattaagcacattttggcaaacttcaaaaactaccaattctttataggcgaaaacatgaacccggatggaatggttgcactgctggattaccgcgaagacggcgttacaccctacatgatttttttcaaagatggactcgaaatggaaaaatgctag

SEQ ID NO: 137156 - DNA, 1008 bp, Artificial Sequence
  derived and/or modified sequence
tcccttcagtcgccatcatgattatctaccgggacctcatcagccacgatgagatgttctccgacatctacaagatccgggagatcgcggacgggttgtgcctggaggtggaggggaagatggtcagtaggacagaaggtaacattgatgactcgctcattggtggaaatgcctccgctgaaggccccgagggcgaaggtaccgaaagcacagtaatcactggtgtcgatattgtcatgaaccatcacctgcaggaaacaagtttcacaaaagaagcctacaagaagtacatcaaagattacatgaaatcaatcaaagggaaacttgaagaacagagaccagaaagagtaaaaccttttatgacaggggctgcagaacaaatcaagcacatccttgctaatttcaaaaactaccagttctttattggtgaaaacatgaatccagatggcatggttgctctattggactaccgtgaggatggtgtgaccccatatatgattttctttaaggatggtttagaaatggaaaaatgtgtaagtacaaggaagtgggttaaaataaataatgtaaaaaagacattttagatgtgatttgcaattgttttgtgacactgagaatgagttttacagcgttctgaaacatggttttagttttctctttggggatcaagagaattgtgtttcatatgtaaaaaattcttagggtataaaaaggcttagaatcttatttgtggaaaacgttgagtgcagatggggcataataaagtacagtttaggctgggtgtggtggctcacacctgtaatttcagcacttgggacgccgaggtgggtgcatcacctgaggttgggagttcgagaccagcctggccaacatggcgaaaccctatctctgctaaaaatacaaaaattagccaggcatggcagcgggcacctgtaatcccagctaatcgagagcctgaggcaggaaaatcacttaaacctgggaggggggttgcagtgagcagagatc

SEQ ID NO: 137157 - DNA, 948 bp, Artificial Sequence
  derived and/or modified sequence
ccgagcgccgctccggctgcaccgcgctcgctccgagtttcaggctcgtgctaagctagcgccgtcgtcgtctcccttcagtcgccatcatgattatctaccgggacctcatcagccgtgagtcctcactgcactatccttactgccgcacacgggggtctggggtgcgggtgggggcggggaaggcgcagccgtcgcgggcctaggggacgccggcggtcttagccgagcgcggaggggtcggtgcccggggctcgcgcccagctctggtgtgctacggaggggcagatcccgcgtgcggccgccggcgcgggaaatgcgggaaatggcggcgccaggcgcacggtgatgggcggctctgtgtatccggcagacgatgagatgttctccgacatctacaagatccgggagatcgcggacgggttgtgcctggaggtggaggggaagatggtcagtaggacagaaggtaacattgatgactcgctcattggtggaaatgcctccgctgaaggccccgagggcgaaggtaccgaaagcacagtaatcactggtgtcgatattgtcatgaaccatcacctgcaggaaacaagtttcacaaaagaagcctacaagaagtacatcaaagattacatgaaatcaatcaaagggaaacttgaagaacagagaccagaaagagtaaaaccttttatgacaggggctgcagaacaaatcaagcacatccttgctaatttcaaaaactaccagttctttattggtgaaaacatgaatccagatggcatggttgctctattggactaccgtgaggatggtgtgaccccatatatgattttctttaaggatggtttagaaatggaaaaatgttaacaaatgtggcaattattttggatctatcacctgtcatcataactggcttctgcttgtcatccacacaacaccaggacttaagac

SEQ ID NO: 137158 - DNA, 764 bp, Artificial Sequence
  derived and/or modified sequence
gtttcaggctcgtgctaagctagcgccgtcgtcgtctcccttcagtcgccatcatgattatctaccgggacctcatcagccgtgaacgatgagatgttctccgacatctacaagatccgggagatcgcggacgggttgtgcctggaggtggaggggaagatggtcagtaggacagaaggtaacattgatgactcgctcattggtggaaatgcctccgctgaaggccccgagggcgaaggtaccgaaagcacagtaatcactggtgtcgatattgtcatgaaccatcacctgcaggaaacaagtttcacaaaagaagcctacaagaagtacatcaaagattacatgaaatcaatcaaagggaaacttgaagaacagagaccagaaagagtaaaaccttttatgacaggggctgcagaacaaatcaagcacatccttgctaatttcaaaaactaccagttctttattggtgaaaacatgaatccagatggcatggttgctctattggactaccgtgaggatggtgtgaccccatatatgattttctttaaggatggtttagaaatggaaaaatgttaacaaatgtggcaattattttggatctatcacctgtcatcataactggcttctgcttgtcatccacacaacaccaggacttaagacaaatgggactgatgtcatcttgagctcttcatttattttgactgtgatttatttggagtggaggcattgtttttaagaaaaacatgtcatgtaggttgtctaaa

SEQ ID NO: 137159 - DNA, 1028 bp, Artificial Sequence
  derived and/or modified sequence
ggaacggagccttgtgtctccgcctcaagtccccggatgctcacctccccgactcgcccccgctgtggccccgcccccgcgcggctcttcgtgccacgtcaccgcctgcgtcgcttccggaggcgcagcgggcgatgacgtagagggacgtgccctctatatgaggttggggagcggctgagtcggccttttccgcccgctcccccctccccccgagcgccgctccggctgcaccgcgctcgctccgagtttcaggctcgtgctaagctagcgccgtcgtcgtctcccttcagtcgccatcatgattatctaccgggacctcatcagccacgatgagatgttctccgacatctacaagatccgggagatcgcggacgggttgtgcctggaggtggaggggaagatggtcagtaggacagaaggtaacattgatgactcgctcattggtggaaatgcctccgctgaaggccccgagggcgaaggtaccgaaagcacagtaatcactggtgtcgatattgtcatgaaccatcacctgcaggaaacaagtttcacaaaagaagcctacaagaagtacatcaaagattacatgaaatcaatcaaagggaaacttgaagaacagagaccagaaagagtaaaaccttttatgacaggggctgcagaacaaatcaagcacatccttgctaatttcaaaaactaccagttctttattggtgaaaacatgaatccagatggcatggttgctctattggactaccgtgaggatggtgtgaccccatatatgattttctttaaggatggtttagaaatggaaaaatgttaacaaatgtggcaattattttggatctatcacctgtcatcataactggcttctgcttgtcatccacacaacaccaggacttaagacaaatgggactgatgtcatcttgagctcttcatttattttgactgtgatttatttggagtggaggcattgtttttaagaaaaacatgtcatgtaggttgtctaaaaataaaatgcatttaaactc

SEQ ID NO: 137160 - protein, 603 aa, Artificial Sequence
  derived and/or modified sequence
MATIEEIAHQIIEQQMGEIVTEQQTGQKIQIVTALDHNTQGKQFILTNHDGSTPSKVILARQDSTPGKVFLTTPDAAGVNQLFFTTPDLSAQHLQLLTDNSPDQGPNKVFDLCVVCGDKASGRHYGAVTCEGCKGFFKRSIRKNLVYSCRGSKDCIINKHHRNRCQYCRLQRCIAFGMKQDSVQCERKPIEVSREKSSNCAASTEKIYIRKDLRSPLTATPTFVTDSESTRSTGLLDSGMFMNIHPSGVKTESAVLMTSDKAESCQGDLSTLANVVTSLANLGKTKDLSQNSNEMSMIESLSNDDTSLCEFQEMQTNGDVSRAFDTLAKALNPGESTACQSSVAGMEGSVHLITGDSSINYTEKEGPLLSDSHVAFRLTMPSPMPEYLNVHYIGESASRLLFLSMHWALSIPSFQALGQENSISLVKAYWNELFTLGLAQCWQVMNVATILATFVNCLHNSLQQDKMSTERRKLLMEHIFKLQEFCNSMVKLCIDGYEYAYLKAIVLFSPDHPSLENMEQIEKFQEKAYVEFQDYITKTYPDDTYRLSRLLLRLPALRLMNATITEELFFKGLIGNIRIDSVIPHILKMEPADYNSQIIGHSI

SEQ ID NO: 137161 - DNA, 4029 bp, Artificial Sequence
  derived and/or modified sequence
gcttctccccgttgctaatgcgcaggcgctggcgggatagcgcgccgccgagccgagaaagaggtcacgaactctgaccccccagaaatacccaaacacagaaagctctctccgccgtgaatctcgatcccacatcccgtcggctttcttcaacctctcttcccggagcgccccccaatccacgagtggcagccgcgggactgtcgcgtcggcgcccgacgccggagtcagcagggcgcaaaagcgccggtagatcatggcaaccatagaagaaattgcacatcaaattattgaacaacagatgggagagattgttacagagcagcaaactgggcagaaaatccagattgtgacagcacttgatcataatacccaaggcaagcagttcattctgacaaatcacgacggctctactccaagcaaagtcattctggccaggcaagattccactccgggaaaagttttccttacaactccagatgcagcaggtgtcaaccagttattttttaccactcctgatctgtctgcacaacacctgcagctcctaacagataattctccagaccaaggaccaaataaggtttttgatctttgcgtagtatgtggagacaaagcatcaggacgtcattatggagcagtaacttgtgaaggctgcaaaggattttttaaaagaagcatccgaaaaaatttagtatattcatgtcgaggatcaaaggattgtattattaataagcaccaccgaaaccgctgtcaatactgcaggttacagagatgtattgcgtttggaatgaagcaagactctgtccaatgtgaaagaaaacccattgaagtatcacgagaaaaatcttccaactgtgccgcttcaacagaaaaaatctatatccgaaaggaccttcgtagcccattaactgcaactccaacttttgtaacagatagtgaaagtacaaggtcaacaggactgttagattcaggaatgttcatgaatattcatccatctggagtaaaaactgagtcagctgtgctgatgacatcagataaggctgaatcatgtcagggagatttaagtacattggccaatgtggttacatcattagcgaatcttggaaaaactaaagatctttctcaaaatagtaatgaaatgtctatgattgaaagcttaagcaatgatgatacctctttgtgtgaatttcaagaaatgcagaccaacggtgatgtttcaagggcatttgacactcttgcaaaagcattgaatcctggagagagcacagcctgccagagctcagtagcgggcatggaaggaagtgtacacctaatcactggagattcaagcataaattacaccgaaaaagaggggccacttctcagcgattcacatgtagctttcaggctcaccatgccttctcctatgcctgagtacctgaatgtgcactacattggggagtctgcctccagactgctgttcttatcaatgcactgggcactttcgattccttctttccaggctctagggcaagaaaacagcatatcactggtgaaagcttactggaatgaactttttactcttggtcttgcccagtgctggcaagtgatgaatgtagcaactatattagcaacatttgtcaattgtcttcacaatagtcttcaacaagataaaatgtcaacagaaagaagaaaattattgatggagcacatcttcaaactacaggagttttgtaacagcatggttaaactctgcattgatggatacgaatatgcctacctgaaggcaatagtactcttcagtccagatcatccaagcctagaaaacatggaacagatagagaaatttcaggaaaaggcttatgtggaattccaagattatataaccaaaacatatccagatgacacctacaggttatccagactactactcagattgccagctttaagactgatgaatgctaccatcactgaagaattgtttttcaaaggtctcattggcaatatacgaattgacagtgttatcccacatattttgaaaatggagcctgcagattataactctcaaataattggtcacagcatttgaaaactgtgactgcagtgctgtaaacttaactgttctttgccagaacacaagacaccaaattgaactcactgcttttgaggcatctggaaatttttactttaaaaagtaaccagaatccaaggtatttttattttagcttcccttaagaatttttgaagtgactgggcaggcagcagaaattaaatgaatttttcttcctgattcctttaaatgaatatgaaacactacaaatttattcttggtgaagatgatacctgaagctgtcacctcttgattatctaaactaagcgctcattctattttataaaacaaataaattagtctcttttttctgaattgtgttctagtcatatttaacttcattatgaactagtaaaaatacttaatggtcagaaatccctaaggagttagttccttgcattttactctgccataataatttttgtttaattaccatatcaaaataagattattttatgcttactggtataatgacagtattagaactataggaaataattgaatacatattttttgtcttctctaaatatcatggtgtcccttagcatatactactctcattgctggcagtgagacaggccattcatgatcttaagagttgccatttttaatgtatattattagttacaagcactttatatagcagaaaattgtttttgagaataagctagtgttgatattttaatatttttagcttactgctcgtgtttttgtttttgttttcgtttatagaggtgggtttcactgttgcccaggctggtctcaaactcctgggctcaagtgatcctgcctcagcctcccaaagtactgggattacaggcgcgtgccaccgtgcctggcctactgctgtctttgaaaataatagagactagccaggtgtagtggctcatgcctataatcccagcactttgggaggctgaggcaggcagattgcttgagctcaggagttcgagaccagcctgggcaatatagcaagacctcgtctctgtaaaaagaaagaaagtaataaagactaattgagcccaaaatgtttcactatttcaaaaaagatatttaaattgttgctctttcattccataaaaaggatctgatctctctcccacttttctgacctgagttagagcttcccaaacctgtcatgtatgggttttagccaatttcttttagatcactaaaaaaactcacccaatatgtcaaataatggatttatcatagccagtacatgttctcaaggcaagtttaaacattattttgaagctattgataattttttaaaataaagaaatattcactgatttttttcactgtaaagcacgggagggctgctttaacaacagtataagaatcagcctgaagccttgttactgctacaacaaattcattttagactcctcggatgtcttccacagtaatttattcttttagcaaacctgatactgataactgtttctttgctttgatttcttgatgaattattttggtatgtttgttgatttttaaagcaaacacggataatgcactcagagtacattttttgtaaagatttttgcaatagaagaaaagtgaagtttttgtggggatgtggattttattgcttactactttatagtaatcaaaagtttgaaaatatcaacttacagtctttaccagtttactaagggaaacttttttccctatttaaaacatgatcttagtcaacaattttatttataattatcagctaaattacatttagtataatactcaaatggaaaaatcagtagtttatacctttataaatacagtttagtaagccaaggaatcagggaaataatcctttaaaataatgtactaatagttaagatgtttcaggtgttttttctgattaaatttgctactatatttggaagactttaaaactatattaaaatgtgacttgcattacaaaaaaaaaaaaaaaa

SEQ ID NO: 137162 - DNA, 1812 bp, Artificial Sequence
  derived and/or modified sequence
atggcaactatcgaggaaattgcccatcagatcattgaacagcagatgggggaaatcgttaccgagcagcaaactggccagaaaatccagatcgtgaccgccctggatcacaatacccaaggtaagcagttcatcctaacaaaccacgatgggagcacccccagcaaggtgatcttagcgcggcaggactcaactcccggaaaggtcttcctcacaacaccagacgcggccggagttaaccaattgtttttcacaacacccgatcttagtgcccagcatctgcagctactgactgataacagccctgaccagggtccaaataaggtattcgacctgtgcgtggtgtgcggcgacaaagcttcagggcgccactacggcgcagtgacctgtgaggggtgcaaaggattcttcaagagatccattcgaaaaaacctggtatactcgtgtcgcggcagcaaagattgtataattaacaagcaccacaggaacagatgtcaatactgccgactgcagcgatgtatcgcattcggaatgaagcaggacagcgtgcagtgcgaacgtaaaccaatcgaagtatctcgcgagaaatcatctaattgcgccgcgagtacagagaagatatatatacgaaaagatctgagatcgcctcttaccgcgactcccacttttgtcactgattctgagtcaacacgttcaacagggctgctggattctggcatgtttatgaacatacatccaagtggcgttaagaccgaatcagctgtcctcatgacaagtgataaagctgagtcctgtcaaggcgacctgagcacactggctaacgtggtgacctcactggcaaatctagggaagacaaaggacctcagccaaaactccaatgaaatgtccatgattgaaagcctgtcaaatgacgacactagtctatgtgagtttcaagagatgcagactaacggtgatgtctccagagcttttgacacactggctaaggctctcaacccaggcgaatccactgcctgtcaaagctccgtcgctggaatggagggaagcgtccatctgatcacaggcgactcctccataaattacactgaaaaggaaggtccccttttgagcgatagccacgtggccttccgacttactatgccctccccaatgccagaatatctcaatgtgcattatattggagaaagcgcgagccgccttctattcctatctatgcattgggccttgtcaattcccagcttccaagccctcggacaggaaaactcaatatcactggttaaggcctattggaatgaacttttcactttggggttggcccagtgttggcaggttatgaatgtcgccacgattctggcaacgttcgtcaattgcttgcacaactctctccagcaggacaagatgagcaccgagagacgtaaactactgatggagcatatcttcaaactccaggagttttgtaactctatggtgaagttgtgcatcgacgggtatgaatacgcatacttaaaggccatcgtattgttctcaccagatcacccctctctcgaaaatatggagcagatcgagaagttccaggaaaaggcgtacgtggagttccaggactatatcaccaagacgtatccggatgacacctacaggctctctcgtctcctgctgaggctccctgctctacggctgatgaacgcaacaattaccgaggagctgttcttcaagggcctgatcggtaacatccggatcgactctgtgatccctcacatcctgaagatggaacctgccgactacaacagtcagatcattggtcactctatctag

SEQ ID NO: 137163 - DNA, 2479 bp, Artificial Sequence
  derived and/or modified sequence
gtggactcacagagccgctgctcggccctccgatccctccaccccaccctgggaacgtcacgacctcctctcgccgcttctccccgttgctaatgcgcaggcgctggcgggatagcgcgccgccgagccgagaaagaggtcacgaactctgaccccccagaaatacccaaacacagaaagctctctccgccgtgaatctcgatcccacatcccgtcggctttcttcaacctctcttcccggagcgccccccaatccacgagtggcagccgcgggactgtcgcgtcggcgcccgacgccggagtcagcagggcgcaaaagcgccggtagatcatggcaaccatagaagaaattgcacatcaaattattgaacaacagatgggagagattgttacagagcagcaaactgggcagaaaatccagattgtgacagcacttgatcataatacccaaggcaagcagttcattctgacaaatcacgacggctctactccaagcaaagtcattctggccaggcaagattccactccgggaaaagttttccttacaactccagatgcagcaggtgtcaaccagttattttttaccactcctgatctgtctgcacaacacctgcagctcctaacagataattctccagaccaaggaccaaataaggtttttgatctttgcgtagtatgtggagacaaagcatcaggacgtcattatggagcagtaacttgtgaaggctgcaaaggattttttaaaagaagcatccgaaaaaatttagtatattcatgtcgaggatcaaaggattgtattattaataagcaccaccgaaaccgctgtcaatactgcaggttacagagatgtattgcgtttggaatgaagcaagactctgtccaatgtgaaagaaaacccattgaagtatcacgagaaaaatcttccaactgtgccgcttcaacagaaaaaatctatatccgaaaggaccttcgtagcccattaactgcaactccaacttttgtaacagatagtgaaagtacaaggtcaacaggactgttagattcaggaatgttcatgaatattcatccatctggagtaaaaactgagtcagctgtgctgatgacatcagataaggctgaatcatgtcagggagatttaagtacattggccaatgtggttacatcattagcgaatcttggaaaaactaaagatctttctcaaaatagtaatgaaatgtctatgattgaaagcttaagcaatgatgatacctctttgtgtgaatttcaagaaatgcagaccaacggtgatgtttcaagggcatttgacactcttgcaaaagcattgaatcctggagagagcacagcctgccagagctcagtagcgggcatggaaggaagtgtacacctaatcactggagattcaagcataaattacaccgaaaaagaggggccacttctcagcgattcacatgtagctttcaggctcaccatgccttctcctatgcctgagtacctgaatgtgcactacattggggagtctgcctccagactgctgttcttatcaatgcactgggcactttcgattccttctttccaggctctagggcaagaaaacagcatatcactggtgaaagcttactggaatgaactttttactcttggtcttgcccagtgctggcaagtgatgaatgtagcaactatattagcaacatttgtcaattgtcttcacaatagtcttcaacaagataaaatgtcaacagaaagaagaaaattattgatggagcacatcttcaaactacaggagttttgtaacagcatggttaaactctgcattgatggatacgaatatgcctacctgaaggcaatagtactcttcagtccagatcatccaagcctagaaaacatggaacagatagagaaatttcaggaaaaggcttatgtggaattccaagattatataaccaaaacatatccagatgacacctacaggttatccagactactactcagattgccagctttaagactgatgaatgctaccatcactgaagaattgtttttcaaaggtctcattggcaatatacgaattgacagtgttatcccacatattttgaaaatggagcctgcagattataactctcaaataattggtcacagcatttgaaaactgtgactgcagtgctgtaaacttaactgttctttgccagaacacaagacaccaaattgaactcactgcttttgaggcatctggaaatttttactttaaaaagtaaccagaatccaaggtatttttattttagcttcccttaagaatttttgaagtgactgggcaggcagcagaaattaaatgaatttttcttcctgattcctttaaatgaatatgaaacactacaaatttattcttggtgaagatgatacctgaagctgtcacctcttgattatctaaactaagcgctcattctattttataaaacaaataaattagtctcttttttctgaa

SEQ ID NO: 137164 - DNA, 1812 bp, Artificial Sequence
  derived and/or modified sequence
atggccaccatcgaggagatcgcccaccagatcatcgagcagcagatgggagaaattgtgacagagcagcagacaggccagaagatccagatcgtgacagccctggaccacaacacccagggcaagcagttcatcctgaccaaccatgatggcagcacccccagcaaggtgatcctggcccggcaggacagcacccctgggaaggtgttcctgaccaccccagatgctgctggggtgaaccagctgttcttcaccaccccagacctgagcgcccagcacctgcagctgctgacagacaacagcccagaccagggccccaacaaggtgtttgacctgtgtgtggtgtgtggggacaaggccagcggccgccactatggagctgtgacctgtgagggctgcaagggcttcttcaagaggagcatcaggaagaacctggtgtacagctgccggggcagcaaggactgcatcatcaacaagcaccacaggaaccgctgccagtactgccgcctgcagcgctgcatcgccttcggcatgaagcaggacagcgtgcagtgtgagaggaagcccatcgaggtgtcccgggagaagagcagcaactgtgccgccagcacagagaagatctacatcaggaaggacctgcggagccccctgacagccacccccacctttgtgacagattctgagagcaccaggagcacaggcctgctggacagcggcatgttcatgaacatccaccccagcggcgtgaagacagaatctgctgtgctgatgaccagtgacaaggccgagagctgccagggcgacctgagcaccctggccaacgtggtgaccagcctggccaacctgggcaagaccaaggacctgagccagaacagcaatgagatgtccatgattgagagcctgagcaatgatgacaccagcctgtgtgagttccaggagatgcagaccaatggagatgtgtcccgggcctttgacaccctggccaaggccctgaaccctggagagagcacagcctgccagagctctgtggccggcatggagggctctgtgcacctgatcaccggggacagcagcatcaactacacagagaaggagggccccctgctgagtgacagccacgtggccttccggctgaccatgcccagccccatgcctgagtacctgaatgtgcactacatcggggagagcgccagccggctgctcttcctgtccatgcactgggccctgagcatccccagcttccaggccctgggccaggagaacagcatcagcctggtgaaggcctactggaatgaactcttcaccctgggcctggcccagtgctggcaggtgatgaatgtggccaccatcctggccacctttgtgaactgcctgcacaacagcctgcagcaggacaagatgagcacagaaagaaggaagctgctgatggagcacatcttcaagctgcaggagttctgcaacagcatggtgaagctgtgcattgatggctatgaatatgcctacctgaaggccatcgtgctcttctccccagaccaccccagcctggagaacatggagcagatcgagaagttccaggagaaggcctacgtggagttccaggactacatcaccaagacctacccagatgacacctaccgcctgagccggctgctgctgcggctgcctgccctgcggctgatgaatgccaccatcacagaggagctgttcttcaagggcctcatcggcaacatcagaattgattctgtcatcccccacatcctgaagatggagcctgctgactacaacagccagatcatcggccacagcatctag

SEQ ID NO: 137165 - DNA, 1812 bp, Artificial Sequence
  derived and/or modified sequence
atggccaccatcgaggagatcgcccaccagatcatcgagcagcagatgggtgagatcgtgactgaacaacagacaggacaaaaaatccaaatagtgacagcgctggaccataatacccaggggaagcaattcattcttactaaccacgacgggtcaaccccctccaaagtgattctggcccgacaggatagcaccccagggaaggtgttccttaccacacccgacgccgccggagtcaaccagctgttcttcaccactcctgatttgagtgcccagcacctacagttgctgacagacaattccccagaccaggggcctaacaaagtgttcgatctgtgcgttgtttgcggcgataaggccagtggccgacactacggggcagtcacctgtgaaggctgcaagggcttctttaagagaagcatccgcaaaaatctcgtgtacagttgccgtggctctaaggactgcatcattaacaagcaccacagaaatcgatgccagtactgtaggctgcaaaggtgcattgcatttgggatgaaacaagatagcgttcagtgtgagcggaaacctatcgaggtgtcccgcgaaaagtcttctaattgtgcggccagtaccgaaaaaatctatatccgcaaggatttgcgttctccgctgaccgccacccctacattcgtgaccgattctgagagtactcgctcaacaggtctgctggactcagggatgtttatgaacatccatccgtcaggtgttaaaactgagtccgccgttctaatgacaagtgacaaggccgagtcatgtcaaggcgacttgtctactttagccaatgttgtgacaagcctggcgaaccttggaaaaacaaaagacttgagtcaaaactcgaacgagatgagtatgatcgagtccctctcaaatgatgatacgtcactgtgcgagtttcaggaaatgcagacaaatggcgacgtgagtcgggcctttgataccctcgcgaaggccctgaaccccggggagtccaccgcctgtcaatcttcagttgcaggaatggaaggttctgttcacctcatcactggcgattctagtataaattacacggagaaagaaggacctctgttatccgattcccatgtggctttcagacttaccatgccttcaccaatgccggagtacctcaacgttcactacatcggggaatccgctagccgcctcctgttcctctctatgcactgggccctgagcatcccgagcttccaggcccttggccaagagaacagcatctctctggtgaaggcatattggaatgagctttttaccctagggctggctcagtgttggcaggtcatgaatgtggccactatcttggctacgttcgtgaattgccttcacaactccctccagcaagacaaaatgagcacagagagacgtaagctgctgatggagcacatttttaagttgcaggaattctgtaactccatggttaagctgtgcatcgacggttatgaatacgcatacttaaaggccatcgtgctgttctccccggaccacccctctctcgaaaatatggaacagatcgaaaagtttcaggagaaggcctacgtagaattccaggattatatcactaagacctatcctgatgacacatataggctgagtaggctacttctgcgcctgcccgcgctgcgactcatgaacgcaactatcacagaggagctgtttttcaaggggttaatcggcaacatacggattgattccgtaatcccgcatatcctgaaaatggagccggcagattataattcccaaatcattggtcattccatttag

SEQ ID NO: 137166 - DNA, 1812 bp, Artificial Sequence
  derived and/or modified sequence
atggcaaccattgaggaaattgcccatcagatcattgaacagcaaatgggagagatagtcacggagcagcaaacagggcagaaaatccaaatcgtcacagcccttgatcacaacacgcagggcaaacaatttatcttaaccaaccatgacggctctacgcctagtaaggtgattctcgcccgtcaggattcaacaccgggtaaggtgtttctgacaacgccagatgcggcaggggtgaatcagttgttcttcacaacacccgatctgtcagctcaacatctccagctcctgacagacaactctcctgaccagggccctaacaaggtgttcgacctctgcgtcgtgtgtggtgacaaggcttctgggagacactacggcgctgtcacatgtgaggggtgtaagggctttttcaagaggtcaatccgcaagaacttagtttatagctgcagaggatcgaaggactgtatcatcaacaagcaccatagaaaccgctgccaatactgtcgcctgcaaaggtgtattgccttcggtatgaagcaggactccgtccagtgcgaacgtaaaccaattgaagtgtcgagagaaaagtcgtccaattgtgccgcaagtacagaaaagatttatatccgaaaggaccttcggtcccccctcactgccacaccaacatttgtgacggacagtgagagtaccaggtcaaccggcctgctggacagtggcatgtttatgaatattcatccctctggagtgaaaactgaatctgccgtcctcatgactagcgacaaagctgagagttgtcagggagatctctccaccttggctaacgtggtgacaagcttggcaaatttgggaaaaaccaaagacctgtcccaaaactctaatgaaatgagcatgattgaatctctctctaacgacgacacatcgttgtgcgaattccaggagatgcaaaccaacggagatgtgtcccgagctttcgacacattagccaaagccctcaacccaggggaatccaccgcctgtcagtcctctgtagccggtatggagggatcagtgcatctgatcactggggattccagtattaattacaccgaaaaggaaggccctctgctgagcgatagccacgtagcattcaggctcacaatgcccagcccaatgcccgagtatctgaacgtgcactatataggagagtccgcctctagactgctctttctctcaatgcattgggcactgtcaatacccagttttcaggctctggggcaggagaacagcatcagcctggtgaaggcgtactggaatgagctttttaccctgggcctggctcagtgttggcaggttatgaacgtcgcgactatcctggcaaccttcgtcaactgccttcacaattcgctccagcaggataaaatgagcacagaacggcgaaagttgttgatggaacacatctttaagttgcaggagttctgtaatagtatggttaaactctgtatagatggatatgagtacgcttacctgaaagcaatagtgcttttttcccccgaccacccaagcctcgagaatatggaacagattgagaagtttcaagaaaaagcatacgtggaattccaggactacataaccaaaacttaccctgatgatacttacagactgagccggctcctgctgcgactccccgcactgagacttatgaacgccactataactgaggagctgttttttaaaggactgattggcaacattagaattgactctgtcatccctcacattctgaaaatggagcccgcagattataacagccagattattggtcacagtatctag

SEQ ID NO: 137167 - DNA, 1812 bp, Artificial Sequence
  derived and/or modified sequence
atggccaccatcgaggagatcgcccaccagatcatcgagcagcagatgggcgagatcgtgaccgagcagcagaccggccagaagatccagatcgtgaccgccctggaccacaacacccagggcaagcagttcatcctgaccaaccacgacggcagcacccccagcaaggtgatcctggccagacaggacagcacccccggcaaggtgttcctgaccacccccgacgccgccggcgtgaaccagctgttcttcaccacccccgacctgagcgcccagcacctgcagctgctgaccgacaacagccccgaccagggccccaacaaggtgttcgacctgtgcgtggtgtgcggcgacaaggccagcggcagacactacggcgccgtgacctgcgagggctgcaagggcttcttcaagagaagcatcagaaagaacctggtgtacagctgcagaggcagcaaggactgcatcatcaacaagcaccacagaaacagatgccagtactgcagactgcagagatgcatcgccttcggcatgaagcaggacagcgtgcagtgcgagagaaagcccatcgaggtgagcagagagaagagcagcaactgcgccgccagcaccgagaagatctacatcagaaaggacctgagaagccccctgaccgccacccccaccttcgtgaccgacagcgagagcaccagaagcaccggcctgctggacagcggcatgttcatgaacatccaccccagcggcgtgaagaccgagagcgccgtgctgatgaccagcgacaaggccgagagctgccagggcgacctgagcaccctggccaacgtggtgaccagcctggccaacctgggcaagaccaaggacctgagccagaacagcaacgagatgagcatgatcgagagcctgagcaacgacgacaccagcctgtgcgagttccaggagatgcagaccaacggcgacgtgagcagagccttcgacaccctggccaaggccctgaaccccggcgagagcaccgcctgccagagcagcgtggccggcatggagggcagcgtgcacctgatcaccggcgacagcagcatcaactacaccgagaaggagggccccctgctgagcgacagccacgtggccttcagactgaccatgcccagccccatgcccgagtacctgaacgtgcactacatcggcgagagcgccagcagactgctgttcctgagcatgcactgggccctgagcatccccagcttccaggccctgggccaggagaacagcatcagcctggtgaaggcctactggaacgagctgttcaccctgggcctggcccagtgctggcaggtgatgaacgtggccaccatcctggccaccttcgtgaactgcctgcacaacagcctgcagcaggacaagatgagcaccgagagaagaaagctgctgatggagcacatcttcaagctgcaggagttctgcaacagcatggtgaagctgtgcatcgacggctacgagtacgcctacctgaaggccatcgtgctgttcagccccgaccaccccagcctggagaacatggagcagatcgagaagttccaggagaaggcctacgtggagttccaggactacatcaccaagacctaccccgacgacacctacagactgagcagactgctgctgagactgcccgccctgagactgatgaacgccaccatcaccgaggagctgttcttcaagggcctgatcggcaacatcagaatcgacagcgtgatcccccacatcctgaagatggagcccgccgactacaacagccagatcatcggccacagcatctag

SEQ ID NO: 137168 - protein, 36 aa, Artificial Sequence
  derived and/or modified sequence
MTSPSPRIQIISTDSAVASPQRIQGSEPASGPLSVF

SEQ ID NO: 137169 - DNA, 1848 bp, Artificial Sequence
  derived and/or modified sequence
atgacctctccgtcaccaaggatccagatcatcagtactgacagcgctgtcgcctcaccccaacgcatccaagggtctgaacccgccagtgggcccttaagcgtgttcacgagtttaaacaaggagaaaatcgtcactgaccagcaaacgggtcagaaaatccaaattgtaacggcggtggatgcaagcgggagtcccaaacaacagttcattcttactagtccagatggagctggcacaggaaaagtaatcctggcaagccctgaaacgagttcggctaagcagctgatttttaccactagtgataacttagttcctggacgaattcagattgttacagacagtgcctctgtggagcgcctgctcggtaaaacggacgttcagcggccccaggtagttgagtactgtgtggtttgtggcgacaaggcgtctggtaggcattacggggcggtgtcttgtgaaggttgcaaggggtttttcaaacgaagcgttaggaagaacctgacgtattcctgccgcagcaatcaggattgcatcattaacaagcatcacaggaaccgatgtcagttttgccggcttaagaaatgcttggaaatggggatgaagatggagtccgtgcagagcgaacggaagccattcgacgtccagagggagaaaccaagtaactgtgcagcttccaccgaaaagatatatattcgaaaggacttgaggagccctctgatcgctacgcctaccttcgtggcggataaagatggcgctcgacaaacgggcctcctggatccagggatgctggttaacatacagcaaccgcttatccgcgaggacggaaccgtgctgttagcgaccgattctaaggctgaaacaagtcaaggggctttaggaacactggcaaacgtggtgacttccctggctaacttgtccgaatctctgaacaacggcgacacctctgagatccagccggaggaccagtcagcctctgagatcactcgggccttcgacactttggcaaaggctctgaatacaactgactcatcatccagtccctcactggccgacggaattgacacgtcagggggcggcagtattcatgttatcagccgggaccagagcacacccataatcgaggtcgaagggcctctgttgtccgacacgcacgtgacttttaagctgacgatgccatcacccatgcccgagtatttaaacgttcattatatttgcgagtctgcgtcgagactactctttctgtccatgcattgggccagatccatccccgctttccaggctctgggtcaggactgcaacacttcccttgtgcgagcctgctggaacgagcttttcaccttaggtcttgcacagtgcgcacaagttatgtccctgtcgacaatccttgccgccatcgtgaaccaccttcagaacagcatccaagaggataaattgtctggtgaccgtattaagcaggtgatggaacacatctggaagctgcaggagttctgcaattctatggctaagctcgatattgatggctatgagtatgcctacctcaaggccattgtgctcttcagtccggaccatcccggcctgactagcaccagccagatcgagaaattccaggaaaaagctcagatggagttacaagattacgttcagaagacgtactcagaggacacatacagattagcgcgcatccttgtgaggctccctgccttgcgattaatgtcctcaaatattaccgaggagctgttcttcacgggattgattggaaacgtgtctattgacagtattatcccctatatactcaagatggaaacggctgaatataacggtcagattaccggggcttcactctag

SEQ ID NO: 137170 - DNA, 618 bp, Artificial Sequence
  derived and/or modified sequence
atgactagcccctcaccacgtatccagattatcagcacagactctgctgtagcttctccacagagaatccaggggtcagagcctgctagcgggccactgtccgtctttacctccctgaacaaggaaaagatcgtgaccgatcagcaaacggggcagaaaatccagatagttactgccgtggacgcctccggatcccccaaacagcagtttatccttaccagcccagatggtgcagggacgggcaaagtgattctggcaagccccgaaacatccagcgcgaaacagctgatctttaccacctccgacaaccttgttccaggtagaatccagatcgtcactgactcggcctctgtggaacggcttctgggaaagacggacgtgcaaaggccacaggttgtggagtactgcgtcgtatgcggcgacaaggcgtccggccggcactacggtgccgtttcttgcgaaggatgcaagggattcttcaagaggagcgtccggaagaacctcacatatagctgcaggtctaaccaggactgtatcatcaataaacatcatcggaatcgctgtcagttctgcagattaaagaaatgcctggagatggggatgaaaatggagtgttag

SEQ ID NO: 137171 - DNA, 1848 bp, Artificial Sequence
  derived and/or modified sequence
atgaccagccccagcccccgcatccagatcatcagcacagattctgctgtggccagcccccagaggatccagggcagcgagcccgccagcggccccctgagcgtcttcaccagcctgaacaaggagaagatcgtgacagaccagcagacaggccagaagatccagatcgtgacagctgtggatgccagcggcagccccaagcagcagttcatcctgaccagcccagatggagctggcaccgggaaggtgatcctggccagccctgagaccagcagcgccaagcagctgatcttcaccaccagtgacaacctggtgcccggccgcatccagatcgtgacagattctgcctctgtggagcggctgctgggcaagacagatgtgcagaggccccaggtggtggagtactgtgtggtgtgtggggacaaggccagcggccgccactacggggctgtgtcctgtgagggctgcaagggcttcttcaagaggtctgtgaggaagaacctgacctacagctgccgcagcaaccaggactgcatcatcaacaagcaccacaggaaccgctgccagttctgccgcctgaagaagtgcctggagatgggcatgaagatggagagcgtgcagagcgagaggaagccctttgatgtgcagcgggagaagcccagcaactgtgccgccagcacagagaagatctacatcaggaaggacctgcggagccccctgattgccacccccacctttgtggccgacaaggatggagcccggcagacaggcctgctggaccccggcatgctggtgaacatccagcagcccctcatccgggaggatggcaccgtgctgctggccacagacagcaaggccgagaccagccagggcgccctgggcaccctggccaacgtggtgaccagcctggccaacctgtctgagagcctgaacaacggggacaccagcgagatccagcctgaggaccagagcgccagcgagatcacccgggcctttgacaccctggccaaggccctgaacaccacagacagcagcagcagccccagcctggctgatggcatcgacaccagcggcggcggcagcatccacgtgatcagccgggaccagagcacccccatcatcgaggtggagggccccctgctgagtgacacccacgtgaccttcaagctgaccatgcccagccccatgcctgagtacctgaatgtgcactacatctgtgagagcgccagccggctgctcttcctgtccatgcactgggcccggagcatcccagccttccaggccctgggccaggactgcaacaccagcctggtgcgggcctgctggaatgaactcttcaccctgggcctggcccagtgtgcccaggtgatgagcctgagcaccatcctggccgccatcgtgaaccacctgcagaacagcatccaggaggacaagctgagcggggaccgcatcaagcaggtgatggagcacatctggaagctgcaggagttctgcaacagcatggccaagctggacattgatggctatgaatatgcctacctgaaggccatcgtgctcttctccccagaccaccctggcctgaccagcaccagccagatcgagaagttccaggagaaggcccagatggagctgcaggactatgtgcagaagacctacagcgaggacacctaccgcctggcccgcatcctggtgcggctgcctgccctgcggctgatgagcagcaacatcacagaggagctgttcttcaccggcctgattggaaatgtgtccattgacagcatcatcccctacatcctgaagatggagacagctgagtacaacggccagatcactggagccagcctgtag

SEQ ID NO: 137172 - DNA, 618 bp, Artificial Sequence
  derived and/or modified sequence
atgaccagccccagcccccgcatccagatcatcagcacagattctgctgtggccagcccccagaggatccagggcagcgagcccgccagcggccccctgagcgtcttcaccagcctgaacaaggagaagatcgtgacagaccagcagacaggccagaagatccagatcgtgacagctgtggatgccagcggcagccccaagcagcagttcatcctgaccagcccagatggagctggcaccgggaaggtgatcctggccagccctgagaccagcagcgccaagcagctgatcttcaccaccagtgacaacctggtgcccggccgcatccagatcgtgacagattctgcctctgtggagcggctgctgggcaagacagatgtgcagaggccccaggtggtggagtactgtgtggtgtgtggggacaaggccagcggccgccactacggggctgtgtcctgtgagggctgcaagggcttcttcaagaggtctgtgaggaagaacctgacctacagctgccgcagcaaccaggactgcatcatcaacaagcaccacaggaaccgctgccagttctgccgcctgaagaagtgcctggagatgggcatgaagatggagtgctag

SEQ ID NO: 137173 - DNA, 1848 bp, Artificial Sequence
  derived and/or modified sequence
atgaccagccccagcccccggatccagatcatcagcaccgacagcgccgtcgcctccccgcagcgcattcagggaagcgaaccagcctctggacccttgtctgtgttcacttcccttaataaggaaaagatcgtgacagatcaacagaccggccagaagatacaaattgttacggccgtcgatgctagcgggtctccaaaacagcaatttattcttacctcgccggacggggccgggactggaaaggttattctggccagccctgaaacatcttctgcaaagcagctgatttttacgaccagtgacaatctggtcccaggaagaatccagattgtgaccgacagcgcttctgtggagcgactgctaggcaagactgatgtgcagaggccccaggtggtggagtactgcgtggtgtgcggggataaggcctcaggccgacattatggagctgtcagctgcgagggatgcaagggattttttaaacgatctgtccgtaagaacctgacctacagctgccggagcaaccaagactgcatcatcaacaagcatcaccgcaataggtgtcaattctgtagacttaagaagtgcctcgaaatgggcatgaaaatggagtctgtccagagtgagaggaaaccttttgacgtacaacgagagaagcccagtaactgtgcagcctcgacggagaagatttatattcggaaggaccttcgttcccccctcatcgctacccccactttcgtggcagacaaggacggagcacggcagactggtcttcttgatcccgggatgctggtaaatatccagcaaccgttgattcgggaggacggaaccgtgctgctggccactgattcgaaagctgagacatctcagggcgccctgggcactttggcgaacgtcgtgacctcgctggccaacctgtccgagtctctcaataacggcgataccagtgaaatccagccagaggatcaatcggcttccgaaatcacgagggcctttgacaccctggccaaggcccttaatactactgacagttccagttctccctccctggctgacgggatcgatacctcagggggcggatccattcacgtaattagccgcgaccagtcaactccaatcattgaagtagaaggaccactcctgtcagacactcatgtaacattcaagctgacaatgccaagccccatgccggagtatctgaacgttcactacatctgtgagagcgcttctcggctcctattcctttctatgcattgggctagaagcattcccgcattccaggccctgggacaggattgtaacacatcactggtccgcgcgtgttggaacgaattgttcacgcttggcctcgcacagtgcgcacaggtgatgtcactctcaaccatcttggccgcaattgtcaaccaccttcagaacagtattcaggaagataaactgagcggggaccggatcaagcaggtgatggagcacatttggaagctccaagaattttgcaacagcatggcgaagctggacatcgacgggtacgagtacgcatacctcaaggccattgtgctctttagcccagatcacccaggactgacaagtacatcacaaatcgagaaatttcaggaaaaggcgcagatggagttacaggattacgttcagaagacctattcagaggacacttatcgtctggcccggatcctggtacgactccccgccctacgtttaatgagttccaacataactgaggaactcttctttactggactgatcggtaacgtgtcaattgacagtattatcccatatatcctgaaaatggagacagccgaatacaatggtcagattactggcgcttcactgtag

SEQ ID NO: 137174 - DNA, 618 bp, Artificial Sequence
  derived and/or modified sequence
atgaccagccccagcccccggatccagatcatcagcaccgacagcgccgttgcaagtccacagcgaattcagggcagcgagccagcatccggtccactgagtgtgtttacatctctgaacaaggagaagatagtgacggatcaacagactggccagaaaatccaaattgtgacggcggttgacgcctcagggtctcccaagcagcaatttattttgacttccccagatggggcaggtactgggaaggttatcctggcttccccggagaccagcagcgccaaacagctgattttcaccacatcggataacctggtgcctggaagaatccagatcgtgactgatagtgccagcgtggagcggttgctggggaagactgacgtccaacgacctcaagtggtagaatattgcgtagtgtgcggagataaggcctctgggcggcactacggcgctgtgtcctgcgaggggtgcaaaggcttcttcaagagatccgtgcgcaagaatttgacttatagttgtagaagcaaccaggattgcataatcaataaacatcatagaaatcgctgtcagttctgtcggcttaagaagtgcttggaaatgggcatgaaaatggaatgttag

SEQ ID NO: 137175 - DNA, 1848 bp, Artificial Sequence
  derived and/or modified sequence
atgacatcgcccagtcctcgcatccagatcattagcacggactccgctgtggcaagtccgcagcgtattcaggggtcagagcccgcttcggggcctctgagtgttttcacctcactcaacaaggaaaagatcgtgactgatcagcagacaggccagaagattcagattgttactgccgtggacgcatccggttccccaaaacagcagtttatattgaccagcccggacggagccggaacagggaaggttatcctggcgtcacccgagactagttccgcaaaacagcttatctttacaacctcagataatcttgtgcccggaagaatccagatcgttaccgatagcgcttccgtcgagcggttactaggaaagactgatgttcagcgcccacaagtggttgagtattgcgtggtctgcggagacaaggcttctgggaggcattacggggctgtgtcttgcgagggctgtaagggtttttttaagcgctcagtgcggaaaaatcttacctactcctgtcggtctaaccaggactgcattattaacaagcatcacagaaatcgttgccagttttgccggctcaaaaaatgtctcgagatgggaatgaagatggagagcgtccagtctgagcgcaaaccatttgatgtacagcgggagaagccttctaactgcgcagcctctactgagaagatctatataagaaaggatctccgctctccgctgattgctaccccaaccttcgttgccgataaagacggtgcacgacaaactgggttgctggatcctggcatgctggtgaatatccaacaacccctgatacgcgaggacggcaccgtgttactagcgacagacagcaaggccgaaacctcccagggagccctgggcaccctggcgaatgtggtaacgtctctcgccaacttgtccgaatcactgaacaatggggacacatctgaaattcagccagaggaccagagcgctagtgagatcaccagagcgttcgacaccctcgcgaaagcattgaataccaccgactccagctcatcccctagtctggccgatggaatagacactagtgggggagggtctatccacgttataagcagggatcagagcactccaatcattgaagtggaaggacctctcctctcagacactcatgtcacctttaaactgacaatgccttccccgatgcccgagtacctaaacgtgcattatatttgtgagtcagccagcagacttctgttcctgagtatgcactgggccaggagcatccccgcattccaggctctcggtcaagactgtaataccagcctggtgcgtgcctgttggaacgagttgttcaccctggggctggcccagtgtgctcaggtcatgagcctgtcgactattcttgccgcaatcgtcaatcatctccagaacagcatccaggaagacaaattgtccggcgaccgaattaaacaggtgatggagcacatttggaagctccaagaattctgcaacagtatggcgaaattggatatcgatggctatgagtatgcataccttaaggcaattgtgttgttctctcccgaccacccgggtctaacgtccacatcccagattgagaaatttcaagaaaaagcccagatggaactgcaggattacgtccaaaaaacctattccgaggatacctatagattggctcgcatcctggtacggcttcctgccctgcgccttatgtcgtctaatatcacagaagagctgtttttcaccggtctgatcggcaatgtctctatagattccatcattccctatattctcaagatggagacagccgagtataatggccaaattacaggagcatcgctctag

SEQ ID NO: 137176 - DNA, 618 bp, Artificial Sequence
  derived and/or modified sequence
atgacctctcctagccccagaatccagatcatctctaccgattccgcggtggctagtccgcagcgcattcaggggagtgagccagcctcaggccctctgagtgtttttacatccctaaacaaggaaaagatcgtaacagatcagcagacaggacagaaaatacagatcgtaactgccgtcgatgcctcaggctcccccaagcagcaattcatccttaccagccccgatggagccggtactggaaaagtaatcctggccagtcccgagacttcttctgctaaacagctgatcttcacaacatccgacaatttagttcctggacgcatccagatcgtcaccgactctgcttctgtcgagcggcttctaggcaaaaccgacgtgcaaaggccccaagttgtcgaatactgcgtcgtgtgtggggataaagccagtggaagacactacggcgcagtatcatgtgagggctgtaaggggtttttcaaacgcagcgttaggaagaatctcacctatagctgcaggagcaaccaggattgcattatcaacaaacatcatcggaaccgctgccagttttgtaggctaaagaagtgtctggagatgggaatgaagatggaatgctag

SEQ ID NO: 137177 - DNA, 1848 bp, Artificial Sequence
  derived and/or modified sequence
atgaccagccccagccccagaatccagatcatcagcaccgacagcgccgtggccagcccccagagaatccagggcagcgagcccgccagcggccccctgagcgtgttcaccagcctgaacaaggagaagatcgtgaccgaccagcagaccggccagaagatccagatcgtgaccgccgtggacgccagcggcagccccaagcagcagttcatcctgaccagccccgacggcgccggcaccggcaaggtgatcctggccagccccgagaccagcagcgccaagcagctgatcttcaccaccagcgacaacctggtgcccggcagaatccagatcgtgaccgacagcgccagcgtggagagactgctgggcaagaccgacgtgcagagaccccaggtggtggagtactgcgtggtgtgcggcgacaaggccagcggcagacactacggcgccgtgagctgcgagggctgcaagggcttcttcaagagaagcgtgagaaagaacctgacctacagctgcagaagcaaccaggactgcatcatcaacaagcaccacagaaacagatgccagttctgcagactgaagaagtgcctggagatgggcatgaagatggagagcgtgcagagcgagagaaagcccttcgacgtgcagagagagaagcccagcaactgcgccgccagcaccgagaagatctacatcagaaaggacctgagaagccccctgatcgccacccccaccttcgtggccgacaaggacggcgccagacagaccggcctgctggaccccggcatgctggtgaacatccagcagcccctgatcagagaggacggcaccgtgctgctggccaccgacagcaaggccgagaccagccagggcgccctgggcaccctggccaacgtggtgaccagcctggccaacctgagcgagagcctgaacaacggcgacaccagcgagatccagcccgaggaccagagcgccagcgagatcaccagagccttcgacaccctggccaaggccctgaacaccaccgacagcagcagcagccccagcctggccgacggcatcgacaccagcggcggcggcagcatccacgtgatcagcagagaccagagcacccccatcatcgaggtggagggccccctgctgagcgacacccacgtgaccttcaagctgaccatgcccagccccatgcccgagtacctgaacgtgcactacatctgcgagagcgccagcagactgctgttcctgagcatgcactgggccagaagcatccccgccttccaggccctgggccaggactgcaacaccagcctggtgagagcctgctggaacgagctgttcaccctgggcctggcccagtgcgcccaggtgatgagcctgagcaccatcctggccgccatcgtgaaccacctgcagaacagcatccaggaggacaagctgagcggcgacagaatcaagcaggtgatggagcacatctggaagctgcaggagttctgcaacagcatggccaagctggacatcgacggctacgagtacgcctacctgaaggccatcgtgctgttcagccccgaccaccccggcctgaccagcaccagccagatcgagaagttccaggagaaggcccagatggagctgcaggactacgtgcagaagacctacagcgaggacacctacagactggccagaatcctggtgagactgcccgccctgagactgatgagcagcaacatcaccgaggagctgttcttcaccggcctgatcggcaacgtgagcatcgacagcatcatcccctacatcctgaagatggagaccgccgagtacaacggccagatcaccggcgccagcctgtag

SEQ ID NO: 137178 - DNA, 618 bp, Artificial Sequence
  derived and/or modified sequence
atgaccagccccagccccagaatccagatcatcagcaccgacagcgccgtggccagcccccagagaatccagggcagcgagcccgccagcggccccctgagcgtgttcaccagcctgaacaaggagaagatcgtgaccgaccagcagaccggccagaagatccagatcgtgaccgccgtggacgccagcggcagccccaagcagcagttcatcctgaccagccccgacggcgccggcaccggcaaggtgatcctggccagccccgagaccagcagcgccaagcagctgatcttcaccaccagcgacaacctggtgcccggcagaatccagatcgtgaccgacagcgccagcgtggagagactgctgggcaagaccgacgtgcagagaccccaggtggtggagtactgcgtggtgtgcggcgacaaggccagcggcagacactacggcgccgtgagctgcgagggctgcaagggcttcttcaagagaagcgtgagaaagaacctgacctacagctgcagaagcaaccaggactgcatcatcaacaagcaccacagaaacagatgccagttctgcagactgaagaagtgcctggagatgggcatgaagatggagtgctag

SEQ ID NO: 137179 - protein, 803 aa, Artificial Sequence
  derived and/or modified sequence
MRALWVLGLCCVLLTFGSVRADDEVDVDGTVEEDLGKSREGSRTDDEVVQREEEAIQLDGLNASQIRELREKSEKFAFQAEVNRMMKLIINSLYKNKEIFLRELISNASDALDKIRLISLTDENALSGNEELTVKIKCDKEKNLLHVTDTGVGMTREELVKNLGTIAKSGTSEFLNKMTEAQEDGQSTSELIGQFGVGFYSAFLVADKVIVTSKHNNDTQHIWESDSNEFSVIADPRGNTLGRGTTITLVLKEEASDYLELDTIKNLVKKYSQFINFPIYVWSSKTETVEEPMEEEEAAKEEKEESDDEAAVEEEEEEKKPKTKKVEKTVWDWELMNDIKPIWQRPSKEVEEDEYKAFYKSFSKESDDPMAYIHFTAEGEVTFKSILFVPTSAPRGLFDEYGSKKSDYIKLYVRRVFITDDFHDMMPKYLNFVKGVVDSDDLPLNVSRETLQQHKLLKVIRKKLVRKTLDMIKKIADDKYNDTFWKEFGTNIKLGVIEDHSNRTRLAKLLRFQSSHHPTDITSLDQYVERMKEKQDKIYFMAGSSRKEAESSPFVERLLKKGYEVIYLTEPVDEYCIQALPEFDGKRFQNVAKEGVKFDESEKTKESREAVEKEFEPLLNWMKDKALKDKIEKAVVSQRLTESPCALVASQYGWSGNMERIMKAQAYQTGKDISTNYYASQKKTFEINPRHPLIRDMLRRIKEDEDDKTVLDLAVVLFETATLRSGYLLPDTKAYGDRIERMLRLSLNIDPDAKVEEEPEEEPEETAEDTTEDTEQDEDEEMDVGTDEEEETAKESTAEKDEL

SEQ ID NO: 137180 - protein, 553 aa, Artificial Sequence
  derived and/or modified sequence
MRALWVLGLCCVLLTFGSVRADDEVDVDGTVEEDLGKSREGSRTDDEAAKEEKEESDDEAAVEEEEEEKKPKTKKVEKTVWDWELMNDIKPIWQRPSKEVEEDEYKAFYKSFSKESDDPMAYIHFTAEGEVTFKSILFVPTSAPRGLFDEYGSKKSDYIKLYVRRVFITDDFHDMMPKYLNFVKGVVDSDDLPLNVSRETLQQHKLLKVIRKKLVRKTLDMIKKIADDKYNDTFWKEFGTNIKLGVIEDHSNRTRLAKLLRFQSSHHPTDITSLDQYVERMKEKQDKIYFMAGSSRKEAESSPFVERLLKKGYEVIYLTEPVDEYCIQALPEFDGKRFQNVAKEGVKFDESEKTKESREAVEKEFEPLLNWMKDKALKDKIEKAVVSQRLTESPCALVASQYGWSGNMERIMKAQAYQTGKDISTNYYASQKKTFEINPRHPLIRDMLRRIKEDEDDKTVLDLAVVLFETATLRSGYLLPDTKAYGDRIERMLRLSLNIDPDAKVEEEPEEEPEETAEDTTEDTEQDEDEEMDVGTDEEEETAKESTAEKDEL

SEQ ID NO: 137181 - protein, 315 aa, Artificial Sequence [sequence omitted]

SEQ ID NO: 137182 - DNA, 2412 bp, Artificial Sequence
  derived and/or modified sequence
atgagagccctgtgggtgctgggcctgtgctgcgtgctgctgaccttcggcagcgtgagagccgacgacgaggtggacgtggacggcaccgtggaggaggacctgggcaagagcagagagggcagcagaaccgacgacgaggtggtgcagagagaggaggaggccatccagctggacggcctgaacgccagccagatcagagagctgagagagaagagcgagaagttcgccttccaggccgaggtgaacagaatgatgaagctgatcatcaacagcctgtacaagaacaaggagatcttcctgagagagctgatcagcaacgccagcgacgccctggacaagatcagactgatcagcctgaccgacgagaacgccctgagcggcaacgaggagctgaccgtgaagatcaagtgcgacaaggagaagaacctgctgcacgtgaccgacaccggcgtgggcatgaccagagaggagctggtgaagaacctgggcaccatcgccaagagcggcaccagcgagttcctgaacaagatgaccgaggcccaggaggacggccagagcaccagcgagctgatcggccagttcggcgtgggcttctacagcgccttcctggtggccgacaaggtgatcgtgaccagcaagcacaacaacgacacccagcacatctgggagagcgacagcaacgagttcagcgtgatcgccgaccccagaggcaacaccctgggcagaggcaccaccatcaccctggtgctgaaggaggaggccagcgactacctggagctggacaccatcaagaacctggtgaagaagtacagccagttcatcaacttccccatctacgtgtggagcagcaagaccgagaccgtggaggagcccatggaggaggaggaggccgccaaggaggagaaggaggagagcgacgacgaggccgccgtggaggaggaggaggaggagaagaagcccaagaccaagaaggtggagaagaccgtgtgggactgggagctgatgaacgacatcaagcccatctggcagagacccagcaaggaggtggaggaggacgagtacaaggccttctacaagagcttcagcaaggagagcgacgaccccatggcctacatccacttcaccgccgagggcgaggtgaccttcaagagcatcctgttcgtgcccaccagcgcccccagaggcctgttcgacgagtacggcagcaagaagagcgactacatcaagctgtacgtgagaagagtgttcatcaccgacgacttccacgacatgatgcccaagtacctgaacttcgtgaagggcgtggtggacagcgacgacctgcccctgaacgtgagcagagagaccctgcagcagcacaagctgctgaaggtgatcagaaagaagctggtgagaaagaccctggacatgatcaagaagatcgccgacgacaagtacaacgacaccttctggaaggagttcggcaccaacatcaagctgggcgtgatcgaggaccacagcaacagaaccagactggccaagctgctgagattccagagcagccaccaccccaccgacatcaccagcctggaccagtacgtggagagaatgaaggagaagcaggacaagatctacttcatggccggcagcagcagaaaggaggccgagagcagccccttcgtggagagactgctgaagaagggctacgaggtgatctacctgaccgagcccgtggacgagtactgcatccaggccctgcccgagttcgacggcaagagattccagaacgtggccaaggagggcgtgaagttcgacgagagcgagaagaccaaggagagcagagaggccgtggagaaggagttcgagcccctgctgaactggatgaaggacaaggccctgaaggacaagatcgagaaggccgtggtgagccagagactgaccgagagcccctgcgccctggtggccagccagtacggctggagcggcaacatggagagaatcatgaaggcccaggcctaccagaccggcaaggacatcagcaccaactactacgccagccagaagaagaccttcgagatcaaccccagacaccccctgatcagagacatgctgagaagaatcaaggaggacgaggacgacaagaccgtgctggacctggccgtggtgctgttcgagaccgccaccctgagaagcggctacctgctgcccgacaccaaggcctacggcgacagaatcgagagaatgctgagactgagcctgaacatcgaccccgacgccaaggtggaggaggagcccgaggaggagcccgaggagaccgccgaggacaccaccgaggacaccgagcaggacgaggacgaggagatggacgtgggcaccgacgaggaggaggagaccgccaaggagagcaccgccgagaaggacgagctgtag

SEQ ID NO: 137183 - DNA, 1662 bp, Artificial Sequence
  derived and/or modified sequence
atgagagccctgtgggtgctgggcctgtgctgcgtgctgctgaccttcggcagcgtgagagccgacgacgaggtggacgtggacggcaccgtggaggaggacctgggcaagagcagagagggcagcagaaccgacgacgaggccgccaaggaggagaaggaggagagcgacgacgaggccgccgtggaggaggaggaggaggagaagaagcccaagaccaagaaggtggagaagaccgtgtgggactgggagctgatgaacgacatcaagcccatctggcagagacccagcaaggaggtggaggaggacgagtacaaggccttctacaagagcttcagcaaggagagcgacgaccccatggcctacatccacttcaccgccgagggcgaggtgaccttcaagagcatcctgttcgtgcccaccagcgcccccagaggcctgttcgacgagtacggcagcaagaagagcgactacatcaagctgtacgtgagaagagtgttcatcaccgacgacttccacgacatgatgcccaagtacctgaacttcgtgaagggcgtggtggacagcgacgacctgcccctgaacgtgagcagagagaccctgcagcagcacaagctgctgaaggtgatcagaaagaagctggtgagaaagaccctggacatgatcaagaagatcgccgacgacaagtacaacgacaccttctggaaggagttcggcaccaacatcaagctgggcgtgatcgaggaccacagcaacagaaccagactggccaagctgctgagattccagagcagccaccaccccaccgacatcaccagcctggaccagtacgtggagagaatgaaggagaagcaggacaagatctacttcatggccggcagcagcagaaaggaggccgagagcagccccttcgtggagagactgctgaagaagggctacgaggtgatctacctgaccgagcccgtggacgagtactgcatccaggccctgcccgagttcgacggcaagagattccagaacgtggccaaggagggcgtgaagttcgacgagagcgagaagaccaaggagagcagagaggccgtggagaaggagttcgagcccctgctgaactggatgaaggacaaggccctgaaggacaagatcgagaaggccgtggtgagccagagactgaccgagagcccctgcgccctggtggccagccagtacggctggagcggcaacatggagagaatcatgaaggcccaggcctaccagaccggcaaggacatcagcaccaactactacgccagccagaagaagaccttcgagatcaaccccagacaccccctgatcagagacatgctgagaagaatcaaggaggacgaggacgacaagaccgtgctggacctggccgtggtgctgttcgagaccgccaccctgagaagcggctacctgctgcccgacaccaaggcctacggcgacagaatcgagagaatgctgagactgagcctgaacatcgaccccgacgccaaggtggaggaggagcccgaggaggagcccgaggagaccgccgaggacaccaccgaggacaccgagcaggacgaggacgaggagatggacgtgggcaccgacgaggaggaggagaccgccaaggagagcaccgccgagaaggacgagctgtag

SEQ ID NO: 137184 - DNA, 948 bp, Artificial Sequence
  derived and/or modified sequence
atgagagccctgtgggtgctgggcctgtgctgcgtgctgctgaccttcggcagcgtgagagccgacgacgaggtggacgtggacggcaccgtggaggaggacctgggcaagagcagagagggcagcagaaccgacgacgaggtggtgcagagagaggaggaggccatccagctggacggcctgaacgccagccagatcagagagctgagagagaagagcgagaagttcgccttccaggccgaggtgaacagaatgatgaagctgatcatcaacagcctgtacaagaacaaggagatcttcctgagagagctgatcagcaacgccagcgacgccctggacaagatcagactgatcagcctgaccgacgagaacgccctgagcggcaacgaggagctgaccgtgaagatcaagtgcgacaaggagaagaacctgctgcacgtgaccgacaccggcgtgggcatgaccagagaggagctggtgaagaacctgggcaccatcgccaagagcggcaccagcgagttcctgaacaagatgaccgaggcccaggaggacggccagagcaccagcgagctgatcggccagttcggcgtgggcttctacagcgccttcctggtggccgacaaggtgatcgtgaccagcaagcacaacaacgacacccagcacatctgggagagcgacagcaacgagttcagcgtgatcgccgaccccagaggcaacaccctgggcagaggcaccaccatcaccctggtgctgaaggaggaggccagcgactacctggagctggacaccatcaagaacctggtgaagaagtacagccagttcatcaacttccccatctacgtgtggagcagcaagaccgagaccgtggaggagcccatggaggaggaggaggccgccaaggaggagaaggaggagagcgacgacgaggccgccgccagaagaagatag

SEQ ID NO: 137185 - DNA, 2412 bp, Artificial Sequence
  derived and/or modified sequence
atgagggctctgtgggtgctgggtctgtgttgtgtgctgctcacctttgggtctgtaagagctgatgacgaggtggacgttgacggcacagtagaagaagatcttggtaaaagtagagaagggtcaaggaccgacgacgaagttgtgcaacgggaggaagaggcgattcagttagatggcctgaacgccagccagattcgtgagttgagagagaagagtgagaagtttgccttccaggccgaagttaatcgcatgatgaaactcattatcaacagtctgtacaagaataaagagattttcctgagagaactgatctccaatgcctccgatgcgctcgataagatccgattgatctccctgacagacgagaatgccctctctgggaacgaagaactgactgtcaaaatcaaatgtgacaaggagaagaacttgctgcatgtgaccgacacgggagtcgggatgacccgcgaggagctggtgaagaatctcgggactatcgccaagtcaggcacttctgagtttcttaataagatgacagaggctcaagaagacgggcagtccaccagcgaactgatcgggcagttcggagtgggattttactcagcgttccttgtcgccgacaaagtaattgttacttcaaaacacaacaacgatacccagcacatttgggaaagcgactctaacgaattcagtgtgatcgcggacccacgagggaacaccttaggcagagggaccaccataacacttgtgctgaaggaggaggcttccgactacttggagctggatacaatcaaaaatctggtaaaaaagtattcacagtttatcaattttcccatctatgtgtggtcctccaaaaccgaaaccgtcgaagaacccatggaggaagaggaggctgccaaagaggagaaagaagaaagcgatgacgaagctgccgtagaagaagaagaggaggagaaaaagcctaagacgaagaaggtcgagaagacagtgtgggactgggagctgatgaatgatatcaaacctatctggcaaaggccttccaaagaggtggaggaagacgagtataaggcattctacaaaagtttcagcaaggagagtgatgatcctatggcctatatccactttactgcagaaggcgaagttacatttaaaagcatcttgttcgttcccacttctgcaccccgggggctttttgatgaatacgggagcaagaagtctgactacatcaaactgtatgtgagaagggtttttattacggacgattttcatgatatgatgcctaagtacctgaacttcgtaaagggggtggtggatagcgacgacctgccactcaatgtttcccgggagaccttgcagcagcataaacttctgaaggtgatccggaagaagctggtcagaaaaaccctagacatgatcaagaaaatagcagatgacaagtacaatgacaccttttggaaagaatttggtacaaacatcaaactcggcgtcatcgaggaccatagcaatcggacaagactcgccaagttgcttagattccagagctcgcaccaccccaccgatatcaccagcttggatcagtatgtcgaacggatgaaggaaaagcaggataaaatttatttcatggccggttcgtctagaaaggaagccgaaagcagccccttcgttgagagattgctgaagaaggggtacgaggtgatatatttaaccgagcccgtggatgagtactgtatccaggccctccctgaattcgatggcaaacgctttcagaacgtggcgaaggagggcgtgaagtttgacgagtctgagaagactaaagagtccagggaggcagttgaaaaggagttcgagcccctgctcaactggatgaaagacaaggctttgaaagacaagatcgaaaaggcagtggtctcacaaagactgaccgagtctccatgcgcattagttgcgtcacaatatgggtggtccgggaatatggagagaattatgaaggcccaggcataccagaccggtaaggatataagtactaattactacgcaagccagaagaaaactttcgagatcaatccgcgacaccctcttattagagacatgctgcggagaataaaggaagacgaggatgacaaaacggttctagatctagccgtggtccttttcgagacagcaacgctaagatctggttacctcttacccgacactaaggcctacggcgacaggatagaaaggatgcttcgactctctctgaacattgaccctgatgcaaaggtagaagaagagccagaagaagagcccgaggaaacagccgaggatacaacagaggatacagagcaggatgaagatgaagaaatggatgtcgggacggacgaagaagaagaaacagccaaggagagcactgccgagaaagacgaactgtag

SEQ ID NO: 137186 - DNA, 1662 bp, Artificial Sequence
  derived and/or modified sequence
atgagagcgctttgggtgctgggcttgtgctgtgtgttgctgacttttggaagtgttcgcgcagatgatgaagtggatgtggacggcacagtggaagaagacttaggaaagtctcgagagggctcccggacagatgatgaggctgccaaagaagaaaaagaggaaagcgatgacgaagcggcagtggaggaagaagaagaagagaaaaagccgaagactaaaaaagttgagaaaaccgtgtgggactgggagctgatgaacgatattaagccaatatggcagaggccaagcaaagaggtggaagaggacgagtataaggcattctataagtcgttttcgaaggaatcagacgaccctatggcctacatacacttcaccgcggaaggcgaggtgacttttaagtcaattctgtttgtaccaacaagcgctcccagaggcctcttcgacgagtacggcagcaaaaaaagcgattacatcaaactgtacgtgaggagagtgttcattacggacgatttccatgatatgatgcccaagtacctgaactttgtgaagggagtggtggattctgacgatcttccactgaacgtttctcgtgagactctccaacagcacaaactgttgaaggttatccgcaaaaagcttgttaggaagactcttgatatgataaagaaaattgccgacgacaaatacaacgacacattttggaaggagttcggcaccaacatcaagttaggtgtcattgaagaccactccaaccgtaccaggctggcaaagcttctgcggttccagagttcccatcatcctaccgacataacatctcttgaccagtacgtggagcggatgaaagagaagcaggataagatctacttcatggcgggcagctcccgaaaggaggcggaatcctctccttttgtagaaagattattaaaaaagggttatgaggtgatatacctgactgagccagtggatgaatactgcattcaggcccttccagaattcgatggaaaacgctttcagaacgtggcaaaggagggagtaaagtttgacgagtctgagaagaccaaggagagccgggaggcggtggaaaaagagtttgagccactactgaactggatgaaagacaaggctttgaaggacaaaatcgaaaaggctgtggttagccagaggctgacagagtccccatgcgcgctggtggccagccaatacgggtggagcgggaatatggagcggatcatgaaggctcaggcttaccagaccggaaaagacatttcaaccaactactatgcgtcacaaaagaaaacctttgaaattaatccccgccatccccttattcgtgacatgctcaggcggataaaagaggacgaggacgacaaaaccgttctagacctcgcagtcgttctcttcgaaacagccacactgagatcaggctatctattaccagacactaaggcttatggcgatcggatcgaacgcatgttgcggctgtcccttaatatcgaccccgatgctaaggtagaagaggagcccgaagaagaaccggaggagaccgcagaggacacaacggaagacactgaacaagacgaagatgaagagatggatgtgggcaccgacgaggaggaggaaaccgctaaggagtcaaccgccgaaaaggatgaactgtag

SEQ ID NO: 137187 - DNA, 948 bp, Artificial Sequence
  derived and/or modified sequence
atgagagcgttatgggtgttaggcctctgctgtgtcctgctgacatttggctccgtgcgagctgacgacgaggtggacgttgatggtacggtggaggaggatctgggcaagtcaagggaggggagccggacagatgacgaagtcgtacagagggaggaggaagccattcagcttgatggcctgaacgcttcccagattagagagttgagagaaaaatcggagaagttcgcctttcaggcagaggtgaatcggatgatgaagctgataataaattccctatacaaaaacaaagagattttcctgagagagctgatctcaaatgcttcggacgcgcttgataaaatcagactcataagcctcacagatgaaaacgctttgagtggaaatgaagaactgaccgtcaagataaaatgcgataaggagaagaacttgcttcatgtgacagatacaggcgtcggtatgaccagggaggaactggttaaaaacctcgggaccatagctaagtcaggcacttcagaatttctcaataaaatgaccgaagcacaggaggatgggcaatctacaagtgagcttatcggccagtttggggttgggttttactctgccttcttagtcgccgacaaggtaatcgtgactagtaagcacaataatgacacccagcacatctgggagagcgatagcaacgaattcagcgtcatagcagaccccagggggaataccctgggccgcggaacgaccataacactggtgttaaaggaagaagcatcggactatttagaactggacaccatcaaaaaccttgtgaagaagtactctcagttcattaattttcccatctacgtgtggtcctccaaaaccgagactgtcgaagagcccatggaagaagaagaggccgcaaaggaagagaaggaggagtcggatgacgaggccgcagcgcgacgccgctag

SEQ ID NO: 137188 - DNA, 2858 bp, Artificial Sequence
  derived and/or modified sequence
gattggtgggttcatgtttcccgtcccccgcccgcgggaagtgggggtgaaaagcggcccgacctgcttgcggtgtagtgggcggaccgcgcggctggaggtgtgaggatccgaacccaggggtggggggtggaggcggctcctgcgatcgaaggggacttgagactcaccggccgcacgccatgagggccctgtgggtgctgggcctctgctgcgtcctgctgaccttcgggtcggtcagagctgacgatgaagttgatgtggatggtacagtagaagaggatctgggtaaaagtagagaaggatcaaggacggatgatgaagtagtacagagagaggaagaagctattcagttggatggattaaatgcatcacaaataagagaacttagagagaagtcggaaaagtttgccttccaagccgaagttaacagaatgatgaaacttatcatcaattcattgtataaaaataaagagattttcctgagagaactgatttcaaatgcttctgatgctttagataagataaggctaatatcactgactgatgaaaatgctctttctggaaatgaggaactaacagtcaaaattaagtgtgataaggagaagaacctgctgcatgtcacagacaccggtgtaggaatgaccagagaagagttggttaaaaaccttggtaccatagccaaatctgggacaagcgagtttttaaacaaaatgactgaagcacaggaagatggccagtcaacttctgaattgattggccagtttggtgtcggtttctattccgccttccttgtagcagataaggttattgtcacttcaaaacacaacaacgatacccagcacatctgggagtctgactccaatgaattttctgtaattgctgacccaagaggaaacactctaggacggggaacgacaattacccttgtcttaaaagaagaagcatctgattaccttgaattggatacaattaaaaatctcgtcaaaaaatattcacagttcataaactttcctatttatgtatggagcagcaagactgaaactgttgaggagcccatggaggaagaagaagcagccaaagaagagaaagaagaatctgatgatgaagctgcagtagaggaagaagaagaagaaaagaaaccaaagactaaaaaagttgaaaaaactgtctgggactgggaacttatgaatgatatcaaaccaatatggcagagaccatcaaaagaagtagaagaagatgaatacaaagctttctacaaatcattttcaaaggaaagtgatgaccccatggcttatattcactttactgctgaaggggaagttaccttcaaatcaattttatttgtacccacatctgctccacgtggtctgtttgacgaatatggatctaaaaagagcgattacattaagctctatgtgcgccgtgtattcatcacagacgacttccatgatatgatgcctaaatacctcaattttgtcaagggtgtggtggactcagatgatctccccttgaatgtttcccgcgagactcttcagcaacataaactgcttaaggtgattaggaagaagcttgttcgtaaaacgctggacatgatcaagaagattgctgatgataaatacaatgatactttttggaaagaatttggtaccaacatcaagcttggtgtgattgaagaccactcgaatcgaacacgtcttgctaaacttcttaggttccagtcttctcatcatccaactgacattactagcctagaccagtatgtggaaagaatgaaggaaaaacaagacaaaatctacttcatggctgggtccagcagaaaagaggctgaatcttctccatttgttgagcgacttctgaaaaagggctatgaagttatttacctcacagaacctgtggatgaatactgtattcaggcccttcccgaatttgatgggaagaggttccagaatgttgccaaggaaggagtgaagttcgatgaaagtgagaaaactaaggagagtcgtgaagcagttgagaaagaatttgagcctctgctgaattggatgaaagataaagcccttaaggacaagattgaaaaggctgtggtgtctcagcgcctgacagaatctccgtgtgctttggtggccagccagtacggatggtctggcaacatggagagaatcatgaaagcacaagcgtaccaaacgggcaaggacatctctacaaattactatgcgagtcagaagaaaacatttgaaattaatcccagacacccgctgatcagagacatgcttcgacgaattaaggaagatgaagatgataaaacagttttggatcttgctgtggttttgtttgaaacagcaacgcttcggtcagggtatcttttaccagacactaaagcatatggagatagaatagaaagaatgcttcgcctcagtttgaacattgaccctgatgcaaaggtggaagaagagcccgaagaagaacctgaagagacagcagaagacacaacagaagacacagagcaagacgaagatgaagaaatggatgtgggaacagatgaagaagaagaaacagcaaaggaatctacagctgaaaaagatgaattgtaaattatactctcaccatttggatcctgtgtggagagggaatgtgaaatttacatcatttctttttgggagagacttgttttggatgccccctaatccccttctcccctgcactgtaaaatgtgggattatgggtcacaggaaaaagtgggttttttagttgaattttttttaacattcctcatgaatgtaaatttgtactatttaactgactattcttgatgtaaaatcttgtcatgtgtataaaaataaaaaagatcccaaata

SEQ ID NO: 137189 - DNA, 2035 bp, Artificial Sequence
  derived and/or modified sequence
gaaaagcggcccgacctgcttgcggtgtagtgggcggaccgcgcggctggaggtgtgaggatccgaacccaggggtggggggtggaggcggctcctgcgatcgaaggggacttgagactcaccggccgcacgccatgagggccctgtgggtgctgggcctctgctgcgtcctgctgaccttcgggtcggtcagagctgacgatgaagttgatgtggatggtacagtagaagaggatctgggtaaaagtagagaaggatcaaggacggatgatgaagcagccaaagaagagaaagaagaatctgatgatgaagctgcagtagaggaagaagaagaagaaaagaaaccaaagactaaaaaagttgaaaaaactgtctgggactgggaacttatgaatgatatcaaaccaatatggcagagaccatcaaaagaagtagaagaagatgaatacaaagctttctacaaatcattttcaaaggaaagtgatgaccccatggcttatattcactttactgctgaaggggaagttaccttcaaatcaattttatttgtacccacatctgctccacgtggtctgtttgacgaatatggatctaaaaagagcgattacattaagctctatgtgcgccgtgtattcatcacagacgacttccatgatatgatgcctaaatacctcaattttgtcaagggtgtggtggactcagatgatctccccttgaatgtttcccgcgagactcttcagcaacataaactgcttaaggtgattaggaagaagcttgttcgtaaaacgctggacatgatcaagaagattgctgatgataaatacaatgatactttttggaaagaatttggtaccaacatcaagcttggtgtgattgaagaccactcgaatcgaacacgtcttgctaaacttcttaggttccagtcttctcatcatccaactgacattactagcctagaccagtatgtggaaagaatgaaggaaaaacaagacaaaatctacttcatggctgggtccagcagaaaagaggctgaatcttctccatttgttgagcgacttctgaaaaagggctatgaagttatttacctcacagaacctgtggatgaatactgtattcaggcccttcccgaatttgatgggaagaggttccagaatgttgccaaggaaggagtgaagttcgatgaaagtgagaaaactaaggagagtcgtgaagcagttgagaaagaatttgagcctctgctgaattggatgaaagataaagcccttaaggacaagattgaaaaggctgtggtgtctcagcgcctgacagaatctccgtgtgctttggtggccagccagtacggatggtctggcaacatggagagaatcatgaaagcacaagcgtaccaaacgggcaaggacatctctacaaattactatgcgagtcagaagaaaacatttgaaattaatcccagacacccgctgatcagagacatgcttcgacgaattaaggaagatgaagatgataaaacagttttggatcttgctgtggttttgtttgaaacagcaacgcttcggtcagggtatcttttaccagacactaaagcatatggagatagaatagaaagaatgcttcgcctcagtttgaacattgaccctgatgcaaaggtggaagaagagcccgaagaagaacctgaagagacagcagaagacacaacagaagacacagagcaagacgaagatgaagaaatggatgtgggaacagatgaagaagaagaaacagcaaaggaatctacagctgaaaaagatgaattgtaaattatactctcaccatttggatcctgtgtggagagggaatgtgaaatttacatcatttctttttgggagagacttgttttggatgccccctaatccccttctcccctgcactgtaaaatgtgggattatgggtcacaggaaaaagtgggttttttagttgaattttttttaacattcctcatgaatgtaaatttgtactatttaactgactattcttgatgtaaaatcttgtcatgtgt

SEQ ID NO: 137190 - DNA, 1338 bp, Artificial Sequence
  derived and/or modified sequence
gaggatccgaacccaggggtggggggtggaggcggctcctgcgatcgaaggggacttgagactcaccggccgcacgccatgagggccctgtgggtgctgggcctctgctgcgtcctgctgaccttcgggtcggtcagagctgacgatgaagttgatgtggatggtacagtagaagaggatctgggtaaaagtagagaaggatcaaggacggatgatgaagtagtacagagagaggaagaagctattcagttggatggattaaatgcatcacaaataagagaacttagagagaagtcggaaaagtttgccttccaagccgaagttaacagaatgatgaaacttatcatcaattcattgtataaaaataaagagattttcctgagagaactgatttcaaatgcttctgatgctttagataagataaggctaatatcactgactgatgaaaatgctctttctggaaatgaggaactaacagtcaaaattaagtgtgataaggagaagaacctgctgcatgtcacagacaccggtgtaggaatgaccagagaagagttggttaaaaaccttggtaccatagccaaatctgggacaagcgagtttttaaacaaaatgactgaagcacaggaagatggccagtcaacttctgaattgattggccagtttggtgtcggtttctattccgccttccttgtagcagataaggttattgtcacttcaaaacacaacaacgatacccagcacatctgggagtctgactccaatgaattttctgtaattgctgacccaagaggaaacactctaggacggggaacgacaattacccttgtcttaaaagaagaagcatctgattaccttgaattggatacaattaaaaatctcgtcaaaaaatattcacagttcataaactttcctatttatgtatggagcagcaagactgaaactgttgaggagcccatggaggaagaagaagcagccaaagaagagaaagaagaatctgatgatgaagctgcagcaagacgaagatgaagaaatggatgtgggaacagatgaagaagaagaaacagcaaaggaatctacagctgaaaaagatgaattgtaaattatactctcaccatttggatcctgtgtggagagggaatgtgaaatttacatcatttctttttgggagagacttgttttggatgccccctaatccccttctcccctgcactgtaaaatgtgggattatgggtcacaggaaaaagtgggttttttagttgaattttttttaacattcctcatgaatgtaaatttgtactatttaactgactattcttgatgtaaaatcttgtcatgtgt

SEQ ID NO: 137191 - DNA, 2412 bp, Artificial Sequence
  derived and/or modified sequence
atgagggccctgtgggtgctgggcctgtgctgcgtgctgctgaccttcggctctgtgcgggcagatgatgaggtggatgtggatggcaccgtggaggaggacctgggcaagagccgggagggcagcaggacagatgatgaggtggtgcagcgggaggaggaggccatccagctggatggcctgaatgccagccagatccgggagctgcgggagaagtctgagaagtttgccttccaggccgaggtgaacaggatgatgaagctgatcatcaacagcctgtacaagaacaaggagatcttcctgcgggagctgatcagcaatgccagtgatgccctggacaagatccgcctcatcagcctgacagatgaaaatgccctgtctggaaatgaggagctgactgtgaagatcaagtgtgacaaggagaagaacctgctgcacgtgacagacaccggggtgggcatgacccgggaggagctggtgaagaacctgggcaccatcgccaagagcggcaccagcgagttcctgaacaagatgacagaggcccaggaggatggccagagcaccagcgagctgattggccagtttggagtgggcttctacagcgccttcctggtggccgacaaggtgattgtgaccagcaagcacaacaatgacacccagcacatctgggagagtgacagcaatgagttctctgtgattgctgacccccggggcaacaccctgggccggggcaccaccatcaccctggtgctgaaggaggaggccagtgactacctggagctggacaccatcaagaacctggtgaagaagtacagccagttcatcaacttccccatctacgtgtggagcagcaagacagagaccgtggaggagcccatggaggaggaggaggccgccaaggaggagaaggaggagagtgatgatgaggccgctgtggaggaggaggaggaggagaagaagcccaagaccaagaaggtggagaagacagtgtgggactgggagctgatgaatgacatcaagcccatctggcagaggcccagcaaggaggtggaggaggatgagtacaaggccttctacaagagcttcagcaaggagagtgatgaccccatggcctacatccacttcaccgctgagggggaggtgaccttcaagagcatcctgtttgtgcccaccagcgccccccggggcctgtttgatgaatatggcagcaagaagagtgactacatcaagctgtatgtgcggcgggtcttcatcacagatgacttccatgacatgatgcccaagtacctgaactttgtgaagggcgtggtggacagtgatgacctgcccctgaatgtgtcccgggagaccctgcagcagcacaagctgctgaaggtgatcaggaagaagctggtgaggaagaccctggacatgatcaagaagattgctgatgacaagtacaatgacaccttctggaaggagtttggcaccaacatcaagctgggcgtgattgaggaccacagcaacagaacccggctggccaagctgctgcgcttccagagcagccaccaccccacagacatcaccagcctggaccagtatgtggagaggatgaaggagaagcaggacaagatctacttcatggccggcagcagcaggaaggaggccgagagcagcccctttgtggagcggctgctgaagaagggctatgaagtcatctacctgacagagcctgtggatgagtactgcatccaggccctgcctgagtttgatggcaagcgcttccagaatgtggccaaggagggcgtgaagtttgatgaaagtgagaagaccaaggagagccgggaggccgtggagaaggagtttgagcccctgctgaactggatgaaggacaaggccctgaaggacaagattgagaaggctgtggtgtcccagaggctgacagagagcccctgtgccctggtggccagccagtatggctggagcggcaacatggagcgcatcatgaaggcccaggcctaccagacaggcaaggacatcagcaccaactactatgccagccagaagaagacctttgagatcaaccccaggcaccccctcatccgggacatgctgcggcgcatcaaggaggatgaagatgacaagacagtgctggacctggccgtggtgctgtttgaaacagccaccctgcggagcggctacctgctgcctgacaccaaggcctatggagacagaattgaaagaatgctgcggctgagcctgaacattgatcctgatgccaaggtggaggaggagcctgaggaggagcctgaggagacagctgaggacaccacagaggacacagagcaggatgaagatgaggagatggatgtgggcacagatgaggaggaggagacagccaaggagagcacagctgagaaggatgagctgtag

SEQ ID NO: 137192 - DNA, 1662 bp, Artificial Sequence
  derived and/or modified sequence
atgagggccctgtgggtgctgggcctgtgctgcgtgctgctgaccttcggctctgtgcgggcagatgatgaggtggatgtggatggcaccgtggaggaggacctgggcaagagccgggagggcagcaggacagatgatgaggccgccaaggaggagaaggaggagagtgatgatgaggccgctgtggaggaggaggaggaggagaagaagcccaagaccaagaaggtggagaagacagtgtgggactgggagctgatgaatgacatcaagcccatctggcagaggcccagcaaggaggtggaggaggatgagtacaaggccttctacaagagcttcagcaaggagagtgatgaccccatggcctacatccacttcaccgctgagggggaggtgaccttcaagagcatcctgtttgtgcccaccagcgccccccggggcctgtttgatgaatatggcagcaagaagagtgactacatcaagctgtatgtgcggcgggtcttcatcacagatgacttccatgacatgatgcccaagtacctgaactttgtgaagggcgtggtggacagtgatgacctgcccctgaatgtgtcccgggagaccctgcagcagcacaagctgctgaaggtgatcaggaagaagctggtgaggaagaccctggacatgatcaagaagattgctgatgacaagtacaatgacaccttctggaaggagtttggcaccaacatcaagctgggcgtgattgaggaccacagcaacagaacccggctggccaagctgctgcgcttccagagcagccaccaccccacagacatcaccagcctggaccagtatgtggagaggatgaaggagaagcaggacaagatctacttcatggccggcagcagcaggaaggaggccgagagcagcccctttgtggagcggctgctgaagaagggctatgaagtcatctacctgacagagcctgtggatgagtactgcatccaggccctgcctgagtttgatggcaagcgcttccagaatgtggccaaggagggcgtgaagtttgatgaaagtgagaagaccaaggagagccgggaggccgtggagaaggagtttgagcccctgctgaactggatgaaggacaaggccctgaaggacaagattgagaaggctgtggtgtcccagaggctgacagagagcccctgtgccctggtggccagccagtatggctggagcggcaacatggagcgcatcatgaaggcccaggcctaccagacaggcaaggacatcagcaccaactactatgccagccagaagaagacctttgagatcaaccccaggcaccccctcatccgggacatgctgcggcgcatcaaggaggatgaagatgacaagacagtgctggacctggccgtggtgctgtttgaaacagccaccctgcggagcggctacctgctgcctgacaccaaggcctatggagacagaattgaaagaatgctgcggctgagcctgaacattgatcctgatgccaaggtggaggaggagcctgaggaggagcctgaggagacagctgaggacaccacagaggacacagagcaggatgaagatgaggagatggatgtgggcacagatgaggaggaggagacagccaaggagagcacagctgagaaggatgagctgtag

SEQ ID NO: 137193 - DNA, 948 bp, Artificial Sequence
  derived and/or modified sequence
atgagggccctgtgggtgctgggcctgtgctgcgtgctgctgaccttcggctctgtgcgggcagatgatgaggtggatgtggatggcaccgtggaggaggacctgggcaagagccgggagggcagcaggacagatgatgaggtggtgcagcgggaggaggaggccatccagctggatggcctgaatgccagccagatccgggagctgcgggagaagtctgagaagtttgccttccaggccgaggtgaacaggatgatgaagctgatcatcaacagcctgtacaagaacaaggagatcttcctgcgggagctgatcagcaatgccagtgatgccctggacaagatccgcctcatcagcctgacagatgaaaatgccctgtctggaaatgaggagctgactgtgaagatcaagtgtgacaaggagaagaacctgctgcacgtgacagacaccggggtgggcatgacccgggaggagctggtgaagaacctgggcaccatcgccaagagcggcaccagcgagttcctgaacaagatgacagaggcccaggaggatggccagagcaccagcgagctgattggccagtttggagtgggcttctacagcgccttcctggtggccgacaaggtgattgtgaccagcaagcacaacaatgacacccagcacatctgggagagtgacagcaatgagttctctgtgattgctgacccccggggcaacaccctgggccggggcaccaccatcaccctggtgctgaaggaggaggccagtgactacctggagctggacaccatcaagaacctggtgaagaagtacagccagttcatcaacttccccatctacgtgtggagcagcaagacagagaccgtggaggagcccatggaggaggaggaggccgccaaggaggagaaggaggagagtgatgatgaggccgccgccaggagaagatag

SEQ ID NO: 137194 - DNA, 2412 bp, Artificial Sequence
  derived and/or modified sequence
atgcgggccctgtgggtgctgggcctgtgctgcgtgctgctgaccttcggatccgtacgcgcggatgacgaggtggatgttgatggtacagttgaggaagatctcgggaagtcacgcgagggttctagaacggatgacgaagtggtgcagcgggaggaggaggctattcaattggatggactcaatgcctcacagatcagggagctgcgagagaaatctgaaaagtttgcctttcaggcggaagtgaatcgcatgatgaaattgatcatcaactccctatataaaaataaggagatcttcctgagggaattgatttctaacgcatccgatgctctggataagatacgattgattagtctgacggacgagaatgcactgagcggcaacgaagagttgaccgtaaagataaagtgcgataaggaaaaaaacctgctgcatgtaaccgacaccggcgtcgggatgaccagagaggaactagtgaaaaacctgggcactattgcaaagtctggaacttccgagtttctgaataaaatgaccgaggctcaggaagacgggcagtctacttcagagctgatcgggcagtttggtgtcgggttctatagtgcttttctggtagcagataaggtgatcgtgaccagtaagcacaataacgatactcagcacatttgggagagcgatagcaacgagttttccgtaattgctgacccccgagggaatacactgggtagaggcactaccataacactggtcttgaaggaagaagcctccgactacctcgaactggacacaatcaagaatttggtcaaaaaatattctcagtttatcaatttcccaatctacgtatggagttctaaaaccgagacggtcgaggagcccatggaggaggaggaagcagctaaagaagagaaggaggagagcgatgatgaagccgcggtagaggaggaagaggaggaaaaaaagccgaagactaagaaggtggaaaagaccgtgtgggattgggaacttatgaacgacattaaacccatatggcagcgaccctcaaaagaggtggaggaggacgagtataaagccttctataagagcttttcgaaagaaagcgatgaccccatggcttacattcactttaccgcagaaggagaggtgacgttcaaatcaatactatttgtcccaaccagtgccccccgtggactgtttgatgagtacggctcgaaaaaatctgattatataaaactctacgtcagaagggtatttatcaccgatgattttcacgacatgatgcctaaatacctgaactttgtgaagggcgttgtcgatagcgacgacctgccgttgaatgttagccgcgaaacccttcagcagcataaactcctgaaagtcattagaaagaaattagtacgtaagaccctagacatgataaagaagattgccgatgataaatacaacgacacattctggaaagaattcggcactaacatcaaacttggtgtcatagaagatcatagcaatcgaactagactggcgaagctcctccgcttccagtcatcacaccacccaacagacataacaagcctggaccagtacgtagagaggatgaaagagaagcaggacaagatttacttcatggctggctctagccggaaagaagcggagtctagtccttttgtcgagcgactgttaaagaagggttatgaagtgatatacctcactgaaccagtggacgaatattgcatccaggcactccctgagtttgacggtaaacgatttcagaatgtcgcaaaagagggcgttaaatttgacgagagtgaaaagaccaaggaaagtagggaagcggtcgaaaaggagttcgaacccctattgaactggatgaaggataaagccctgaaagataagatagaaaaggctgtcgtttctcagagacttactgagagcccatgtgccttagtagccagccagtatggctggtcgggcaatatggaaaggattatgaaggcacaggcgtatcaaacgggcaaagacatatctacaaactactacgcctcacagaaaaagactttcgaaattaaccctcgacatccattgattcgtgatatgctgagaagaatcaaggaggatgaggacgacaagaccgtactggacttggccgtggtactgtttgagaccgcaactttgcggagcgggtacctccttcccgacactaaggcatatggggatcgcatagagcgtatgctccgcctttcgctgaacatcgaccctgatgccaaggttgaagaggagcccgaagaggagcccgaagagaccgcagaggacactaccgaagacactgaacaggacgaggacgaagagatggatgtgggcaccgacgaggaagaggagaccgcgaaagaatccacagccgaaaaagatgaactttag

SEQ ID NO: 137195 - DNA, 1662 bp, Artificial Sequence
  derived and/or modified sequence
atgcgggccctgtgggtgctgggcctgtgctgcgtgctgctgacctttggttctgtgagggcagatgatgaagtcgacgtcgatggaacagttgaagaggacttgggcaaaagtagggaggggtctagaacggacgacgaggcagcaaaagaagagaaagaagagtctgacgacgaggccgcggtcgaggaggaagaagaagaaaaaaaacctaaaacgaagaaggttgaaaaaacagtctgggactgggagctgatgaatgacataaaaccaatttggcagcgaccttcaaaggaggtggaagaggatgaatacaaggccttctataagtccttcagcaaggaatccgacgatcccatggcgtatatccacttcacggctgagggagaagtcacattcaagtcaattctttttgtgccgacttccgctccaagagggctgtttgacgaatatggatccaaaaagtcagattatataaagctgtacgtaagacgggtgttcatcacagacgatttccatgatatgatgcccaaatacctaaattttgtgaaaggtgttgtggacagtgatgacttacccctgaacgtgtctcgtgaaactctgcagcagcataagctactgaaagtcatccgaaagaaactggttcggaagacactggacatgatcaagaagatcgctgatgataaatacaatgatacattctggaaggagtttggaacgaatattaaactgggagtgatcgaggatcacagcaaccggacaaggctggctaaattgctacgcttccagtcaagccatcacccaaccgatattacctcactggaccaatatgtcgagagaatgaaggaaaagcaggacaagatttatttcatggccggctcatcaagaaaggaggcggagagctcacctttcgtggagagactgctcaaaaaaggctacgaggtgatctatctgactgagcccgtggatgaatactgcatacaggctttacctgagtttgatgggaagaggttccagaatgtggcaaaggaaggtgtcaagtttgatgagtctgagaagaccaaagaaagcagagaagcagtggagaaagagttcgagccgcttttgaactggatgaaggacaaggccctgaaagacaagatcgagaaagctgtggtctctcagcgcttaacggagagcccctgcgccttagtggcgtctcagtacggatggagcggcaacatggaaaggatcatgaaagcacaggcatatcaaacaggaaaggatatctcaacaaattactatgcgagccaaaagaaaacatttgaaattaatcccagacaccccctgattcgcgatatgcttcgtcgaatcaaagaagacgaagatgacaaaaccgtgctcgatcttgccgtcgtactctttgagaccgccacactacgtagcgggtaccttctgcctgacactaaggcatacggcgacaggattgagcggatgttgcggctgagcctgaacatcgatccagatgccaaggtggaggaggagccagaagaggaacctgaagaaactgccgaagataccaccgaagacacagaacaggacgaggatgaagagatggacgttggcacggatgaggaggaggagacggccaaagagagtacagccgagaaggacgaattgtag

SEQ ID NO: 137196 - DNA, 948 bp, Artificial Sequence
  derived and/or modified sequence
atgcgggccctgtgggtgctgggcctgtgctgcgtgctgctgaccttcggctccgtgagggcagatgacgaggtcgatgttgacggcaccgtcgaagaggacctgggaaagagccgggaagggtctcgcactgacgatgaggttgtccagcgagaggaggaagctattcaactagatggcctgaatgcctcacagatcagagagctgagagaaaaaagtgagaagtttgcctttcaagcggaggtaaataggatgatgaagttgattatcaattctctgtataaaaataaagagatttttttaagagagctcattagcaatgctagcgacgccttagacaaaatccgcctaatctcacttaccgacgaaaacgccctttctggcaacgaggaactcacagtgaagattaagtgcgacaaagaaaaaaatctcttgcatgtgacagatactggcgtcggcatgactcgggaagaactggtcaagaacctgggaactatagccaagtctggtaccagtgaattcttgaataaaatgacagaggcacaggaagacgggcagtcgacaagcgaactcattgggcagtttggggtcggcttctattcagcctttctggtcgcagataaagtcatcgttacttctaagcataacaacgatacccagcacatttgggagtctgattccaatgagttcagcgtgatcgccgacccacgcggcaataccctgggccgcggcaccacaatcaccctggtactgaaggaagaagccagcgattaccttgagttggataccattaaaaatctggttaagaaatattcccagtttattaatttccctatttatgtgtggagctccaaaactgagaccgttgaggaacccatggaggaggaggaggccgccaaagaggagaaggaggagtccgatgacgaagcagcagcccggcgtagatag

SEQ ID NO: 137197 - DNA, 2412 bp, Artificial Sequence
  derived and/or modified sequence
atgcgtgccctctgggtcctgggcctgtgctgcgtcctgctcacctttggctccgtccgagccgatgatgaggttgacgtggacgggaccgtcgaagaggacctgggcaaatctcgcgaggggtcacgaactgatgatgaggttgtgcaacgtgaggaagaagccattcagctggatgggctcaacgcctctcagatccgtgagctccgggagaagagtgagaagtttgcgttccaagccgaagtgaatcgcatgatgaagctgatcataaatagcctgtataagaataaggagatcttcctaagggaactgatctctaacgcgtcggatgctctagataaaataagattaatcagccttaccgatgaaaacgctctttcaggcaacgaggaactgaccgtcaagatcaagtgcgataaggagaaaaacctgcttcatgtgactgacactggagtgggaatgacacgtgaagagctggtcaaaaacctaggaaccatcgccaagtccggcacttccgagttcctaaacaaaatgactgaggcgcaagaagatggacaaagcacctctgagctaatcggacagttcggtgtgggtttctactcagcatttctcgtggctgacaaggtcatcgtcacttctaagcataataatgacactcaacatatctgggaatccgactccaatgagtttagcgtgatcgccgaccccaggggtaacaccttaggacgcggaactactataacgctggtgctgaaggaagaagcatccgattacttggagctggatacaattaagaacctggtgaagaaatatagtcagtttatcaacttccccatttacgtctggagctccaagaccgagacagtagaggaaccaatggaagaagaggaggcagctaaagaagagaaggaggagtccgacgacgaagcagctgtcgaagaagaagaagaagagaaaaaacccaaaaccaaaaaagtggaaaaaactgtgtgggactgggagctaatgaatgacatcaagcctatttggcaacgcccttccaaggaagttgaggaagatgagtacaaggcgttctacaaatcattcagcaaagaaagcgatgatcccatggcctacattcactttaccgcggaaggcgaagtaacatttaagtccattctgttcgtgccgacatccgctccaagaggattatttgatgagtatggctcaaagaagtccgactatatcaaactttacgttcgacgggtgttcataacagacgactttcacgacatgatgcctaaataccttaattttgtcaagggcgtagtggattccgatgacttacccctgaatgtttctcgtgagactctccagcagcacaaactgctgaaggttatcagaaaaaaactcgtgaggaaaacgctggatatgatcaagaagatcgctgatgataaatacaatgacaccttttggaaagagttcggcaccaacattaaactgggagtgatcgaagatcattccaatagaacccggctcgccaaactgctgcggttccagagctcccatcatccaaccgatattacatcactggaccagtacgtggagcgcatgaaggagaaacaagacaagatctattttatggctggaagttcacggaaggaagcggagagtagtccttttgtggagcggctccttaagaaaggctatgaggttatctacctaaccgagcctgtcgacgagtactgtatacaggctttacctgagttcgacggaaaaagattccagaatgttgcaaaagaaggggtgaaatttgatgagtctgaaaagactaaggagagtcgtgaagccgtcgagaaagaattcgagcccctccttaactggatgaaagataaggcactcaaggataagattgagaaggctgtggtgtctcagcgcctcacggagtcgccttgtgctctggttgcctcgcagtacgggtggagtggtaacatggagcggatcatgaaggcccaggcctaccaaacaggaaaagatatatcaacaaactattacgcctcccagaagaagacctttgagatcaatcctcggcatccactgatcagggacatgctgaggcggatcaaggaggacgaggatgacaagacagttctcgatcttgccgtagttctcttcgaaaccgctactctgaggtcggggtacctgttgcctgacaccaaagcctacggggaccggatcgagcggatgctgcggctttccctcaacatagatccagacgccaaggttgaggaagagcccgaggaagagccagaagagactgctgaagacacaacagaagacacagagcaggacgaggatgaggagatggatgtaggcacagacgaggaggaggaaacagcaaaagaatcgactgccgaaaaggacgaactctag

SEQ ID NO: 137198 - DNA, 1662 bp, Artificial Sequence
  derived and/or modified sequence
atgcgcgcactctgggtgcttggactgtgctgcgtgctgttaacttttggcagcgtacgcgctgacgacgaagtcgacgtggatggaaccgttgaggaggacctgggaaagagccgcgagggttcccggaccgatgacgaagctgccaaggaagagaaggaggagtccgatgatgaggcagctgttgaagaggaggaggaggaaaagaagcccaagacaaagaaagttgaaaaaaccgtgtgggattgggaactgatgaatgatattaaaccaatctggcaaaggccatcaaaagaggtagaagaggatgagtacaaagcgttctacaaaagcttctccaaagagtcagacgaccctatggcttatatccactttacggccgagggagaagttacatttaaatctattctctttgtcccgactagtgcgccacgaggccttttcgatgaatacggaagtaagaagtcagattacattaagctgtatgtgcgcagggtgtttatcacagatgacttccacgatatgatgccaaaatacctcaacttcgtgaagggagtcgtggactcagacgatctcccactcaacgtgtcgagggagacactgcagcaacacaagttattaaaagtgatccgaaagaagctcgtgaggaagacactggacatgatcaaaaagatagcagatgacaaatataatgataccttctggaaagaatttggaaccaatatcaaacttggagttatagaggatcactcaaatcgaactaggctggcaaaactgctgcgcttccaaagctcccaccacccaaccgacatcacttcgctggatcagtatgtggagaggatgaaggaaaaacaggataaaatctactttatggcagggtctagccgcaaggaagctgagtcctcccctttcgtcgagcggcttctgaagaaaggttatgaagttatctaccttactgagcccgtggacgaatactgcatccaagccctaccagagtttgatggaaaaagatttcagaatgtcgcgaaggaaggtgtgaaatttgacgagagcgaaaaaactaaagaatcccgggaagctgtggagaaagagttcgaacctctcttgaattggatgaaagataaagcactcaaagacaagatcgagaaggcagtggtgtcacaacgcttgaccgaaagcccatgcgcccttgtggcaagccaatacgggtggtccgggaacatggaaagaataatgaaggcacaggcctatcaaactggcaaggacattagtaccaattactacgccagtcagaagaagaccttcgaaatcaatcctcgccaccccttgatccgcgatatgctacggcgaatcaaagaagatgaagatgacaaaaccgtcctcgacctggcagtggtgctgtttgaaactgctaccttgagaagcgggtaccttctaccagatactaaagcctatggagatcggatcgagcgaatgctgcggctttcactgaacattgacccagacgccaaagtggaggaggagcccgaggaggaacccgaggaaacagccgaagacacaaccgaggacaccgagcaagatgaggacgaagaaatggacgtaggcaccgatgaagaggaagagacagccaaagaatctaccgccgagaaagacgagctgtag

SEQ ID NO: 137199 - DNA, 948 bp, Artificial Sequence
  derived and/or modified sequence
atgcgggctctgtgggtcctagggctttgttgcgtcctgctcacttttggatctgttcgggcagatgatgaagtcgatgtcgacggaaccgtcgaagaagacctgggaaagtctcgggaggggagcaggacggacgacgaagtagtccaaagggaggaagaggcgatccaactcgatggactgaatgcaagccagatcagagagttacgcgaaaagtccgaaaaatttgcctttcaggccgaagtcaatcgaatgatgaagctgataatcaacagcctgtacaagaataaagaaatctttctgcgtgaactgatttcaaacgcctcagacgctttggataaaatccgactcatatctctcacagacgaaaatgcactgtccggcaacgaagagctcactgtgaagatcaaatgcgataaggagaaaaatctcctgcacgtgacagatactggagttggtatgaccagagaggaacttgtgaaaaatctgggcacgatcgccaagtcaggcacttcagagttcttgaacaagatgactgaggctcaggaggatgggcagtcaacatcggagttaattggacagttcggagtgggcttctactcagcctttttagttgcagacaaggtcatcgtgacttcaaagcataataacgacacccaacacatttgggaaagcgactctaatgagttctctgtgatagctgacccacgaggtaatacactgggacggggaactacaataacactcgtacttaaagaagaagcctcagattatttggagctggacaccatcaaaaatcttgtaaagaaatactctcagttcattaactttcccatctatgtgtggtcaagcaagacagagaccgtagaagagcctatggaagaggaggaggcggctaaagaagagaaggaggagtcagatgacgaagcagccgctcgtagacgttag

SEQ ID NO: 137200 - protein, 568 aa, Artificial Sequence
  derived and/or modified sequence
MESSKKMDSPGALQTNPPLKLHTDRSAGTPVFVPEQGGYKEKFVKTVEDKYKCEKCHLVLCSPKQTECGHRFCESCMAALLSSSSPKCTACQESIVKDKVFKDNCCKREILALQIYCRNESRGCAEQLMLGHLLVHLKNDCHFEELPCVRPDCKEKVLRKDLRDHVEKACKYREATCSHCKSQVPMIALQKHEDTDCPCVVVSCPHKCSVQTLLRSELSAHLSECVNAPSTCSFKRYGCVFQGTNQQIKAHEASSAVQHVNLLKEWSNSLEKKVSLLQNESVEKNKSIQSLHNQICSFEIEIERQKEMLRNNESKILHLQRVIDSQAEKLKELDKEIRPFRQNWEEADSMKSSVESLQNRVTELESVDKSAGQVARNTGLLESQLSRHDQMLSVHDIRLADMDLRFQVLETASYNGVLIWKIRDYKRRKQEAVMGKTLSLYSQPFYTGYFGYKMCARVYLNGDGMGKGTHLSLFFVIMRGEYDALLPWPFKQKVTLMLMDQGSSRRHLGDAFKPDPNSSSFKKPTGEMNIASGCPVFVAQTVLENGTYIKDDTIFIKVIVDTSDLPDP

SEQ ID NO: 137201 - DNA, 1707 bp, Artificial Sequence
  derived and/or modified sequence
atggagagcagcaagaagatggacagccccggcgccctgcagaccaacccccccctgaagctgcacaccgacagaagcgccggcacccccgtgttcgtgcccgagcagggcggctacaaggagaagttcgtgaagaccgtggaggacaagtacaagtgcgagaagtgccacctggtgctgtgcagccccaagcagaccgagtgcggccacagattctgcgagagctgcatggccgccctgctgagcagcagcagccccaagtgcaccgcctgccaggagagcatcgtgaaggacaaggtgttcaaggacaactgctgcaagagagagatcctggccctgcagatctactgcagaaacgagagcagaggctgcgccgagcagctgatgctgggccacctgctggtgcacctgaagaacgactgccacttcgaggagctgccctgcgtgagacccgactgcaaggagaaggtgctgagaaaggacctgagagaccacgtggagaaggcctgcaagtacagagaggccacctgcagccactgcaagagccaggtgcccatgatcgccctgcagaagcacgaggacaccgactgcccctgcgtggtggtgagctgcccccacaagtgcagcgtgcagaccctgctgagaagcgagctgagcgcccacctgagcgagtgcgtgaacgcccccagcacctgcagcttcaagagatacggctgcgtgttccagggcaccaaccagcagatcaaggcccacgaggccagcagcgccgtgcagcacgtgaacctgctgaaggagtggagcaacagcctggagaagaaggtgagcctgctgcagaacgagagcgtggagaagaacaagagcatccagagcctgcacaaccagatctgcagcttcgagatcgagatcgagagacagaaggagatgctgagaaacaacgagagcaagatcctgcacctgcagagagtgatcgacagccaggccgagaagctgaaggagctggacaaggagatcagacccttcagacagaactgggaggaggccgacagcatgaagagcagcgtggagagcctgcagaacagagtgaccgagctggagagcgtggacaagagcgccggccaggtggccagaaacaccggcctgctggagagccagctgagcagacacgaccagatgctgagcgtgcacgacatcagactggccgacatggacctgagattccaggtgctggagaccgccagctacaacggcgtgctgatctggaagatcagagactacaagagaagaaagcaggaggccgtgatgggcaagaccctgagcctgtacagccagcccttctacaccggctacttcggctacaagatgtgcgccagagtgtacctgaacggcgacggcatgggcaagggcacccacctgagcctgttcttcgtgatcatgagaggcgagtacgacgccctgctgccctggcccttcaagcagaaggtgaccctgatgctgatggaccagggcagcagcagaagacacctgggcgacgccttcaagcccgaccccaacagcagcagcttcaagaagcccaccggcgagatgaacatcgccagcggctgccccgtgttcgtggcccagaccgtgctggagaacggcacctacatcaaggacgacaccatcttcatcaaggtgatcgtggacaccagcgacctgcccgacccctag

SEQ ID NO: 137202 - DNA, 1707 bp, Artificial Sequence
  derived and/or modified sequence
atggaatccagcaagaagatggattcaccgggggcccttcagaccaatccccctctgaagctgcacactgaccgatctgcagggactcctgttttcgtgcctgagcagggcggctataaagagaagttcgtgaagactgtggaagacaagtataaatgcgagaagtgtcacctggtgctctgttctccgaagcagaccgaatgtggtcatcgcttttgcgaatcttgcatggcagccttactctcctcctcttcgcccaagtgcacggcttgtcaagaatctatcgttaaggataaagtctttaaagataactgttgcaagagagaaatcctggctctgcagatttattgtcgcaacgaaagcaggggctgtgctgagcaactgatgctgggccacctcctggtgcacctgaagaatgactgtcacttcgaagagctcccctgcgtcaggcccgactgtaaggaaaaggtgctgagaaaggacctgcgtgaccacgtggaaaaggcgtgtaagtatagggaggcaacctgctctcactgcaaatcccaggtgccaatgatagcgcttcagaaacacgaggacactgattgtccttgcgttgtcgtttcatgcccgcacaagtgtagcgtccagacacttctcagatcggagctttctgcccacctgagtgagtgtgtcaacgcacctagcacttgcagtttcaagcgctacggctgtgtgtttcagggcaccaatcagcagatcaaggcccatgaggcctcctccgccgtgcagcatgtcaatctactgaaggaatggtcaaactccctggagaaaaaggtctcactgctccaaaatgagtccgtggagaagaacaagagcattcagtcgcttcacaaccagatctgcagttttgagatagagatagagaggcaaaaggaaatgctgcgtaacaacgaatctaaaatcctccacctgcagcgtgttatagattctcaggctgaaaaacttaaggagttggacaaggagattcggccatttcgtcagaattgggaggaggccgatagcatgaaaagcagcgttgagagcctacagaatcgagtgacagagctggagtccgtggataagagcgcagggcaagtggcacggaacactggcttgttagaaagtcagctgagccggcatgaccagatgctgtctgtgcatgacattaggctggcggacatggaccttcgattccaggttctcgagacagcctcgtacaatggtgtcttgatttggaagatcagggattataagaggaggaagcaggaggctgttatgggcaagacccttagcctatacagccagcccttctacaccggttacttcggctacaagatgtgtgcccgcgtgtacctcaacggcgacggtatgggtaaaggtacccacttgagtctatttttcgtcattatgcggggagagtacgatgcattgttgccatggccatttaagcagaaagtcactctgatgctaatggatcagggctcctcaagaaggcatctgggggatgcttttaaaccagatccgaacagcagttcctttaagaagccgaccggggaaatgaatattgcatccgggtgtcccgtctttgtggcacagaccgtcctcgagaatgggacatatattaaagacgataccattttcattaaagtaattgttgatactagcgacctacctgatccttag

SEQ ID NO: 137203 - DNA, 1707 bp, Artificial Sequence
  derived and/or modified sequence
atggagagtagcaaaaagatggactctcccggggctctgcagacaaatccccccttgaaactgcatacagatcgttcagccggaacccctgtgttcgttccagagcaagggggatataaggaaaagttcgttaaaaccgtagaagacaaatataaatgtgaaaaatgtcatctagttctctgttccccaaagcagacagaatgtggccatcgcttctgcgaaagttgcatggctgcattgctgagttcttccagtcctaagtgcaccgcctgtcaggaatccattgttaaagacaaggtctttaaggacaattgttgtaaaagagagattctggccttgcagatctactgcagaaacgagtcacgagggtgcgcagagcagctgatgctgggacacctactggtgcacttgaagaacgactgccactttgaggagttgccatgtgtgcgccctgactgtaaagaaaaagtgctgagaaaggacctgagagaccacgttgagaaagcatgcaaatacagggaggccacgtgcagccactgcaaatcccaagtgcccatgatcgcactccagaaacatgaggacaccgactgtccttgtgtggtggtctcttgccctcataaatgcagcgtacagaccctgctaagatcagagctttccgcgcatctatcagaatgtgtcaatgccccatcaacatgcagttttaaaagatatggctgcgtatttcagggtacaaaccagcaaatcaaggctcatgaggcaagcagtgccgtgcaacatgtcaacctgctcaaagagtggtccaactcgctcgagaagaaggtgagtctgctgcagaatgagtctgttgaaaagaacaaatctatacagtctcttcataatcagatctgttcgtttgagatcgaaatcgagcgccagaaagagatgctcagaaataacgagagcaagatcctgcacctccagagagtgatcgatagccaggcagaaaagcttaaggagctcgacaaggagatccggcccttcaggcagaattgggaagaagcagattcaatgaaatcgtctgtcgagagcttgcagaaccgggtaaccgaacttgaaagtgtggataaatctgctggacaagtggctcgaaacacaggtcttctggaatctcagctgtcaaggcacgatcaaatgctttctgtgcatgatataagactcgccgatatggatctgcgttttcaggttctggaaaccgctagctataatggcgtgcttatctggaaaatcagggactacaaaaggcggaagcaggaagccgtgatgggcaagaccttgtctttgtattctcagccgttctataccggttactttggttataagatgtgcgcgcgggtgtacttaaacggggatgggatgggcaaggggactcacctgtcgctcttctttgtgatcatgcggggggagtacgacgccctgctcccttggccctttaaacagaaggtaacattgatgctgatggaccagggatcctctagacgccatctcggtgatgctttcaagcctgatcccaacagtagcagctttaagaagccaacaggagaaatgaacatcgctagcggatgtcccgtattcgttgcccagacagtccttgagaacggaacatatattaaggacgacactatcttcattaaagtaattgtggatacgagtgatctccctgatccatag

SEQ ID NO: 137204 - DNA, 1707 bp, Artificial Sequence
  derived and/or modified sequence
atggagagcagcaagaagatggacagccctggggccctgcagaccaacccccccctgaagctgcacacagacagatctgctggcacccctgtgtttgtgcctgagcagggcggctacaaggagaagtttgtgaagacagtggaggacaagtacaagtgtgagaagtgccacctggtgctgtgcagccccaagcagacagaatgtggccaccgcttctgtgagagctgcatggccgccctgctgagcagcagcagccccaagtgcacagcctgccaggagagcatcgtgaaggacaaggtgttcaaggacaactgctgcaagcgggagatcctggccctgcagatctactgcagaaatgaaagccggggctgtgccgagcagctgatgctgggccacctgctggtgcacctgaagaatgactgccactttgaggagctgccctgtgtgcggccagactgcaaggagaaggtgctgaggaaggacctgcgggaccacgtggagaaggcctgcaagtaccgggaggccacctgcagccactgcaagagccaggtgcccatgattgccctgcagaagcatgaggacacagactgcccctgtgtggtggtgtcctgcccccacaagtgcagcgtgcagaccctgctgcggtctgagctgagcgcccacctgtctgaatgtgtgaatgcccccagcacctgcagcttcaagagatatggctgtgtgttccagggcaccaaccagcagatcaaggcccacgaggccagcagcgctgtgcagcacgtgaacctgctgaaggagtggagcaacagcctggagaagaaggtgtccctgctgcagaatgaatctgtggagaagaacaagagcatccagagcctgcacaaccagatctgcagctttgaaattgaaattgaaaggcagaaggagatgctgaggaacaatgaaagcaagatcctgcacctgcagagggtgattgacagccaggccgagaagctgaaggagctggacaaggagatccggcccttccggcagaactgggaggaggccgacagcatgaagagctctgtggagagcctgcagaacagagtgacagagctggagagcgtggacaagtctgctggccaggtggccaggaacacaggcctgctggagagccagctgagcagacatgaccagatgctgtctgtgcatgacatccggctggccgacatggacctgcgcttccaggtgctggagacagccagctacaatggagtgctgatctggaagatccgggactacaagaggaggaagcaggaggccgtgatgggcaagaccctgagcctgtacagccagcccttctacacaggctacttcggctacaagatgtgtgcccgggtgtacctgaatggagatggcatgggcaagggcacccacctgagcctcttctttgtgatcatgagaggagaatatgatgccctgctgccctggcccttcaagcagaaggtgaccctgatgctgatggaccagggcagcagcagaagacacctgggagatgccttcaagccagaccccaacagcagcagcttcaagaagcccactggagagatgaacatcgccagcggctgccctgtgtttgtggcccagacagtgctggagaatggcacctacatcaaggatgacaccatcttcatcaaggtgattgtggacaccagtgacctgcctgacccctag

SEQ ID NO: 137205 - DNA, 1707 bp, Artificial Sequence
  derived and/or modified sequence
atggagagcagcaagaagatggacagccccggcgccctgcagaccaaccctcctctgaaactgcatactgatagatcagccggcacccctgtgttcgtacccgaacagggtggctataaggagaagttcgtaaaaactgtggaggataagtataaatgtgagaaatgtcaccttgtcctctgtagccctaagcaaaccgaatgtggccaccgcttctgcgaaagttgcatggctgctctcctatcttcctcaagccctaagtgcaccgcctgccaggagagtattgtcaaggacaaggtatttaaggacaactgctgcaaacgggagatcctcgcccttcagatttactgtcggaatgaatcccgtgggtgcgctgagcagctgatgttgggccacttgcttgtacacttaaaaaacgattgtcatttcgaagaactcccttgtgtgaggcctgactgcaaggagaaagttctgcggaaggacttgcgggaccacgtcgagaaggcatgcaaatatcgtgaagcaacgtgtagccactgtaagtcccaggtacctatgatcgccttgcagaagcacgaggatacagattgtccttgtgtggtagtttcttgtccacacaaatgctctgttcaaaccctcttgcgcagcgaattatctgcccatttgtctgagtgcgtcaatgccccaagtacctgtagttttaaacggtacggttgtgtgttccaaggcaccaaccagcagattaaggcccacgaggcaagttctgccgttcaacacgtgaatcttctcaaggagtggtcaaactccctcgaaaagaaggtaagtctcctgcaaaacgagtccgttgaaaagaacaagtctatccaatctctgcataaccagatctgctctttcgagattgagatcgagcgccaaaaagagatgttacggaacaatgaaagtaagatcttgcatcttcagcgggtgatcgactcacaggctgaaaagctgaaagagctcgacaaggaaatccgcccattcagacagaattgggaagaggcagacagcatgaaatcatcggttgagtccttacagaatcgcgtgactgagctcgaatctgtcgataaaagcgcggggcaggtcgcaaggaataccggccttttggaatctcagctcagccggcacgaccagatgttgtccgtgcatgatatacgcctcgcagatatggatcttaggttccaggtccttgagactgccagctacaatggagtcctcatctggaaaattcgagactacaagaggcgaaaacaggaagcagtcatgggcaagacactgtccctctacagtcagccattttacaccggctacttcggatacaaaatgtgcgcccgggtgtacctgaacggggacggcatggggaagggaactcatctcagcctattcttcgttatcatgaggggtgaatacgatgccctgctgccgtggcctttcaaacaaaaagtgaccctcatgttgatggatcagggatcctcccgcaggcacttgggagatgccttcaaacctgaccctaattcaagcagttttaaaaagcctaccggtgaaatgaatattgcctccggctgcccggtcttcgtggcgcagacagtgctggagaatggcacctacatcaaggatgatactatattcatcaaggtaattgttgacaccagtgacttacctgacccatag

SEQ ID NO: 137206 - DNA, 1707 bp, Artificial Sequence
  derived and/or modified sequence
atggagagcagcaagaagatggacagccccggcgccctgcagaccaatccccccctcaaattacatactgatcggtctgctgggacaccggtattcgttccagagcagggaggatataaagaaaaattcgtcaaaaccgtggaagataagtataaatgcgagaagtgtcatctggtgttgtgctctccaaagcagactgaatgcggccaccggttctgcgaatcatgcatggccgcattactcagctcctccagcccaaaatgcaccgcgtgccaggagtctattgtcaaggataaggtctttaaggacaactgttgtaagcgcgaaatactcgcgctccagatctactgtcgtaacgagtcccggggatgcgcagaacaactaatgcttggccatctgctagtgcacttgaagaatgattgccacttcgaggagttgccctgtgtacgtcccgattgcaaagaaaaagtactccgaaaggatttacgtgaccacgtagagaaggcttgcaaataccgagaagcaacatgcagccattgcaagtctcaggttcccatgattgccttgcaaaagcacgaggacacagactgtccttgtgtggtggtaagttgtccacacaaatgttcggtgcagaccctgcttcgttcagaactatctgctcaccttagcgaatgtgtaaacgcacctagcacatgctccttcaaacgctatggctgcgtcttccaaggaacaaatcagcagatcaaggcacacgaggcctcatctgccgtccaacacgtgaatctgctgaaggagtggagcaactcacttgagaaaaaggtatcactgctgcaaaatgaatcagttgaaaaaaacaagagtattcagtcccttcacaatcagatatgctcgtttgagattgagattgaaaggcagaaggaaatgctccgcaacaatgaatctaagattctacatttacagcgtgtaattgactctcaagctgagaagctcaaggaactggacaaggagatacgaccatttaggcaaaactgggaggaagcagattcgatgaagtcaagcgtcgagtcattgcagaatcgcgtgactgagctggagtctgtcgataaaagcgccggccaggtggctcggaatactggcctgctggaatctcagctgagccgccatgaccaaatgttgtctgttcacgacataaggctggccgatatggacttacgctttcaagtgctggaaacagcctcttacaacggagtgctcatttggaaaatccgcgactacaaacgtcgtaagcaggaagctgttatggggaagactctatctctgtactcccagcctttctatactggatattttggctacaagatgtgcgccagggtctacctcaacggagatggtatggggaagggtactcacctgtcattattttttgtgattatgcgcggcgagtatgacgccctcctgccctggccttttaaacagaaagttacactgatgttgatggatcaggggagttcacggcggcatctgggtgatgcgttcaagcccgacccgaattcaagcagctttaagaaaccgacaggcgagatgaacatcgcttcaggctgcccggtgtttgtcgctcaaaccgtgttggaaaacgggacctacataaaagatgacacaatcttcatcaaggtaatcgtagacacaagcgacctgccagacccttag

SEQ ID NO: 137207 - DNA, 1707 bp, Artificial Sequence
  derived and/or modified sequence
atggaatccagcaaaaagatggactctcctggagccctacagacaaaccctccccttaaactccacacagatcgctccgctggtacaccagtttttgtgcccgagcaaggtggctacaaggagaagttcgtcaagactgtcgaggacaaatataaatgcgaaaaatgccatttggtgctttgcagcccaaagcagacagaatgtgggcaccgcttctgcgagtcctgtatggcagccctcctctcctcctccagccctaagtgcactgcatgccaagaatctatagtcaaagacaaggtgtttaaagacaactgctgcaagagagaaatcctcgcactccagatttactgccgaaatgagagtaggggctgcgcagagcagctgatgctcgggcatctcctggtgcacctcaaaaatgactgtcactttgaagagctcccttgtgtgcgccctgactgcaaggagaaggtcctgcgtaaggacctgcgcgatcatgtagaaaaggcatgtaaatatcgcgaggcaacctgcagccactgtaagagccaggtgcccatgattgcattacagaagcatgaggatacggactgcccttgtgtggtggtgagctgcccacacaaatgctccgtgcagacgctactgagaagcgagttgtccgcccacctgtctgaatgcgtaaacgcgccttccacatgcagcttcaaaaggtacggctgcgtattccagggaaccaaccagcagatcaaagcgcacgaggcatcttctgcagtgcaacatgtaaatctgttgaaagagtggtccaactctctggagaagaaggtgtcactgcttcagaatgagagtgtggagaagaacaaaagcattcagtcactacataatcaaatctgttcctttgagatagagattgagcgccaaaaggaaatgctgaggaacaacgagtctaagattctgcacctgcagcgcgtgatagatagccaggccgagaaactgaaggagctggacaaggaaatcaggcctttccgccaaaactgggaggaggctgacagcatgaagagctcagtagagtcgttgcagaaccgcgttaccgagctggaaagtgtagacaaaagcgccggtcaggtcgctcgtaatacgggattgctggaatctcagttgagcagacacgaccagatgttgagcgtccatgacatcaggctggccgacatggacctgagattccaggtgctggagaccgccagttacaacggagtgctcatttggaaaatccgggattacaagcggcgtaagcaggaagctgtaatgggaaaaacgctctctttgtatagtcagcccttctatacaggatattttggctataagatgtgtgcgagagtgtacctgaacggcgatggtatggggaagggaactcacctctctctgtttttcgtaatcatgcgcggagaatacgacgcccttctcccctggccctttaaacagaaagtgaccctgatgctgatggaccaaggaagcagtcggaggcaccttggcgacgccttcaaaccagatccaaactctagctcctttaagaaaccaacaggagaaatgaatattgccagcgggtgcccagtgttcgtggcccaaacagtgctggagaacgggacctacatcaaggatgataccatctttatcaaagtgattgtggacaccagcgatctgcccgacccctag

SEQ ID NO: 137208 - DNA, 1707 bp, Artificial Sequence
  derived and/or modified sequence
atggaatcatcaaaaaaaatggatagtcctggggcactgcagacaaatcctcccttaaagctgcacactgatagaagtgctgggaccccagtttttgtgccagagcagggcggatacaaagagaagttcgtgaagacagtggaggacaaatacaaatgcgaaaaatgccaccttgtgttatgctcccccaaacagacagagtgcgggcaccgcttctgcgagtcctgtatggccgctttgctgagttcttcctctccaaaatgtaccgcctgtcaggagtcaatcgttaaggacaaggtctttaaagacaactgctgtaaaagagaaatccttgctctgcagatctactgccgtaatgagagccgtggatgtgccgagcaactgatgcttgggcatctgctggtgcacctcaagaacgactgtcatttcgaggaactcccttgtgtaaggccggactgcaaggaaaaggtgttgaggaaagacttgcgcgatcatgtggagaaagcgtgcaagtacagagaggcgacgtgctcccactgcaaaagccaggtgcctatgattgccttgcaaaagcatgaggacaccgattgcccctgcgtggtggtctcctgcccacataagtgttctgtacaaacactactcaggtcagaactttcagcacacctcagcgagtgcgttaacgctccatccacatgcagttttaaaagatatggttgcgtgtttcagggcacaaaccagcagatcaaagcccacgaggcttcctcagccgttcaacacgtcaatcttctcaaggaatggtccaatagcctggaaaaaaaggtttctctgctccaaaacgaatcagtggaaaaaaacaagtcaatccaaagcctgcataatcagatatgcagctttgaaattgaaattgaacgacagaaagagatgcttaggaacaatgagtccaagattctgcatctgcagagggtgatcgacagtcaagcagagaaacttaaagagttagacaaagagatcaggccttttcggcaaaattgggaggaggctgatagtatgaagagcagtgttgagtcacttcagaaccgcgttacagagttggagtccgtcgacaaatccgccggtcaggtggctcgaaacaccggactgttggagtcccagctgagccgccatgaccagatgctatccgtgcatgatattagactggccgatatggacttgcgcttccaggttctcgagacggcatcttacaatggcgttctcatttggaagatcagagattacaagagaagaaaacaagaggctgtcatggggaagaccctctccctgtatagtcaaccattctacacaggctacttcggttataaaatgtgcgcccgtgtatatctgaacggcgacggcatggggaaaggcacacacttgtctctcttcttcgtaatcatgaggggcgagtacgacgctctactaccctggccatttaagcaaaaagtcaccctgatgttaatggaccaggggagcagtcggagacacctgggcgacgcttttaaacctgaccccaactcaagctcgtttaagaaacctacaggagaaatgaatatcgcaagtggatgccccgtttttgtggcacaaactgtgctcgagaacggaacttacataaaggacgacacaatatttatcaaagtgatcgtagataccagcgatctgcccgatccttag

SEQ ID NO: 137209 - DNA, 2459 bp, Artificial Sequence
  derived and/or modified sequence
cggccgccggctcttccccgccccccgccatggggcagcccggggagcagaacgctgcggaccgcggcggaggacgcgcccggcgcccctgagccggccgagcggcgacggaccgcgagatgaggaaaatgaggcccaaagaagtgatgccacttggttaaggtcccagagcaggtcagaatcagacctaggatcagaaacctggctcctggctcctggctccctactcttctaaggatcgctgtcctgacagaagagaactcctctttcctaaaatggagtcgagtaaaaagatggactctcctggcgcgctgcagactaacccgccgctaaagctgcacactgaccgcagtgctgggacgccagtttttgtccctgaacaaggaggttacaaggaaaagtttgtgaagaccgtggaggacaagtacaagtgtgagaagtgccacctggtgctgtgcagcccgaagcagaccgagtgtgggcaccgcttctgcgagagctgcatggcggccctgctgagctcttcaagtccaaaatgtacagcgtgtcaagagagcatcgttaaagataaggtgtttaaggataattgctgcaagagagaaattctggctcttcagatctattgtcggaatgaaagcagaggttgtgcagagcagttaatgctgggacatctgctggtgcatttaaaaaatgattgccattttgaagaacttccatgtgtgcgtcctgactgcaaagaaaaggtcttgaggaaagacctgcgagaccacgtggagaaggcgtgtaaataccgggaagccacatgcagccactgcaagagtcaggttccgatgatcgcgctgcagaaacacgaagacaccgactgtccctgcgtggtggtgtcctgccctcacaagtgcagcgtccagactctcctgaggagcgagttgagtgcacacttgtcagagtgtgtcaatgcccccagcacctgtagttttaagcgctatggctgcgtttttcaggggacaaaccagcagatcaaggcccacgaggccagctccgccgtgcagcacgtcaacctgctgaaggagtggagcaactcgctcgaaaagaaggtttccttgttgcagaatgaaagtgtagaaaaaaacaagagcatacaaagtttgcacaatcagatatgtagctttgaaattgaaattgagagacaaaaggaaatgcttcgaaataatgaatccaaaatccttcatttacagcgagtgatagacagccaagcagagaaactgaaggagcttgacaaggagatccggcccttccggcagaactgggaggaagcagacagcatgaagagcagcgtggagtccctccagaaccgcgtgaccgagctggagagcgtggacaagagcgcggggcaagtggctcggaacacaggcctgctggagtcccagctgagccggcatgaccagatgctgagtgtgcacgacatccgcctagccgacatggacctgcgcttccaggtcctggagaccgccagctacaatggagtgctcatctggaagattcgcgactacaagcggcggaagcaggaggccgtcatggggaagaccctgtccctttacagccagcctttctacactggttactttggctataagatgtgtgccagggtctacctgaacggggacgggatggggaaggggacgcacttgtcgctgttttttgtcatcatgcgtggagaatatgatgccctgcttccttggccgtttaagcagaaagtgacactcatgctgatggatcaggggtcctctcgacgtcatttgggagatgcattcaagcccgaccccaacagcagcagcttcaagaagcccactggagagatgaatatcgcctctggctgcccagtctttgtggcccaaactgttctagaaaatgggacatatattaaagatgatacaatttttattaaagtcatagtggatacttcggatctgcccgatccctgataagtagctggggaggtggatttagcagaaggcaactcctctgggggatttgaaccggtctgtcttcactgaggtcctcgcgctcagaaaaggaccttgtgagacggaggaagcggcagaaggcggacgcgtgccggcgggaggagccacgcgtgagcacacctgacacgttttataatagactagccacacttcactctgaagaattatttatccttcaacaagataaatattgctgtcagagaaggttttcattttcatttttaaagatctagttaattaaggtggaaaacatatatgctaaacaaaagaaacatgatttttcttccttaaacttgaacaccaaaaaaacacacacacacacacacgtggggatagctggacatgtcagcatgttaagtaaaaggagaatttatgaaatagtaatgcaattctgatatcttctttctaaaattcaagagtgcaattttgtttcaa

SEQ ID NO: 137210 - DNA, 7640 bp, Artificial Sequence
  derived and/or modified sequence
cgagggagcgcggcgcggccgccgcgtgcgcgagccggggttgcagcccagccgggactttccagccggcggcagccgcggcggccgccggctcttccccgccccccgccatggggcagcccggggagcagaacgctgcggaccgcggcggaggacgcgcccggcgcccctgagccggccgagcggcgacggaccgcgagaactcctctttcctaaaatggagtcgagtaaaaagatggactctcctggcgcgctgcagactaacccgccgctaaagctgcacactgaccgcagtgctgggacgccagtttttgtccctgaacaaggaggttacaaggaaaagtttgtgaagaccgtggaggacaagtacaagtgtgagaagtgccacctggtgctgtgcagcccgaagcagaccgagtgtgggcaccgcttctgcgagagctgcatggcggccctgctgagctcttcaagtccaaaatgtacagcgtgtcaagagagcatcgttaaagataaggtgtttaaggataattgctgcaagagagaaattctggctcttcagatctattgtcggaatgaaagcagaggttgtgcagagcagttaatgctgggacatctgctggtgcatttaaaaaatgattgccattttgaagaacttccatgtgtgcgtcctgactgcaaagaaaaggtcttgaggaaagacctgcgagaccacgtggagaaggcgtgtaaataccgggaagccacatgcagccactgcaagagtcaggttccgatgatcgcgctgcagaaacacgaagacaccgactgtccctgcgtggtggtgtcctgccctcacaagtgcagcgtccagactctcctgaggagcgagttgagtgcacacttgtcagagtgtgtcaatgcccccagcacctgtagttttaagcgctatggctgcgtttttcaggggacaaaccagcagatcaaggcccacgaggccagctccgccgtgcagcacgtcaacctgctgaaggagtggagcaactcgctcgaaaagaaggtttccttgttgcagaatgaaagtgtagaaaaaaacaagagcatacaaagtttgcacaatcagatatgtagctttgaaattgaaattgagagacaaaaggaaatgcttcgaaataatgaatccaaaatccttcatttacagcgagtgatagacagccaagcagagaaactgaaggagcttgacaaggagatccggcccttccggcagaactgggaggaagcagacagcatgaagagcagcgtggagtccctccagaaccgcgtgaccgagctggagagcgtggacaagagcgcggggcaagtggctcggaacacaggcctgctggagtcccagctgagccggcatgaccagatgctgagtgtgcacgacatccgcctagccgacatggacctgcgcttccaggtcctggagaccgccagctacaatggagtgctcatctggaagattcgcgactacaagcggcggaagcaggaggccgtcatggggaagaccctgtccctttacagccagcctttctacactggttactttggctataagatgtgtgccagggtctacctgaacggggacgggatggggaaggggacgcacttgtcgctgttttttgtcatcatgcgtggagaatatgatgccctgcttccttggccgtttaagcagaaagtgacactcatgctgatggatcaggggtcctctcgacgtcatttgggagatgcattcaagcccgaccccaacagcagcagcttcaagaagcccactggagagatgaatatcgcctctggctgcccagtctttgtggcccaaactgttctagaaaatgggacatatattaaagatgatacaatttttattaaagtcatagtggatacttcggatctgcccgatccctgataagtagctggggaggtggatttagcagaaggcaactcctctgggggatttgaaccggtctgtcttcactgaggtcctcgcgctcagaaaaggaccttgtgagacggaggaagcggcagaaggcggacgcgtgccggcgggaggagccacgcgtgagcacacctgacacgttttataatagactagccacacttcactctgaagaattatttatccttcaacaagataaatattgctgtcagagaaggttttcattttcatttttaaagatctagttaattaaggtggaaaacatatatgctaaacaaaagaaacatgatttttcttccttaaacttgaacaccaaaaaaacacacacacacacacacgtggggatagctggacatgtcagcatgttaagtaaaaggagaatttatgaaatagtaatgcaattctgatatcttctttctaaaattcaagagtgcaattttgtttcaaatacagtatattgtctatttttaaggcctcatctggtctctgttttaataatttgtttgtcagaagaccctgaagtatatacctaggtcttttttttgaaagtctctaaattcagaatcattttttaatttaaagttctacaaataattgttactgcaaacattttattttaaaacgttgatagactgatatttcttggaagaaaatataaaatatcaaacactggttatcacttgtgataggaaagagaatattcaacctgttgttatttctcgttagaaatgtaaaccttcaaatatctgtcgtagttaatgacacgacttcacaattctgaacggagcctcgctcatggatgctgtgcatcattttcagatttataattgttttcaccctaaaatagggcatccgttgaactttggagttctaaacaaaatcctgtaggtgtttggattctgccccatgtgttcggacgagctctctgttgctgacagcaccggccttcggtctccatgtcaggggtgggcgggtgactgctgagggaggcccgcaggtgtgtttctccatcccgtcatcttgctgcatgccgtcaacggtctccgaaagcaacgttgtgcgtagagctggtggcatacggcccacgtgccttagatgggacatgctgcttctccaccctgggtttgcattgagcatcattctagaaagtgctagtttaaccagacttttctctccaccactagatctttgtctctacaagggccctcagacacctctgcacctgctgaggggaagccaggctccaccgtcggcttctggagcctccgctgcttaattaccacagattccaaatctctaggccccacgagtgagccgcctggtccaagtacggcctggtcccaccctgagggaggcaggtgtggaacagaagccgagcctctccgtgtccccaccggggccgtgggcacccccacagcccgaagcagaaccctctgagcattccagagaccgctgctcgggggcctgcccaggctgaccaacgggcgctcctgaccaccaccctggcgggaagggtggccacggggcccgtcgtcccagcctgtgcctgcccagatggcattttctcaactcactgtttactgtctctcagtgtccaactgtgattagaagcctggagcctgccccctgcaccccttttgctatgcaccacgcttcatggtgctcttaccactgatgggtgctacacgcgacgggtgcttcttaggcaaaaccaatgtgtgcgaactgtcacacctgtgccactcgcccacaagccgcgcccacaattggccagctgggccgtgcacgtcagactgcctgcctcggctctccccgtggccgcgcggggacagcttggtgggtgcccggtggcccacctgtctctggtgctgccatctgtcctgggtgtgccttcgccccagtgcctgctggaagtgccctccgtcgcacccctgtgccctgagctcccgtgaggggcccgccgcgccctttcgcggtcgaagcgttccgttgttcttatctgcctttcctttccccgctctcctgggattactttgggggaatgagtatccttggttctgccctgtgagggagtcgtgtgtccctgctcataaaggaaggacttcctgcagaagctgcggaaaactactgttccctcgaaggtgtcccccacctgaggcctgtcccctacctgccctcaggtagttttcctgaggccaggggttaacaacagggacatccctgcaacttccccttcacaaaatgtataatattagatgaaggatatgcaacatcttggtctagtaagaaccgtttcctcccctctgggttgaagtcctggtgtggcccccagaagcagcagtgcgtgtcactgggacgtctccagtagcccttcccaggcagacgctcctggcgggacgccatggggcccacctgagggtcccacagacgtaacctgagtgacaggagtccttgaggatgggatggcctatgtcacacactttgtccttgaacctgagtgatgggggtccttgaggatgggatggcctgtgtcacgcgctttgtctttgtgtttggttgtatcggggtctctgttctgagtgtgtcttcctctcatgtactcaacacagtgggcagcagcctgggacggcgtcccctctcccggcggcgggcaagccttgcgctgctccaccctcggcctgggcaccctcacttggcgctggccacctgggccagcctggggccatggtctctctgcagctgaggcccagtggccccttgggcagtgatcggccctccccgcatcacagggccctggcagcaagcgggaaatgggggcgcacactgtgtgcttgggggtgctgcttgtttaccacacatgaccagactcccagcaggacagagctgctcagtactttacagaaaccaactgagtcgtttgtgcatgaattaagccggtctgcttccccgtcaccttcgtaacaaaacaacgtcccctctcccctcgcctcgagcagtttcttcaggacaccgtggctcgggctgctccctgctgccaggcacgctggttggctggcctgggcccggctcacgtgaagggcactggctcttgtgaccacactgagccacgtgcaagccgcagccgggcctggaagcctgaccctctggttctagggcttgtcccgcggagcctgcagagctagacgttggggtgtgtccgtgatgatatgggggccaggctgggagtagggcctttctagcagggttgggtggctcagtgagggtgtggaagtgggggacccacggggcctggctttgggactagacatgccagccccagctgggctggagggagcctgagtgagccccgacatacgctgggcctttcagctcgccgtgctctggtgacacacaggcggccaggttgggatttgtgtcaattctaggagccatcaagcatgaatgtggttctgtctcctgagcgcaagcctcgccggacccctgggcgaaggcctggacttgcagatgtgtgttccctgtgcgggtggacagagggggcccttatgacccacattgcagccccattccaccaccccttcctccccagagcagtctctgccgagggacagcacctgtgtcccttcgatgccacaacagccagttgaacaggggagccctttgctcaggcagcttctcctgcctctccctcctttctccttccctgccccatccccgtgcccttcttggcctgtggcgctggggagccatggtgtggcatactggggctcctgctccttgggccacttcctcagcccgggccccacaggcccaccacctgccagggctcccactgcactggctgtggcaggaggcttccccatgaccccgtgtggcccagctcggtgaggatgcagttctaggcacagcccctgggacagccagctgcctcccagaccacgtcagcctgctccagggtcctcagtcaccctgggccaggggccacgtgtcccatggatgtcgaccatgccaacgtcacattccagcaccccttttgcttgatggcgtctggtggtagtcagcatggtggacccacatcctacagccagaggtgatgttggacaaaggaaggggagtctggatgggtccttaaacgaccattctgtccgcagcggggtcattccttgtcagcccaagggagggccggggagtacactgatcccaacagctgggctgacacctcctttctcccctgcacggggaggattggcctgaggaccgtcaccctgtgcacagccccagtagggtggcagtgccactgtctccttgggccgttgcaggattgggcgggtgcagactccccttgcgggccccttgctcaatccccggccctcccagactcctccctctactgggggtaatttgtgtgtcagaagggctctggcagagctgtaaaatactgttttttaaaaattttagtccagatctttacttattagactgcagaaggagagctagggagagtgggggaagcccccttgcttttgtatctgtgaggtgaatgagggtctgtcacccaaatctacttctcagcccatgaccatagttctgttttccgtttgcaaatctcagtagctctgttttctccaaagtagaatgtgcgcaccggggtcctagccaggcgaggtcagtgtcggcaggctacctggtcattattgctgcctcgtccaggctgatgctgatggtcacaggcacggtggcatcagggagccgggccagcaggcggcgtgaggcggggccagcagctcactgcaagggcattttccacctgatcctggtgtgccccacatgcggtggcagggcagacgtgtgaagcctcggccgtctcggggctggcaggtgtgcgggtgaggaggccccggtggccaagcagagcctgcgtttcatttctcctgctgcactgtgtctagtctgtcttgtgaactctcaccgtgaaaagaggctagaagtccaggatcgctgtaccgctcctgtaattaggtgatgactggatttgacaacttagtcccctcagacaagtaagataccctccaacagcaaattcaatgacttaattggaaaacacacaagctggcatgatgtccggtgatttctgtaagaaatgcctgtaggagaaggtctgtgaagtgtggagggcagtgtcgacgctgcacagcatctgcagattcgcagcctcttctctgccggtgcctctgttcggttctgttacccaaaaacaaagaccaaagaaggccaatctctcatttgaccctgtctttttaatctgcctgttttaaaagttgcgtctgtagtagccgcttgctgtgaagacacatcttgacagtccaagtgattttgtgaccagtgatttgggtcctgttttccgctcttctaagaaaaaacaaaaagaccgtgagttattgcccagcaataatcatgttgttactgtgagttagcaacatgcctgacttcctgatagcattactgttttctagttttgtttattgtatattatgtgtggttttatttggtatttatttgtgttttgaggtcttgcaatgtttttgtgtttctgatgctaataactaaagtttgtaagactgtagaatgcaaaactcggagatgctaaactgtcttattagaggaaaataaatctgattatggagtctca

SEQ ID NO: 137211 - protein, 759 aa, Artificial Sequence
  derived and/or modified sequence
MMAALYPSTDLSGASSSSLPSSPSSSSPNEVMALKDVREVKEENTLNEKLFLLACDKGDYYMVKKILEENSSGDLNINCVDVLGRNAVTITIENENLDILQLLLDYGCQKLMERIQNPEYSTTMDVAPVILAAHRNNYEILTMLLKQDVSLPKPHAVGCECTLCSAKNKKDSLRHSRFRLDIYRCLASPALIMLTEEDPILRAFELSADLKELSLVEVEFRNDYEELARQCKMFAKDLLAQARNSRELEVILNHTSSDEPLDKRGLLEERMNLSRLKLAIKYNQKEFVSQSNCQQFLNTVWFGQMSGYRRKPTCKKIMTVLTVGIFWPVLSLCYLIAPKSQFGRIIHTPFMKFIIHGASYFTFLLLLNLYSLVYNEDKKNTMGPALERIDYLLILWIIGMIWSDIKRLWYEGLEDFLEESRNQLSFVMNSLYLATFALKVVAHNKFHDFADRKDWDAFHPTLVAEGLFAFANVLSYLRLFFMYTTSSILGPLQISMGQMLQDFGKFLGMFLLVLFSFTIGLTQLYDKGYTSKEQKDCVGIFCEQQSNDTFHSFIGTCFALFWYIFSLAHVAIFVTRFSYGEELQSFVGAVIVGTYNVVVVIVLTKLLVAMLHKSFQLIANHEDKEWKFARAKLWLSYFDDKCTLPPPFNIIPSPKTICYMISSLSKWICSHTSKGKVKRQNSLKEWRNLKQKRDENYQKVMCCLVHRYLTSMRQKMQSTDQATVENLNELRQDLSKFRNEIRDLLGFRTSKYAMFYPRN

SEQ ID NO: 137212 - DNA, 2280 bp, Artificial Sequence
  derived and/or modified sequence
atgatggccgccctgtaccccagcaccgacctgagcggcgccagcagcagcagcctgcccagcagccccagcagcagcagccccaacgaggtgatggccctgaaggacgtgagagaggtgaaggaggagaacaccctgaacgagaagctgttcctgctggcctgcgacaagggcgactactacatggtgaagaagatcctggaggagaacagcagcggcgacctgaacatcaactgcgtggacgtgctgggcagaaacgccgtgaccatcaccatcgagaacgagaacctggacatcctgcagctgctgctggactacggctgccagaagctgatggagagaatccagaaccccgagtacagcaccaccatggacgtggcccccgtgatcctggccgcccacagaaacaactacgagatcctgaccatgctgctgaagcaggacgtgagcctgcccaagccccacgccgtgggctgcgagtgcaccctgtgcagcgccaagaacaagaaggacagcctgagacacagcagattcagactggacatctacagatgcctggccagccccgccctgatcatgctgaccgaggaggaccccatcctgagagccttcgagctgagcgccgacctgaaggagctgagcctggtggaggtggagttcagaaacgactacgaggagctggccagacagtgcaagatgttcgccaaggacctgctggcccaggccagaaacagcagagagctggaggtgatcctgaaccacaccagcagcgacgagcccctggacaagagaggcctgctggaggagagaatgaacctgagcagactgaagctggccatcaagtacaaccagaaggagttcgtgagccagagcaactgccagcagttcctgaacaccgtgtggttcggccagatgagcggctacagaagaaagcccacctgcaagaagatcatgaccgtgctgaccgtgggcatcttctggcccgtgctgagcctgtgctacctgatcgcccccaagagccagttcggcagaatcatccacacccccttcatgaagttcatcatccacggcgccagctacttcaccttcctgctgctgctgaacctgtacagcctggtgtacaacgaggacaagaagaacaccatgggccccgccctggagagaatcgactacctgctgatcctgtggatcatcggcatgatctggagcgacatcaagagactgtggtacgagggcctggaggacttcctggaggagagcagaaaccagctgagcttcgtgatgaacagcctgtacctggccaccttcgccctgaaggtggtggcccacaacaagttccacgacttcgccgacagaaaggactgggacgccttccaccccaccctggtggccgagggcctgttcgccttcgccaacgtgctgagctacctgagactgttcttcatgtacaccaccagcagcatcctgggccccctgcagatcagcatgggccagatgctgcaggacttcggcaagttcctgggcatgttcctgctggtgctgttcagcttcaccatcggcctgacccagctgtacgacaagggctacaccagcaaggagcagaaggactgcgtgggcatcttctgcgagcagcagagcaacgacaccttccacagcttcatcggcacctgcttcgccctgttctggtacatcttcagcctggcccacgtggccatcttcgtgaccagattcagctacggcgaggagctgcagagcttcgtgggcgccgtgatcgtgggcacctacaacgtggtggtggtgatcgtgctgaccaagctgctggtggccatgctgcacaagagcttccagctgatcgccaaccacgaggacaaggagtggaagttcgccagagccaagctgtggctgagctacttcgacgacaagtgcaccctgcccccccccttcaacatcatccccagccccaagaccatctgctacatgatcagcagcctgagcaagtggatctgcagccacaccagcaagggcaaggtgaagagacagaacagcctgaaggagtggagaaacctgaagcagaagagagacgagaactaccagaaggtgatgtgctgcctggtgcacagatacctgaccagcatgagacagaagatgcagagcaccgaccaggccaccgtggagaacctgaacgagctgagacaggacctgagcaagttcagaaacgagatcagagacctgctgggcttcagaaccagcaagtacgccatgttctaccccagaaactag

SEQ ID NO: 137213 - DNA, 2280 bp, Artificial Sequence
  derived and/or modified sequence
atgatggccgccctctatcccagcacagatctcagcggagcgagttcttcctctctgccttcaagcccgtctagttcatcccctaacgaagttatggccctgaaggatgtgagagaggtcaaggaggagaataccctcaatgaaaaacttttcctgctggcatgtgataaaggagactactacatggtgaagaaaattctcgaggaaaactcctctggagacctgaacatcaattgtgttgatgtgctgggccgcaacgctgtcaccatcaccatcgaaaacgaaaacctcgatatcttacaactgcttttggactacggatgccagaaactaatggagagaatacagaacccggaatattcaaccacaatggatgtcgcgccagtgattctagccgcccatagaaacaactatgaaattttgaccatgctgctgaaacaggacgtttcccttcccaagccacatgcggtgggctgtgaatgcacactatgtagcgctaaaaacaaaaaagattcactgcgccacagtcgctttaggctcgacatctatcggtgtctcgcctctcccgctttgattatgttgaccgaggaagatcccattctaagagcattcgagctttccgccgatctcaaggaactctccctggtggaggtcgagttccgcaacgattatgaagagttggcccgacaatgtaagatgtttgccaaggatcttctggctcaggcgcgaaatagccgggaactggaggttattctaaatcatacttcatctgacgagcctctggataaaagagggctcttggaggaacgtatgaacctttcccgacttaagctcgccattaagtacaaccagaaggagtttgtctcacagtctaactgtcaacagttcttgaatactgtgtggttcggccaaatgagcggctatcgcagaaagcccacgtgcaagaaaatcatgaccgttttgacggtgggcatcttttggccagtgctgagcttatgttatctgattgctcccaaaagtcagttcgggagaatcatccacaccccatttatgaagttcattatccacggtgcaagctattttactttcttgctacttctcaatctgtacagcctcgtgtacaatgaggacaagaaaaacacaatggggcctgcattagaacgtattgattatctgttaatcctgtggattattggcatgatttggagtgacattaaacgtctgtggtacgagggactagaagacttcctagaggagtcccggaaccaattatcctttgtcatgaactcactgtatctggcaactttcgccttgaaggtggttgcccacaacaagtttcatgacttcgccgaccggaaggactgggacgcttttcatcccacactggttgccgagggcctgtttgctttcgccaatgtgttatcctatttgaggctgtttttcatgtacacgacgtcctccatcctgggaccgctgcaaattagtatggggcagatgttacaagacttcggcaaattccttgggatgtttctgctggtgctttttagcttcactattgggctcacccagctgtacgacaagggctacacgagcaaagagcagaaggattgcgtcggcatcttttgtgaacaacagtctaacgacacattccattctttcatagggacctgcttcgcccttttttggtatatttttagcctcgctcatgtggccatttttgtcacacggttcagctatggagaggagctgcagagttttgtgggagccgtcatcgtcggaacttacaatgtagttgtggtgattgtgctcacaaagttgcttgttgctatgcttcacaagagcttccaattgatcgcaaatcacgaggataaagagtggaaatttgcaagagcaaagctttggctgtcttacttcgatgacaaatgcacactgccacccccgttcaacatcattcctagtccgaaaactatctgctacatgatttcaagcctctctaagtggatttgctcccatacctcaaagggcaaggtgaagcgccagaattccctgaaagaatggcggaacctgaagcagaagcgggacgaaaattaccagaaagtcatgtgttgcctggttcatcggtatctaacctcaatgagacagaagatgcaatccactgaccaggcaacggtggagaacttaaatgagctccgccaggatctgtcaaagttccggaatgagatccgggatctcttggggtttagaacatcgaagtatgctatgttctatccacggaactag

SEQ ID NO: 137214 - DNA, 2280 bp, Artificial Sequence
  derived and/or modified sequence
atgatggccgccctgtaccccagcacagacctgagcggggccagcagcagcagcctgcccagcagccccagcagcagcagccccaatgaggtgatggccctgaaggatgtgcgggaggtgaaggaggagaacaccctgaatgagaagctgttcctgctggcctgtgacaagggggactactacatggtgaagaagatcctggaggagaacagcagcggggacctgaacatcaactgtgtggatgtgctgggcagaaatgctgtgaccatcaccattgaaaatgaaaacctggacatcctgcagctgctgctggactatggctgccagaagctgatggagcgcatccagaaccctgagtacagcaccaccatggatgtggcccctgtgatcctggccgcccacaggaacaactatgagatcctgaccatgctgctgaagcaggatgtgtccctgcccaagccccatgctgtgggctgtgagtgcaccctgtgcagcgccaagaacaagaaggacagcctgcggcacagccgcttccggctggacatctaccgctgcctggccagccctgccctgatcatgctgacagaggaggaccccatcctgcgggcctttgagctgtctgctgacctgaaggagctgagcctggtggaggtggagttcagaaatgactatgaggagctggcccggcagtgcaagatgtttgccaaggacctgctggcccaggccaggaacagccgggagctggaggtgatcctgaaccacaccagcagtgatgagcccctggacaagaggggcctgctggaggagaggatgaacctgagccggctgaagctggccatcaagtacaaccagaaggagtttgtgtcccagagcaactgccagcagttcctgaacacagtgtggtttggccagatgagcggctacagaaggaagcccacctgcaagaagatcatgacagtgctgactgtgggcatcttctggcctgtgctgagcctgtgctacctgattgcccccaagagccagtttggccgcatcatccacacccccttcatgaagttcatcatccacggggccagctacttcaccttcctgctgctgctgaacctgtacagcctggtgtacaatgaagacaagaagaacaccatgggccctgccctggagagaattgactacctgctgatcctgtggatcatcggcatgatctggagcgacatcaagaggctgtggtatgagggcctggaggacttcctggaggagagcaggaaccagctgagctttgtgatgaacagcctgtacctggccacctttgccctgaaggtggtggcccacaacaagttccatgactttgctgacaggaaggactgggatgccttccaccccaccctggtggccgagggcctgtttgcctttgccaacgtgctgagctacctgcggctcttcttcatgtacaccaccagcagcatcctgggccccctgcagatctccatgggccagatgctgcaggactttgggaagttcctgggcatgttcctgctggtgctcttctccttcaccatcggcctgacccagctgtatgacaagggctacaccagcaaggagcagaaggactgtgtgggcatcttctgtgagcagcagagcaatgacaccttccacagcttcatcggcacctgctttgccctcttctggtacatcttcagcctggcccacgtggccatctttgtgacccgcttctcctatggagaggagctgcagagctttgtgggcgctgtgattgtgggcacctacaacgtggtggtggtgattgtgctgaccaagctgctggtggccatgctgcacaagagcttccagctgattgccaaccacgaggacaaggagtggaagtttgcccgggccaagctgtggctgagctactttgatgacaagtgcaccctgcccccacccttcaacatcatccccagccccaagaccatctgctacatgatcagcagcctgagcaagtggatctgcagccacaccagcaagggcaaggtgaagaggcagaacagcctgaaggagtggaggaacctgaagcagaagagagatgagaactaccagaaggtgatgtgctgcctggtgcaccgctacctgacctccatgaggcagaagatgcagagcacagaccaggccaccgtggagaacctgaatgagctgcggcaggacctgagcaagttcagaaatgagatccgggacctgctgggcttccgcaccagcaaatatgccatgttctaccccaggaactag

SEQ ID NO: 137215 - DNA, 2280 bp, Artificial Sequence
  derived and/or modified sequence
atgatggccgccctgtaccccagcaccgacctgagcggcgccagcagttcctcactgccaagtagtccgtcgagctccagtccaaacgaagtcatggcattaaaggatgtacgcgaagtcaaagaagagaacactctaaacgagaaactgttccttctggcatgcgataaaggagattattacatggtcaaaaagattctggaggaaaactcctcaggcgacctgaatatcaactgcgtcgatgttttgggacgcaacgctgtgaccattaccattgaaaacgagaacctggacatccttcaactgctgcttgactatgggtgccagaaactcatggagcgaatccagaacccagagtactctaccacaatggatgtagcacctgtaatacttgccgcacatcgcaacaattacgagattttaaccatgctgctcaaacaggacgtcagtcttccgaagccgcacgctgtgggctgcgagtgcacactctgttctgcgaagaacaaaaaagacagtctacggcatagccgattccgtctagacatttatagatgcctggcctcccctgccttgatcatgctaacggaagaggatcctatattgagggcttttgaactgagcgctgatctgaaagagctgagtctggtggaggtcgagttccgcaacgattatgaggagctagccagacagtgcaaaatgtttgctaaggacctgcttgcccaagccaggaacagtagggaactagaagttatcctgaaccatacctcttccgatgaaccgcttgacaagagggggctgctggaagagaggatgaaccttagcagattgaagttggccatcaagtacaaccaaaaagagtttgtgtcacagtcaaattgtcagcagttcctgaataccgtttggtttggccaaatgagtggctaccgacgtaaacccacctgtaagaaaattatgaccgtgttgaccgtggggatcttctggcctgtgctctctctctgctatctgatcgcccctaaaagccagtttggcaggataatacatactccattcatgaagtttattatccacggggcgagctacttcacgtttctcctattactgaatctgtattcactggtatataatgaggacaagaaaaacacaatgggccccgccctcgagaggatcgactatctattgattctgtggatcattggtatgatctggagcgacattaagcgattgtggtatgaggggctggaagattttctggaggagagccgtaaccagctaagtttcgttatgaactccctttatctagcaacattcgccctcaaggtggtggcccataacaagtttcatgactttgccgaccgaaaggattgggatgcatttcacccaaccctagtggctgagggcttattcgcctttgccaacgtcctttcctatctccgcctgttcttcatgtacaccacctcaagcatccttgggcctctccagatctccatgggccagatgcttcaggactttgggaagttcctgggtatgtttctgttggtcctttttagtttcacaatagggctgacccagctttacgataaaggatatacctccaaggaacaaaaggactgtgttggcatcttttgcgagcaacagtcaaacgacacattccactcatttatcgggacatgctttgctctgttttggtacatcttttcgctcgcgcatgtcgccattttcgtgactaggttctcatacggggaagagctacagagttttgtgggcgctgtgattgttggtacctacaatgttgtagtggtgatcgtcctgactaaacttttggtagcaatgctgcacaaatcttttcaactgattgcgaaccatgaagacaaagaatggaagttcgcccgggccaaactgtggttaagttacttcgacgataaatgtaccctgcctcccccctttaacatcatccctagtccaaaaacaatttgctatatgatctcatccctcagcaagtggatctgtagccacacatctaaaggaaaggtgaagcggcagaatagcctgaaggaatggagaaatctaaagcagaagagggatgagaactatcagaaagtgatgtgttgccttgtacaccggtatctcacaagtatgaggcagaagatgcagtccacggaccaggcaaccgtcgaaaacctcaatgagctccgtcaggacctgtctaaattcaggaatgagataagggacctcctgggcttcagaacttcaaaatatgctatgttttatccacgaaattag

SEQ ID NO: 137216 - DNA, 2280 bp, Artificial Sequence
  derived and/or modified sequence
atgatggccgcattgtatccatctaccgatctgtcaggtgcctcctcctctagcctgccatcctcaccaagttcgtccagccccaatgaagtgatggcccttaaggacgtacgtgaggtaaaggaagagaataccctgaacgagaaactgtttttactcgcgtgcgataagggagactattatatggtcaaaaaaatcctcgaagagaactccagtggcgatctgaatatcaactgcgtggatgtgcttgggaggaatgccgtcacgatcactatcgagaacgaaaacctggatatcctccagctcctgttagactatgggtgccagaagctcatggaacgcatccagaacccagagtattctacaacaatggatgtggcccctgttatccttgctgcccacaggaataattacgaaattcttaccatgcttctcaagcaggatgtcagcctgcctaaaccacacgcagtggggtgcgaatgcacactgtgttcagcaaaaaacaagaaggatagtctgcgccatagtagattccggctggatatctaccgttgcctcgcctcccccgcactcatcatgttgaccgaagaagaccccatcctgagagcgtttgagctgtccgcagatctgaaagaactttcactggtggaagtggaattccgaaatgactatgaagagctggctcgtcagtgcaaaatgttcgctaaggatctcctggcccaggcgcgaaactctagagagttggaggtgattctgaatcacactagcagtgatgaaccgctagacaagcggggacttctggaggaacgcatgaatctttctaggctgaaactggctataaagtataatcagaaagaattcgtgagtcagtctaattgccaacagttcctgaataccgtatggttcggccagatgagtggctacaggagaaagccaacgtgcaagaaaatcatgactgtcctgaccgtcggcattttttggcctgtgctgagcctatgctacttgatcgccccaaaatctcaattcggcagaatcattcatactccattcatgaaatttatcatacatggggcatcctatttcactttcctcctccttttaaatctgtactccctcgtctacaacgaggataaaaaaaacaccatgggccctgcgctcgagcgcatcgattacctactaatcctctggataatcggcatgatatggtccgatattaaaagactttggtatgagggactggaggatttcctggaagaaagcagaaaccaactgtcctttgtcatgaattcgctgtaccttgctacatttgcgttaaaagttgttgcacacaataaatttcacgattttgcggataggaaggattgggacgccttccatcctacccttgttgcagaaggcctgtttgcattcgccaacgtgctgtcctatttgagactgttctttatgtacactacatcgtctattttgggtcccctgcagataagcatgggtcaaatgctgcaggatttcgggaagttcctgggtatgtttctgctggtgcttttcagtttcactatcggactcactcagctctacgacaaggggtataccagcaaggaacagaaagattgcgtggggatattctgtgagcagcagagcaatgatacgtttcactcctttatcggcacctgtttcgcgctattttggtacattttcagcctggcccatgtggcaatctttgtgactaggttcagttacggggaagagttgcaatcttttgtgggtgccgtcattgttggcacatacaacgtggttgtggtgatcgtgctcactaagctgctggtggcgatgctccataagtcttttcagttgattgctaatcacgaggacaaagagtggaagttcgcccgagcaaaattgtggctgtcatatttcgatgacaagtgtacactccctcctccgtttaacataatccctagcccaaaaacaatttgctacatgatctcatcactgtccaagtggatttgctctcatacctcaaagggcaaagtgaaacgccagaactcactgaaagaatggcgtaacctcaagcagaagcgagatgagaattatcaaaaggtgatgtgctgcctggtgcacaggtacctgacatctatgcgccaaaagatgcagagcacggaccaggctactgtggagaatcttaatgaacttcgccaggatcttagcaagtttcgcaacgaaattcgggatctcctgggctttagaacgtctaagtatgccatgttctatcctagaaactag

SEQ ID NO: 137217 - DNA, 4324 bp, Artificial Sequence
  derived and/or modified sequence
atctctcgtcctcttcctgggctaggccgccccaggcgcggcccctgcgactcctggcacggccccgtgctcggctgccgccctggcgcgcgccacactgtcgtccccggacgggcgcggaccggctcggccggggcgccggcggctggggaggggtcgctggccccggggccgcgcatgcgccgccaccaacttggggctgtcagtggagggcgagtgctggttctcaggggaggcgacgcccttcggggccaacgggcctcgagccgaggcagcagtgggaacgactcatcctttttccagccctggggcgtggctggggtcggggtcggggtcggggccggtgggggccccgcccccgtctcctggcctgcccccttcatgggccgcgatgatggcggccctgtacccgagcacggacctctcgggcgcctcctcctcctccctgccttcctctccatcctcttcctcgccgaacgaggtgatggcgctgaaggatgtgcgggaggtgaaggaggagaatacgctgaatgagaagcttttcttgctggcgtgcgacaagggtgactattatatggttaaaaagattttggaggaaaacagttcaggtgacttgaacataaattgcgtagatgtgcttgggagaaatgctgttaccataactattgaaaacgaaaacttggatatactgcagcttcttttggactacggttgtcagaaactaatggaacgaattcagaatcctgagtattcaacaactatggatgttgcacctgtcattttagctgctcatcgtaacaactatgaaattcttacaatgctcttaaaacaggatgtatctctacccaagccccatgcagttggctgtgaatgcacattgtgttctgcaaaaaacaaaaaggatagcctccggcattccaggtttcgtcttgatatatatcgatgtttggccagtccagctctaataatgttaacagaggaggatccaattctgagagcatttgaacttagtgctgatttaaaagaactaagtcttgtggaggtggaattcaggaatgattatgaggaactagcccggcaatgtaaaatgtttgctaaggatttacttgcacaagcccggaattctcgtgaattggaagttattctaaaccatacgtctagtgacgagcctcttgacaaacggggattattagaagaaagaatgaatttaagtcgtctaaaacttgctatcaaatataaccagaaagagtttgtctcccagtctaactgccagcagttcctgaacactgtttggtttggacagatgtcgggttaccgacgcaagcccacctgtaagaagataatgactgttttgacagtaggcatcttttggccagttttgtcactttgttatttgatagctcccaaatctcagtttggcagaatcattcacacaccttttatgaaatttatcattcatggagcatcatatttcacatttctgctgttgcttaatctatactctcttgtctacaatgaggataagaaaaacacaatggggccagcccttgaaagaatagactatcttcttattctgtggattattgggatgatttggtcagacattaaaagactctggtatgaagggttggaagactttttagaagaatctcgtaatcaactcagttttgtcatgaattctctttatttggcaacctttgccctcaaagtggttgctcacaacaagtttcatgattttgctgatcggaaggattgggatgcattccatcctacactggtggcagaagggctttttgcatttgcaaatgttctaagttatcttcgtctcttttttatgtatacaaccagctctatcttgggtccattacagatttcaatgggacagatgttacaagattttggaaaatttcttgggatgtttcttcttgttttgttttctttcacaattggactgacacaactgtatgataaaggatatacttcaaaggagcagaaggactgtgtaggcatcttctgtgaacagcaaagcaatgataccttccattcgttcattggcacctgctttgctttgttctggtatattttctccttagcgcatgtggcaatctttgtcacaagatttagctatggagaagaactgcagtcctttgtgggagctgtcattgttggtacatacaatgtcgtggttgtgattgtgcttaccaaactgctggtggcaatgcttcataaaagctttcagttgatagcaaatcatgaagacaaagaatggaagtttgctcgagcaaaattatggcttagctactttgatgacaaatgtacgttacctccacctttcaacatcattccctcaccaaagactatctgctatatgattagtagcctcagtaagtggatttgctctcatacatcaaaaggcaaggtcaaacggcaaaacagtttaaaggaatggaggaatttgaaacagaagagagatgaaaactatcaaaaagtgatgtgctgcctagtgcatcgttacttgacttccatgagacagaagatgcaaagtacagatcaggcaactgtggaaaatctaaacgaactgcgccaagatctgtcaaaattccgaaatgaaataagggatttacttggctttcggacttctaaatatgctatgttttatccaagaaattaaccattttctaaatcatggagcgaataattttcaataacagatccaaaagactatattgcataacttgcaatgaaattaatgagatatatattgaaataaagaattatgtaaaagccattctttaaaatatttatagcataaatatatgttatgtaaagtgtgtatatagaattagttttttaaaccttctgttagtggctttttgcagaagcaaaacagattaagtagatagattttgttagcatgctgcttggttttcttacttagtgctttaaaatgtttttttttatgtttaagaggggcagttataaatggacacattgcccagaatgttttgtaaaatgaagaccagcaaatgtaggctgatctccttcacaggatacacttgaaatatagaagttatgttttaaatatctctgttttaggagttcacatatagttcagcatttattgtttaggagtataattttattttatctaaaataatagtctattttttcttttgtattttgttataatcttaagcaacaaagaaaaaaccctaatatttgaatctatttatgtctttcaatttaaattcacttcagtttttgttattgtaatatatttacttttacatggttataatcactttatatttttaatgtttttttcacttaatattttatatatacatttccatgtattgatgtagttagtccacatttaaatttttatagaattatatagtttttgaaaaatacagtcagtagatgttttattttttagctattcagttatgtttataagtttgcatagctacttctcgacatttggtttgttttaatttttttgtatcataatagtcctatttttttttcaagttggagtgaatgtttttagttttaagatagataggagacacttttttatcacatgtagtcacaacctgttttgtttttgtaaaacataggaagtctctttaatgcaatgatttgttttatatttggactaaggttcttgagcttatctcccaaggtactttccataatttaacacagcttctataaaagtgacttcatgcttacttgtggatcattcttgctgcttaagatgaaaagcattggttttttaaaattagagaataaaatatgtatttaaatttttggtgtgttcacataaagggatgtagctaaaatgttttcataggctattatatattctcgcagcatttccagttaagaggatattaggtatataattctcttcttaaccgaatgtcagatggtcttacgccacagggtgcaggtaacccttggtctgtaagcaccaccgatccagggatcattgtctaaataggttactattgtttgtttcatcttgcttttgcatttttattttttaatttccaaattttaagtgttccctctttggggcaaattcttataaaaatgtttattgtaaagttatatattttgtctacgatgggattatgcacttcccaattgggattttacatctggatttttagtcattctaaaaaacacctaattattaaaacatttatagagtgcctactgtatgcatgagttgagttgcttctgaggtacattttgaatgacagcatattgtaagaaaaaaaaaggtgaataaaatttgacattagattataaa

SEQ ID NO: 137218 - DNA, 2136 bp, Artificial Sequence
  derived and/or modified sequence
atgatggcggccctgtacccgagcacggacctctcgggcgcctcctcctcctccctgccttcctctccatcctcttcctcgccgaacgaggtgatggcgctgaaggatgtgcgggaggtgaaggaggagaatacgctgaatgagaagcttttcttgctggcgtgcgacaagggtgactattatatggttaaaaagattttggaggaaaacagttcaggtgacttgaacataaattgcgtagatgtgcttgggagaaatgctgttaccataactattgaaaacgaaaacttggatatactgcagcttcttttggactacggttgtcagaaactaatggaacgaattcagaatcctgagtattcaacaactatggatgttgcacctgtcattttagctgctcatcgtaacaactatgaaattcttacaatgctcttaaaacaggatgtatctctacccaagccccatgcagttggctgtgaatgcacattgtgttctgcaaaaaacaaaaaggatagcctccggcattccaggtttcgtcttgatatatatcgatgtttggccagtccagctctaataatgttaacagaggaggatccaattctgagagcatttgaacttagtgctgatttaaaagaactaagtcttgtggaggtggaattcaggaatgattatgaggaactagcccggcaatgtaaaatgtttgctaaggatttacttgcacaagcccggaattctcgtgaattggaagttattctaaaccatacgtctagtgacgagcctcttgacaaacggggattattagaagaaagaatgaatttaagtcgtctaaaacttgctatcaaatataaccagaaagagtttgtctcccagtctaactgccagcagttcctgaacactgtttggtttggacagatgtcgggttaccgacgcaagcccacctgtaagaagataatgactgttttgacagtaggcatcttttggccagttttgtcactttgttatttgatagctcccaaatctcagtttggcagaatcattcacacaccttttatgaaatttatcattcatggagcatcatatttcacatttctgctgttgcttaatctatactctcttgtctacaatgaggataagaaaaacacaatggggccagcccttgaaagaatagactatcttcttattctgtggattattgggatgatttggtcagacattaaaagactctggtatgaagggttggaagactttttagaagaatctcgtaatcaactcagttttgtcatgaattctctttatttggcaacctttgccctcaaagtggttgctcacaacaagatttcaatgggacagatgttacaagattttggaaaatttcttgggatgtttcttcttgttttgttttctttcacaattggactgacacaactgtatgataaaggatatacttcaaaggagcagaaggactgtgtaggcatcttctgtgaacagcaaagcaatgataccttccattcgttcattggcacctgctttgctttgttctggtatattttctccttagcgcatgtggcaatctttgtcacaagatttagctatggagaagaactgcagtcctttgtgggagctgtcattgttggtacatacaatgtcgtggttgtgattgtgcttaccaaactgctggtggcaatgcttcataaaagctttcagttgatagcaaatcatgaagacaaagaatggaagtttgctcgagcaaaattatggcttagctactttgatgacaaatgtacgttacctccacctttcaacatcattccctcaccaaagactatctgctatatgattagtagcctcagtaagtggatttgctctcatacatcaaaaggcaaggtcaaacggcaaaacagtttaaaggaatggaggaatttgaaacagaagagagatgaaaactatcaaaaagtgatgtgctgcctagtgcatcgttacttgacttccatgagacagaagatgcaaagtacagatcaggcaactgtggaaaatctaaacgaactgcgccaagatctgtcaaaattccgaaatgaaataagggatttacttggctttcggacttctaaatatgctatgttttatccaagaaattaa

SEQ ID NO: 137219 - protein, 848 aa, Artificial Sequence
  derived and/or modified sequence
MEGSPSLRRMTVMREKGRRQAVRGPAFMFNDRGTSLTAEEERFLDAAEYGNIPVVRKMLEESKTLNVNCVDYMGQNALQLAVGNEHLEVTELLLKKENLARIGDALLLAISKGYVRIVEAILNHPGFAASKRLTLSPCEQELQDDDFYAYDEDGTRFSPDITPIILAAHCQKYEVVHMLLMKGARIERPHDYFCKCGDCMEKQRHDSFSHSRSRINAYKGLASPAYLSLSSEDPVLTALELSNELAKLANIEKEFKNDYRKLSMQCKDFVVGVLDLCRDSEEVEAILNGDLESAEPLEVHRHKASLSRVKLAIKYEVKKFVAHPNCQQQLLTIWYENLSGLREQTIAIKCLVVLVVALGLPFLAIGYWIAPCSRLGKILRSPFMKFVAHAASFIIFLGLLVFNASDRFEGITTLPNITVTDYPKQIFRVKTTQFTWTEMLIMVWVLGMMWSECKELWLEGPREYILQLWNVLDFGMLSIFIAAFTARFLAFLQATKAQQYVDSYVQESDLSEVTLPPEIQYFTYARDKWLPSDPQIISEGLYAIAVVLSFSRIAYILPANESFGPLQISLGRTVKDIFKFMVLFIMVFFAFMIGMFILYSYYLGAKVNAAFTTVEESFKTLFWSIFGLSEVTSVVLKYDHKFIENIGYVLYGIYNVTMVVVLLNMLIAMINSSYQEIEDDSDVEWKFARSKLWLSYFDDGKTLPPPFSLVPSPKSFVYFIMRIVNFPKCRRRRLQKDIEMGMGNSKSRLNLFTQSNSRVFESHSFNSILNQPTRYQQIMKRLIKRYVLKAQVDKENDEVNEGELKEIKQDISSLRYELLEDKSQATEELAILIHKLSEKLNPSMLRCE

SEQ ID NO: 137220 - protein, 793 aa, Artificial Sequence
  derived and/or modified sequence
MEGSPSLRRMTVMREKGRRQAVRGPAFMFNDRGTSLTAEEERFLDAAEYGNIPVVRKMLEESKTLNVNCVDYMGQNALQLAVGNEHLEVTELLLKKENLARIGDALLLAISKGYVRIVEAILNHPGFAASKRLTLSPCEQELQDDDFYAYDEDGTRFSPDITPIILAAHCQKYEVVHMLLMKGARIERPHDYFCKCGDCMEKQRHDSFSHSRSRINAYKGLASPAYLSLSSEDPVLTALELSNELAKLANIEKEFKNDYRKLSMQCKDFVVGVLDLCRDSEEVEAILNGDLESAEPLEVHRHKASLSRVKLAIKYEVKKLGKILRSPFMKFVAHAASFIIFLGLLVFNASDRFEGITTLPNITVTDYPKQIFRVKTTQFTWTEMLIMVWVLGMMWSECKELWLEGPREYILQLWNVLDFGMLSIFIAAFTARFLAFLQATKAQQYVDSYVQESDLSEVTLPPEIQYFTYARDKWLPSDPQIISEGLYAIAVVLSFSRIAYILPANESFGPLQISLGRTVKDIFKFMVLFIMVFFAFMIGMFILYSYYLGAKVNAAFTTVEESFKTLFWSIFGLSEVTSVVLKYDHKFIENIGYVLYGIYNVTMVVVLLNMLIAMINSSYQEIEDDSDVEWKFARSKLWLSYFDDGKTLPPPFSLVPSPKSFVYFIMRIVNFPKCRRRRLQKDIEMGMGNSKSRLNLFTQSNSRVFESHSFNSILNQPTRYQQIMKRLIKRYVLKAQVDKENDEVNEGELKEIKQDISSLRYELLEDKSQATEELAILIHKLSEKLNPSMLRCE

SEQ ID NO: 137221 - DNA, 282 bp, Artificial Sequence
  derived and/or modified sequence
atggagggcagccccagcctgagaagaatgaccgtgatgagagagaagggcagaagacaggccgtgagaggccccgccttcatgttcaacgacagaggcaccagcctgaccgccgaggaggagagattcctggacgccgccgagtacggcaacatccccgtggtgagaaagatgctggaggagagcaagaccctgaacgtgaactgcgtggactacatgggccagaacgccctgcagctggccgtgggcaacgagcacctggaggtgaccgagctgctgtag

SEQ ID NO: 137222 - DNA, 282 bp, Artificial Sequence
  derived and/or modified sequence
atggaagggagtccatcactcagaaggatgaccgttatgcgggagaagggcaggaggcaagcagtgagaggacccgcatttatgtttaacgaccgcgggacttcattgaccgctgaggaagagcgattcttggatgccgctgagtatgggaatatcccagtggtccgaaagatgttggaagagtccaagacgctcaatgtaaactgcgttgactacatgggacagaacgcactgcaactcgccgtaggcaacgagcacttggaggtgacggaactgctctag

SEQ ID NO: 137223 - DNA, 282 bp, Artificial Sequence
  derived and/or modified sequence
atggagggcagccccagcctgcggaggatgacagtgatgagggagaagggccggcggcaggccgtgcggggccctgccttcatgtttaatgaccggggcaccagcctgacagctgaggaggagcgcttcctggatgctgctgaatatggcaacatccctgtggtgaggaagatgctggaggagagcaagaccctgaatgtgaactgtgtggactacatgggccagaatgccctgcagctggccgtgggcaatgagcacctggaggtgacagagctgctgtag

SEQ ID NO: 137224 - DNA, 282 bp, Artificial Sequence
  derived and/or modified sequence
atggagggcagccccagcctgcggcggatgaccgtgatgcgggagaaaggtcgacgtcaggccgttagaggacccgccttcatgtttaatgaccggggcacatccctcaccgctgaagaagaaagattcttggatgctgccgaatacggtaatatccccgtggtgagaaagatgctggaggagtcaaaaaccctgaacgtgaattgcgtggattatatgggacagaacgcgctccagctcgcagtgggtaatgagcaccttgaggttacagagctgctttag

SEQ ID NO: 137225 - DNA, 282 bp, Artificial Sequence
  derived and/or modified sequence
atggaggggtcaccgtccctcaggagaatgaccgtgatgagggagaagggcaggcgtcaggcagtgcgtggccctgccttcatgttcaacgaccgcggtactagtttgacagcggaagaagaacggttcctggacgcagcagaatatgggaatatccctgtggtaaggaagatgctggaagagtcgaaaaccctgaatgtcaactgtgtcgattatatgggccagaacgccttgcagctggctgtgggtaacgagcacttagaggtgacagagttgctgtag

SEQ ID NO: 137226 - protein, 982 aa, Artificial Sequence
  derived and/or modified sequence
MAQFYYKRNVNAPYRDRIPLRIVRAESELSPSEKAYLNAVEKGDYASVKKSLEEAEIYFKININCIDPLGRTALLIAIENENLELIELLLSFNVYVGDALLHAIRKEVVGAVELLLNHKKPSGEKQVPPILLDKQFSEFTPDITPIILAAHTNNYEIIKLLVQKGVSVPRPHEVRCNCVECVSSSDVDSLRHSRSRLNIYKALASPSLIALSSEDPFLTAFQLSWELQELSKVENEFKSEYEELSRQCKQFAKDLLDQTRSSRELEIILNYRDDNSLIEEQSGNDLARLKLAIKYRQKEFVAQPNCQQLLASRWYDEFPGWRRRHWAVKMVTCFIIGLLFPVFSVCYLIAPKSPLGLFIRKPFIKFICHTASYLTFLFLLLLASQHIDRSDLNRQGPPPTIVEWMILPWVLGFIWGEIKQMWDGGLQDYIHDWWNLMDFVMNSLYLATISLKIVAFVKYSALNPRESWDMWHPTLVAEALFAIANIFSSLRLISLFTANSHLGPLQISLGRMLLDILKFLFIYCLVLLAFANGLNQLYFYYEETKGLTCKGIRCEKQNNAFSTLFETLQSLFWSIFGLINLYVTNVKAQHEFTEFVGATMFGTYNVISLVVLLNMLIAMMNNSYQLIADHADIEWKFARTKLWMSYFEEGGTLPTPFNVIPSPKSLWYLIKWIWTHLCKKKMRRKPESFGTIGVRTQHRRAADNLRRHHQYQEVMRNLVKRYVAAMIRDAKTEEGLTEENFKELKQDISSFRFEVLGLLRGSKLSTIQSANASKESSNSADSDEKSDSEGNSKDKKKNFSLFDLTTLIHPRSAAIASERHNISNGSALVVQEPPREKQRKVNFVTDIKNFGLFHRRSKQNAAEQNANQIFSVSEEVARQQAAGPLERNIQLESRGLASRGDLSIPGLSEQCVLVDHRERNTDTLGLQVGKRVCPFKSEKVVVEDTVPIIPKEKHAKEEDSSIDYDLNLPDTVTHEDYVTTRL

SEQ ID NO: 137227 - DNA, 2949 bp, Artificial Sequence
  derived and/or modified sequence
atggcccagttctactacaagagaaacgtgaacgccccctacagagacagaatccccctgagaatcgtgagagccgagagcgagctgagccccagcgagaaggcctacctgaacgccgtggagaagggcgactacgccagcgtgaagaagagcctggaggaggccgagatctacttcaagatcaacatcaactgcatcgaccccctgggcagaaccgccctgctgatcgccatcgagaacgagaacctggagctgatcgagctgctgctgagcttcaacgtgtacgtgggcgacgccctgctgcacgccatcagaaaggaggtggtgggcgccgtggagctgctgctgaaccacaagaagcccagcggcgagaagcaggtgccccccatcctgctggacaagcagttcagcgagttcacccccgacatcacccccatcatcctggccgcccacaccaacaactacgagatcatcaagctgctggtgcagaagggcgtgagcgtgcccagaccccacgaggtgagatgcaactgcgtggagtgcgtgagcagcagcgacgtggacagcctgagacacagcagaagcagactgaacatctacaaggccctggccagccccagcctgatcgccctgagcagcgaggaccccttcctgaccgccttccagctgagctgggagctgcaggagctgagcaaggtggagaacgagttcaagagcgagtacgaggagctgagcagacagtgcaagcagttcgccaaggacctgctggaccagaccagaagcagcagagagctggagatcatcctgaactacagagacgacaacagcctgatcgaggagcagagcggcaacgacctggccagactgaagctggccatcaagtacagacagaaggagttcgtggcccagcccaactgccagcagctgctggccagcagatggtacgacgagttccccggctggagaagaagacactgggccgtgaagatggtgacctgcttcatcatcggcctgctgttccccgtgttcagcgtgtgctacctgatcgcccccaagagccccctgggcctgttcatcagaaagcccttcatcaagttcatctgccacaccgccagctacctgaccttcctgttcctgctgctgctggccagccagcacatcgacagaagcgacctgaacagacagggccccccccccaccatcgtggagtggatgatcctgccctgggtgctgggcttcatctggggcgagatcaagcagatgtgggacggcggcctgcaggactacatccacgactggtggaacctgatggacttcgtgatgaacagcctgtacctggccaccatcagcctgaagatcgtggccttcgtgaagtacagcgccctgaaccccagagagagctgggacatgtggcaccccaccctggtggccgaggccctgttcgccatcgccaacatcttcagcagcctgagactgatcagcctgttcaccgccaacagccacctgggccccctgcagatcagcctgggcagaatgctgctggacatcctgaagttcctgttcatctactgcctggtgctgctggccttcgccaacggcctgaaccagctgtacttctactacgaggagaccaagggcctgacctgcaagggcatcagatgcgagaagcagaacaacgccttcagcaccctgttcgagaccctgcagagcctgttctggagcatcttcggcctgatcaacctgtacgtgaccaacgtgaaggcccagcacgagttcaccgagttcgtgggcgccaccatgttcggcacctacaacgtgatcagcctggtggtgctgctgaacatgctgatcgccatgatgaacaacagctaccagctgatcgccgaccacgccgacatcgagtggaagttcgccagaaccaagctgtggatgagctacttcgaggagggcggcaccctgcccacccccttcaacgtgatccccagccccaagagcctgtggtacctgatcaagtggatctggacccacctgtgcaagaagaagatgagaagaaagcccgagagcttcggcaccatcggcgtgagaacccagcacagaagagccgccgacaacctgagaagacaccaccagtaccaggaggtgatgagaaacctggtgaagagatacgtggccgccatgatcagagacgccaagaccgaggagggcctgaccgaggagaacttcaaggagctgaagcaggacatcagcagcttcagattcgaggtgctgggcctgctgagaggcagcaagctgagcaccatccagagcgccaacgccagcaaggagagcagcaacagcgccgacagcgacgagaagagcgacagcgagggcaacagcaaggacaagaagaagaacttcagcctgttcgacctgaccaccctgatccaccccagaagcgccgccatcgccagcgagagacacaacatcagcaacggcagcgccctggtggtgcaggagccccccagagagaagcagagaaaggtgaacttcgtgaccgacatcaagaacttcggcctgttccacagaagaagcaagcagaacgccgccgagcagaacgccaaccagatcttcagcgtgagcgaggaggtggccagacagcaggccgccggccccctggagagaaacatccagctggagagcagaggcctggccagcagaggcgacctgagcatccccggcctgagcgagcagtgcgtgctggtggaccacagagagagaaacaccgacaccctgggcctgcaggtgggcaagagagtgtgccccttcaagagcgagaaggtggtggtggaggacaccgtgcccatcatccccaaggagaagcacgccaaggaggaggacagcagcatcgactacgacctgaacctgcccgacaccgtgacccacgaggactacgtgaccaccagactgtag

SEQ ID NO: 137228 - DNA, 2949 bp, Artificial Sequence
  derived and/or modified sequence
atggctcaattctactacaaaaggaacgtcaacgccccttacagggacagaatccccctcaggattgttagggccgagtccgagctgagcccctcagagaaagcttacctgaacgcagtggaaaagggcgattatgcttccgtaaaaaagtccctcgaagaagccgagatatatttcaagataaacatcaattgcatcgatccccttggtcggacagcacttttgattgccattgagaatgagaatctggagcttatagaattgttactttccttcaacgtctacgtaggagacgccttattacatgctatacggaaagaggtggtgggagctgttgagctattactcaaccataagaagcccagcggcgagaagcaagtaccgccaatcttgttggacaaacagttctcagaattcacaccagatatcaccccaattattctcgccgcccatacaaataattacgagatcattaagttactggtgcagaagggcgtgagcgtccctcggccgcacgaggtccgctgtaactgcgtagaatgcgtgtctagttctgatgttgattcattgcggcactcacgctcccggctgaatatctacaaagccttagcaagcccatctctgatcgctctgtccagtgaagacccattcctgacagccttccagctctcctgggagctgcaggaactgagtaaggttgaaaacgaattcaaaagcgagtatgaagagctttcacgtcaatgcaagcagttcgccaaggatctcttggatcagacacggtccagccgggaactagaaattattttaaattaccgtgacgacaattcacttatcgaggaacagtcgggcaatgatttggccaggcttaaactagccatcaaatatcggcagaaggaattcgtcgcccagccaaattgtcagcaactgctggccagccggtggtacgatgagttcccaggctggcggcgtaggcattgggccgtgaaaatggtgacatgctttattattgggctgctgttccctgtcttcagcgtctgctacttgatcgctcctaaaagtccgctgggactgttcatcagaaaacccttcattaaatttatatgtcatacagctagctaccttacctttctgtttctcctattgctcgctagtcaacatatagaccgatctgacttaaacagacagggaccaccgcccaccatagtggagtggatgatcctgccatgggtccttgggttcatttggggggagataaaacaaatgtgggatggcggactgcaggactacatccacgactggtggaacctgatggactttgttatgaacagcctctatctggccaccatttcactcaaaatcgttgcctttgttaaatattctgctttgaaccctcgtgagagttgggatatgtggcaccccacactcgtggcggaggcactgttcgcaatagcaaacattttttccagtctgcggctcatttctctcttcactgctaatagtcatctcggacctttgcagatctctctgggtcgtatgcttcttgacatactgaaattcctttttatatactgcctcgttctgctggcatttgctaacgggttgaaccagctctacttttactacgaagagaccaaggggttaacatgcaagggaatccggtgcgagaagcaaaacaacgccttctctaccttattcgagacgttgcagtcactcttttggtcaatcttcggccttatcaatctttacgtcaccaacgtaaaagcccagcatgagtttacagaattcgtgggggccaccatgttcggcacgtacaacgtgatcagcttggtggttttgctgaatatgctgattgctatgatgaacaattcatatcagctcatcgcagatcatgccgatatcgagtggaaatttgcacggaccaagctctggatgtcctactttgaggagggagggactcttcccactccttttaatgtcatcccatcaccaaagtccttgtggtaccttatcaaatggatctggacccacctttgcaagaagaaaatgaggagaaagcccgaatctttcgggactatcggggtgagaacccagcaccggagggccgcagacaacctccgccggcatcatcagtatcaggaagtgatgcgtaaccttgtgaagagatatgtggctgccatgatcagagacgcaaaaacggaggagggcctgactgaagaaaactttaaggagctgaaacaggatatttctagctttcgatttgaagtcctgggtcttctgcggggctcgaaactgagcacgattcaatccgccaacgcttctaaggagagttcaaacagcgccgattcggacgagaaaagtgatagcgaggggaattcaaaagacaaaaagaagaactttagtctcttcgatctgactacactcatccatcccaggtcagcagcaatagcctccgagagacacaacatttccaatggatctgcattggttgtgcaggagccaccacgagagaaacagagaaaagtgaactttgtgaccgatattaagaattttggattattccatcggagaagtaagcagaacgctgcagaacagaatgccaaccaaattttctctgtctcagaggaggtggcccggcaacaggcagccggcccgctggagagaaacatccaactggaatctaggggtctggccagtcgcggggacctttccatccctggcctctctgagcagtgcgtgcttgttgatcatagagagcggaataccgacacactgggcctccaggtgggaaaaagagtctgcccattcaagtcagaaaaagtggtggtggaggacaccgtccctatcatacccaaagaaaagcatgccaaggaagaggattcctctatagattatgacctcaaccttccggacaccgtcacacacgaagattatgttaccacgaggctgtag

SEQ ID NO: 137229 - DNA, 2949 bp, Artificial Sequence
  derived and/or modified sequence
atggcccagttctactacaagagaaatgtgaatgccccctacagagaccgcatccccctgcgcatcgtgcgggcagagagcgagctgagccccagcgagaaggcctacctgaatgctgtggagaagggggactatgcctctgtgaagaagagcctggaggaggccgagatctacttcaagatcaacatcaactgcatcgaccccctgggccgcacagccctgctgattgccattgaaaatgaaaacctggagctgattgagctgctgctgtccttcaacgtgtatgtgggagatgccctgctgcacgccatcaggaaggaggtggtgggcgctgtggagctgctgctgaaccacaagaagcccagcggggagaagcaggtgccccccatcctgctggacaagcagttcagcgagttcaccccagacatcacccccatcatcctggccgcccacaccaacaactatgagatcatcaagctgctggtgcagaagggcgtgtctgtgccccggccccatgaggtgcgctgcaactgtgtggagtgtgtgagcagcagtgatgtggacagcctgcggcacagccgcagccggctgaacatctacaaggccctggccagccccagcctgattgccctgagcagcgaggaccccttcctgacagccttccagctgtcctgggagctgcaggagctgagcaaggtggagaatgagttcaagtcagaatatgaggagctgagccggcagtgcaagcagtttgccaaggacctgctggaccagaccaggagcagccgggagctggagatcatcctgaactacagagatgacaacagcctcatcgaggagcagagcggaaatgacctggcccggctgaagctggccatcaagtaccggcagaaggagtttgtggcccagcccaactgccagcagctgctggccagccgctggtatgatgagttccctggctggaggagaagacactgggccgtgaagatggtgacctgcttcatcatcggcctgctcttccctgtgttttctgtgtgctacctgattgcccccaagagccccctgggcctcttcatcaggaagcccttcatcaagttcatctgccacacagccagctacctgaccttcctgttcctgctgctgctggccagccagcacatcgacagaagtgacctgaaccggcagggccccccacccaccatcgtggagtggatgatcctgccctgggtgctgggcttcatctggggcgagatcaagcagatgtgggatggcggcctgcaggactacatccatgactggtggaacctgatggactttgtgatgaacagcctgtacctggccaccatcagcctgaagatcgtggcctttgtgaagtacagcgccctgaacccccgggagagctgggacatgtggcaccccaccctggtggccgaggccctgtttgccatcgccaacatcttcagcagcctgcggctcatcagcctcttcaccgccaacagccacctgggccccctgcagatcagcctgggccgcatgctgctggacatcctgaagttcctgttcatctactgcctggtgctgctggcctttgccaacggcctgaaccagctgtacttctactatgaggagaccaagggcctgacctgcaagggcatccgctgtgagaagcagaacaatgccttcagcaccctgtttgagaccctgcagagcctcttctggagcatcttcggcctcatcaacctgtatgtgaccaacgtgaaggcccagcacgagttcacagaatttgtgggcgccaccatgtttggcacctacaacgtcatcagcctggtggtgctgctgaacatgctgattgccatgatgaacaacagctaccagctgattgctgaccatgctgacatcgagtggaagtttgcccggaccaagctgtggatgagctactttgaggagggcggcaccctgcccacccccttcaacgtcatccccagccccaagagcctgtggtacctgatcaagtggatctggacccacctgtgcaagaagaagatgaggaggaagccagagagctttggcaccatcggcgtgaggacccagcacagaagagctgctgacaacctgcggcggcaccaccagtaccaggaggtgatgaggaacctggtgaagcgctacgtggccgccatgatcagagatgccaagacagaggagggcctgacagaggagaacttcaaggagctgaagcaggacatcagcagcttccgctttgaggtgctgggcctgctgcggggcagcaagctgagcaccatccagagcgccaatgccagcaaggagagcagcaacagcgctgacagtgatgagaagagtgacagcgagggcaacagcaaggacaagaagaagaacttcagcctgtttgacctgaccaccctcatccaccccaggtctgctgccatcgccagcgagcggcacaacatcagcaatggcagcgccctggtggtgcaggagcccccccgggagaagcagaggaaggtgaactttgtgacagacatcaagaactttggcctcttccacagaagaagcaagcagaatgctgctgagcagaatgccaaccagatcttctctgtgtctgaggaggtggcccggcagcaggccgccggccccctggagaggaacatccagctggagagccggggcctggccagcagaggagacctgagcatccctggcctgtctgagcagtgtgtgctggtggaccaccgggagaggaacacagacaccctgggcctgcaggtgggcaagagggtgtgccccttcaagtctgagaaggtggtggtggaggacacagtgcccatcatccccaaggagaagcacgccaaggaggaggacagcagcattgattatgacctgaacctgcctgacacagtgacccatgaagattatgtgaccacccggctgtag

SEQ ID NO: 137230 - DNA, 2949 bp, Artificial Sequence
  derived and/or modified sequence
atggcccagttctactacaagcggaacgtgaacgccccctaccgggacaggattcctctccgcattgtgcgggcggagtcagagctgtcaccgtcagagaaggcgtatctgaatgctgtggagaaaggagattatgccagtgtcaagaagtccttggaggaggctgaaatctatttcaagataaatattaattgcatcgaccccctggggcgcacggcactcttgattgccatcgagaacgaaaacctggagttgatagaactgctgttatcctttaacgtgtacgtcggcgatgcccttctccacgccattcgcaaagaagtcgtaggtgccgtcgagctgctgctgaaccataaaaagccatcaggcgagaagcaggtgcctcctatcttgctcgataaacaattttcggaatttacccccgacattaccccaatcatcctggccgcccacaccaataactatgagattattaagttgctcgtgcagaagggtgtgtccgtgcctcgcccccatgaagttcgctgcaactgtgtcgaatgcgtgagctcatccgatgtcgattcactaaggcatagccgctctaggcttaatatctataaagcactcgcttctccatctctcattgcactgtcctccgaggaccctttcctcacagcttttcagctgtcctgggaactgcaggaactgtcaaaggtagagaacgaattcaagtcagagtatgaagaactctcgcgccagtgtaagcaatttgcaaaagatctgctcgatcagacaaggtcatcccgtgaactggaaatcattctgaattaccgcgatgataacagcctgattgaggagcaaagtggcaatgatctcgctagattaaaactggctataaaataccggcagaaagagttcgttgcccagcccaactgtcagcagctcctggcttcccggtggtatgacgagttcccaggttggcgaagaagacattgggcagtgaaaatggttacatgtttcattataggccttctgtttcccgtgttctccgtctgttacctaatagcccccaaaagccctctcggcttgttcatccgcaagccctttatcaaattcatttgccataccgccagttacttaaccttcttgttccttctgcttctggctagtcaacacattgatcgatctgacctcaataggcagggcccgccccctacgattgtcgagtggatgatacttccatgggtgttggggtttatttggggggagattaagcagatgtgggacgggggactccaggattatattcacgattggtggaatctgatggacttcgtgatgaactccctataccttgccaccataagccttaaaattgtcgccttcgtgaaatactcagctctgaatcctagagagtcgtgggacatgtggcatcccactctggttgctgaggccttattcgcaattgccaatatcttttcaagcctgaggcttatttccctgtttaccgcaaatagccacttaggtccgttgcagatctctctggggcgcatgctgctggatattttaaaatttctgttcatttattgtcttgtcctgctggcattcgctaatgggctaaatcaactgtatttttactacgaggaaactaaagggttaacatgtaaaggcataaggtgcgagaagcagaacaacgctttcagtactctttttgagactctgcagagtctgttttggagtatctttggtctgatcaacttgtatgtgactaacgtgaaggcccagcacgaatttaccgaattcgtcggagccactatgttcgggacatataacgtgatcagcttggtggtgctcctgaatatgctcatcgccatgatgaacaattcctatcaactcatcgcagatcatgcagacatagagtggaaattcgctaggactaagctttggatgtcttatttcgaggaaggcggcactctgcctacaccgttcaatgtcatcccttccccaaaatccctgtggtacttgattaagtggatttggacccatctctgtaagaaaaaaatgcgacgcaagcccgaaagcttcgggacaattggtgtgaggacgcagcatcgaagggccgctgataatctccgtcgacatcatcagtaccaggaagttatgcgtaacttagtcaaacgatatgtcgcagctatgatacgcgacgctaagacagaagaagggctgacggaggagaacttcaaggagctgaaacaggacataagcagtttcagatttgaggttctgggactcttgcgcggatccaagctgagcacgatacagagcgcgaatgccagcaaggaatcatccaactccgccgactctgacgagaagtctgattccgaagggaattcgaaagacaagaaaaagaattttagccttttcgacctgacaaccctgattcaccctcgaagcgctgcaattgccagtgagagacacaacatcagcaatggaagcgcactcgtagtgcaggagccccctagggaaaagcagcggaaagtgaattttgtgactgatatcaagaattttgggctatttcacaggaggagcaaacagaacgccgctgaacagaacgctaatcagattttctcggtttcggaggaggtcgcgcgtcagcaggccgccggccctcttgagaggaacatccaactggagagtagggggttagcttctcgaggggacctaagtatccccggtttgagcgaacagtgtgtcttggtggaccaccgcgagcggaacacagacacactgggtctacaggtggggaaaagggtgtgtcccttcaagtcagagaaggtagttgtggaggacactgttcccataatccccaaggaaaagcacgccaaggaggaggacagttccatcgactatgacctcaatctgcctgacaccgtcacacatgaggactacgttaccactcgcctttag

SEQ ID NO: 137231 - DNA, 2949 bp, Artificial Sequence
  derived and/or modified sequence
atggcccagttttactataaaaggaacgtgaacgctccgtaccgggatcgaattccactccgcatagttagagctgagtcagaactgagcccgtctgagaaggcttatttgaatgccgtggagaaaggagattatgcctccgttaagaaatctctagaggaggctgaaatttacttcaagatcaatatcaattgtatcgaccccttaggccgaacagccctgctgattgccatagagaacgagaacttggagcttatagagctgctccttagctttaacgtatatgtaggtgatgccctgctgcatgccatccgtaaagaagtcgtgggggctgtggagttactcttaaaccataagaaaccatccggcgagaagcaggtacctcctatcctcttggacaagcaattctctgagtttacacctgacattaccccaatcatcctagccgctcatactaataattatgaaatcatcaagctgctggtgcagaaaggggtatccgtgcctagaccgcacgaagtgcggtgcaactgtgttgagtgcgtgtctagttctgatgttgacagcctgaggcatagccgcagtaggctcaatatttataaggctctggctagcccttcccttattgctctttcctcagaagacccgttcctaacggcattccagctatcgtgggagctccaagaactcagcaaagtggagaatgaatttaagagcgaatacgaggaattatcaaggcaatgcaagcagttcgccaaggatctgctggaccagactaggtcatcccgagagctggaaattatactgaactatagggacgataactcgctgatcgaagaacagtctgggaacgacctcgcacgattaaagctcgccatcaagtaccgacagaaggagtttgtggcccagcccaactgccagcagctcctcgcatcccggtggtatgacgaattcccagggtggaggagacgtcattgggctgtcaaaatggtcacctgttttattattggcctactattccctgttttttcggtctgttacctcattgcgcctaagtctcctctggggctgttcattaggaagcccttcatcaagtttatttgccataccgcttcttacctcacgtttctgtttcttctgcttctggcttcacagcatatcgaccgctccgacctgaacaggcaagggcctccacccacaatcgtggagtggatgatactgccttgggtgctcgggtttatatggggagaaattaaacaaatgtgggacgggggtctgcaggactacattcacgactggtggaacctgatggacttcgtcatgaactcactgtatctggccaccatatctctgaagatcgttgccttcgtgaagtattcagccttgaatccccgtgaaagctgggatatgtggcatccgacactcgtcgccgaagcactgtttgctatagcaaacatttttagctctctcaggctcatctccctctttacagccaacagtcatcttggacccttacagatcagtttggggcgaatgctgcttgacatcctgaaattcttgtttatctactgcctggtgcttttagcgttcgcaaacggactgaatcagctctatttttattatgaggagacaaagggtctaacttgcaaggggattagatgtgagaagcagaacaacgcatttagtacattgtttgagacacttcaaagtcttttttggtcaatttttgggctcattaatttgtacgtgactaacgtgaaggcccaacatgagtttacagagttcgttggagcgactatgttcgggacgtacaatgtgatctctctcgttgttctgctcaatatgctgattgctatgatgaataattcctaccaacttatcgcagaccacgccgacatcgaatggaaatttgcacgcaccaaactctggatgtcatatttcgaggaggggggaaccctgcccacaccttttaacgtgataccgtcgccaaaaagtctgtggtatcttatcaaatggatatggactcacctgtgtaagaagaagatgcgccgtaagcccgagagcttcggaacaattggggttcggacccagcatcgtagggctgccgataacctccggagacaccatcagtaccaggaagtgatgcggaaccttgtgaaacggtacgtggccgcaatgatccgagatgccaagaccgaggagggcctgacagaagaaaatttcaaagagctcaaacaggatatctctagctttcggtttgaagtgctcggtttgctgcggggatctaaacttagtacgatccagagtgcgaacgcgtccaaggagtcctccaattctgccgactccgatgagaaaagcgatagtgagggcaactccaaggacaagaagaagaactttagcctatttgacctcaccaccctgatccaccctcgcagcgcagctatagcctcagagagacacaacattagtaatggttccgctctcgtggtccaggaacccccacgcgagaaacaacgcaaagtcaatttcgtgacagatatcaagaatttcggactcttccaccggagatccaagcagaacgccgctgaacaaaacgccaaccaaatcttttccgtgtcagaagaagtggcaagacagcaggctgctggcccactggagcgcaacattcagctggagagccgaggccttgcaagccggggagatttgtctatccctgggttaagcgaacagtgtgtgttggtagatcatagagagcgaaacacggataccctcggtctgcaggtcggtaagcgggtgtgcccatttaagagcgaaaaagtcgtcgtggaagacaccgtccccattattcctaaagagaagcatgccaaggaggaggactctagcatagactatgacttgaatttacctgataccgttactcacgaggactatgtcaccactcggctctag

SEQ ID NO: 137232 - DNA, 3446 bp, Artificial Sequence
  derived and/or modified sequence
cttcgctttcagagcatcctcactccgcccagttcggtgccagctgcgtgggctccagcttcgatcgttttccttggaatgctccaaaactcagcagcgactaagggaattccattggaatttgccgggcgtgctctcaccccgcacggcacccgcgccgtcagtcctcggatcccatcacttcagcccgaagattgcaactttgcagagacgaagaaatagcatggcatgaaacatggctcagttctattacaaaagaaatgttaatgctccctatagagaccgcatccctctaaggatagtaagagcagaatcagaactctcgccatcagaaaaagcctacttgaatgctgtggaaaagggagattatgccagtgtcaagaaatccctagaggaagctgaaatttattttaaaatcaatattaattgcattgatcctctcggaagaactgctctcctcattgcaattgaaaatgagaacttggagctcatcgaactactcttaagctttaatgtctatgttggagatgctctattacatgctatcagaaaagaagtcgtcggagctgttgagctgttattgaaccacaaaaaacctagtggagaaaaacaggtgcctcctatactccttgataagcagttctctgaattcactccagacattacaccaatcattttggcagcccatacaaataattatgagataataaaactcttggttcagaaaggagtctcagtgcctcgaccccacgaggtccgctgtaactgtgtggaatgcgtgtccagttcagatgtggacagcctccgtcactcacgctccagactcaacatctacaaggccttggccagtccctctctcattgcactgtcaagcgaagatccttttctcacagcctttcagttaagttgggaacttcaggaactgagcaaggtggaaaatgaattcaagtcggagtatgaagagctgtcacggcagtgcaaacaatttgctaaggacctactggatcagacgagaagttccagagaactggaaatcattcttaattaccgagatgacaatagtctcatagaagaacaaagtggaaatgatcttgcaagactaaaattggccattaagtaccgtcaaaaagagtttgttgcccagcccaattgtcaacagctgctggcatctcgctggtacgatgagtttccaggctggaggagaagacactgggcagtgaagatggtgacatgtttcataataggacttctttttcctgtcttctctgtgtgctacctgatagctcccaaaagcccacttggactgttcatcaggaagccatttatcaagtttatctgccacacagcctcctatttgacttttttgttcctgctgctgcttgcctctcagcacatcgacaggtcagacttgaacaggcaaggtccaccaccaaccatcgtcgagtggatgatattaccgtgggtcctgggcttcatatggggagaaattaaacagatgtgggatggcggacttcaggactacatccatgattggtggaatctaatggactttgtaatgaactccttatatttagcaacaatctccttgaaaattgttgcatttgtaaagtacagtgcccttaatccacgagaatcatgggacatgtggcatcccactctggtggcagaggctttatttgctattgcaaacatcttcagttctctgcgtctgatctcactgtttactgcaaattctcacctgggacctctgcaaatatctctgggaagaatgctcctggacattttgaagtttctattcatatactgccttgtgttgctagcatttgcaaatggcctaaatcaattgtacttctattatgaagaaacgaaagggttaacctgcaaaggcataagatgtgaaaagcagaataatgcattttcaacgttatttgagacactgcagtccctgttttggtcaatatttgggctcatcaatttatatgtgaccaatgtcaaagcacagcatgaatttactgagtttgttggtgccaccatgtttgggacatacaatgtcatctctctggttgttctactcaacatgttaatagctatgatgaataattcttaccaactgattgctgaccatgcagatatagaatggaaatttgcacgaacaaagctttggatgagttattttgaagaaggaggtactctgcctactcccttcaatgtcatcccgagccccaagtctctctggtacctgatcaaatggatctggacacacttgtgcaagaaaaagatgagaagaaagccagaaagttttggaacaataggggtaagaacacagcataggcgagctgctgataacttgagaagacatcaccaataccaagaagttatgaggaacctggtgaagcgatacgttgctgcaatgattagagatgctaaaactgaagaaggcctgaccgaagagaactttaaggaactaaagcaagacatttctagtttccgctttgaagtcctgggattactaagaggaagcaaactttccacaatacaatctgcgaatgcctcgaaggagtcttcaaattcggcagactcagatgaaaagagtgatagcgaaggtaatagcaaggacaagaaaaagaatttcagcctttttgatttaaccaccctgattcatccgagatcagcagcaattgcctctgaaagacataacataagcaatggctctgccctggtggttcaggagccgcccagggagaagcagagaaaagtgaattttgtgaccgatatcaaaaactttgggttatttcatagacgatcaaaacaaaatgctgctgagcaaaatgcaaaccaaatcttctctgtttcagaagaagttgctcgtcaacaggctgcaggaccacttgagagaaatattcaactggaatctcgaggattagcttcacggggtgacctgagcattcccggtctcagtgaacaatgtgtgttagtagaccatagagaaaggaatacggacacactggggttacaggtaggaaagagagtgtgtccattcaagtcagagaaggtggtggtggaggacacggttcctataataccaaaggagaaacatgcaaaagaagaggactctagtatagactatgatctaaacctcccagacacagtcacccacgaagattacgtgaccacaagattgtgatacttgaaggaggaagcgtttaccatacacatacgtattttccgtagtgctctgggtgggggaaaatgtttaaattgtattagcaaatgctaacttacactttatagcgtttatcagctgtggcatattacctgtaacatgtttaaataaggcaaaggcaatcaaaaacctttttgttttgtagcctgcttttgctttcacaatttgtcttacaattgtttttgttaataaataaatgcaccttgtattcttgtactgttgc

SEQ ID NO: 137233 - protein, 308 aa, Artificial Sequence
  derived and/or modified sequence
MRPEGSLTYRVPERLRQGFCGVGRAAQALVCASAKEGTAFRMEAVQEGAAGVESEQAALGEEAVLLLDDIMAEVEVVAEEEGLVERREEAQRAQQAVPGPGPMTPESAPEELLAVQVELEPVNAQARKAFSRQREKMERRRKPHLDRRGAVIQSVPGFWANVIANHPQMSALITDEDEDMLSYMVSLEVGEEKHPVHLCKIMLFFRSNPYFQNKVITKEYLVNITEYRASHSTPIEWYPDYEVEAYRRRHHNSSLNFFNWFSDHNFAGSNKIAEILCKDLWRNPLQYYKRMKPPEEGTETSGDSQLLS

SEQ ID NO: 137234 - DNA, 945 bp, Artificial Sequence
  derived and/or modified sequence
atgagacccgagggcagcctgacctacagagtgcccgagagactgagacagggcttctgcggcgtgggcagagccgcccaggccctggtgtgcgccagcgccaaggagggcaccgccttcagaatggaggccgtgcaggagggcgccgccggcgtggagagcgagcaggccgccctgggcgaggaggccgtgctgctgctggacgacatcatggccgaggtggaggtggtggccgaggtggaggtggtggccgaggaggagggcctggtggagagaagagaggaggcccagagagcccagcaggccgtgcccggccccggccccatgacccccgagagcgcccccgaggagctgctggccgtgcaggtggagctggagcccgtgaacgcccaggccagaaaggccttcagcagacagagagagaagatggagagaagaagaaagccccacctggacagaagaggcgccgtgatccagagcgtgcccggcttctgggccaacgtgatcgccaaccacccccagatgagcgccctgatcaccgacgaggacgaggacatgctgagctacatggtgagcctggaggtgggcgaggagaagcaccccgtgcacctgtgcaagatcatgctgttcttcagaagcaacccctacttccagaacaaggtgatcaccaaggagtacctggtgaacatcaccgagtacagagccagccacagcacccccatcgagtggtaccccgactacgaggtggaggcctacagaagaagacaccacaacagcagcctgaacttcttcaactggttcagcgaccacaacttcgccggcagcaacaagatcgccgagatcctgtgcaaggacctgtggagaaaccccctgcagtactacaagagaatgaagccccccgaggagggcaccgagaccagcggcgacagccagctgctgagctag

SEQ ID NO: 137235 - DNA, 927 bp, Artificial Sequence
  derived and/or modified sequence
atgagacccgagggcagcctgacctacagagtgcccgagagactgagacagggcttctgcggcgtgggcagagccgcccaggccctggtgtgcgccagcgccaaggagggcaccgccttcagaatggaggccgtgcaggagggcgccgccggcgtggagagcgagcaggccgccctgggcgaggaggccgtgctgctgctggacgacatcatggccgaggtggaggtggtggccgaggaggagggcctggtggagagaagagaggaggcccagagagcccagcaggccgtgcccggccccggccccatgacccccgagagcgcccccgaggagctgctggccgtgcaggtggagctggagcccgtgaacgcccaggccagaaaggccttcagcagacagagagagaagatggagagaagaagaaagccccacctggacagaagaggcgccgtgatccagagcgtgcccggcttctgggccaacgtgatcgccaaccacccccagatgagcgccctgatcaccgacgaggacgaggacatgctgagctacatggtgagcctggaggtgggcgaggagaagcaccccgtgcacctgtgcaagatcatgctgttcttcagaagcaacccctacttccagaacaaggtgatcaccaaggagtacctggtgaacatcaccgagtacagagccagccacagcacccccatcgagtggtaccccgactacgaggtggaggcctacagaagaagacaccacaacagcagcctgaacttcttcaactggttcagcgaccacaacttcgccggcagcaacaagatcgccgagatcctgtgcaaggacctgtggagaaaccccctgcagtactacaagagaatgaagccccccgaggagggcaccgagaccagcggcgacagccagctgctgagctag

SEQ ID NO: 137236 - DNA, 945 bp, Artificial Sequence
  derived and/or modified sequence
atgcgtccggaagggtctctcacctatcgcgtgcctgagaggctgcgtcagggcttttgcggagtaggaagggcggcccaggcattggtttgtgcctccgcaaaggagggcactgcttttcggatggaggccgtccaggagggtgccgctggggtggaaagtgaacaggccgccctaggggaggaggccgttctgctcctcgatgatatcatggccgaggtcgaggtggtggcagaagtcgaagtggtggcagaggaagaaggtctggtagaacggcgggaggaagcacaacgggctcagcaggcagttcccgggcctgggcctatgactcctgagtcggccccagaagaactgcttgccgtgcaggtcgaactcgagcccgtgaatgcccaagcccggaaagctttttctaggcagcgcgagaagatggaacggcgacgtaagccccatttggacaggcggggagcggtgatacagagcgtcccaggattctgggctaatgtcatcgcaaaccatccgcagatgagcgcccttattaccgacgaggacgaggatatgctttcctatatggtgtcactggaggtgggagaagagaagcaccctgtgcacttgtgcaagatcatgctttttttcagatcgaacccttattttcagaacaaagtaattacaaaggaatacctggtgaacattactgagtatcgtgcaagtcattccacaccaatcgagtggtatcctgactatgaagtggaagcataccggcggagacatcataattccagtcttaatttctttaattggttcagtgaccataatttcgctggaagcaacaagattgccgaaatcctgtgcaaggacttgtggaggaacccgttgcaatactacaagcgcatgaaaccaccggaagagggaacagagacgtctggcgattcacagcttttatcatag

SEQ ID NO: 137237 - DNA, 927 bp, Artificial Sequence
  derived and/or modified sequence
atgcgcccggaggggtctctcacgtatcgggtgcctgagcgcctccggcagggcttctgcggagtgggacgtgccgcgcaagctttagtatgcgcctctgctaaagagggcacagccttccggatggaagccgtccaggaaggagccgctggcgtggaatccgaacaggcagcgttaggcgaggaggctgtcctcctgctggacgacattatggccgaggtggaagtagtagctgaagaggagggtcttgtcgaaagaagagaggaagcacagcgggcgcagcaagccgtgcccggcccgggccccatgacccccgagtcggctcccgaagagcttctggctgtgcaggttgagctggaacccgtaaatgctcaggctaggaaggcttttagccgtcaaagagagaagatggagcggcgccgaaaacctcatctcgatcgccggggggcagtgattcagagtgtcccgggcttttgggccaacgtcattgccaaccatccacagatgtcagctttaatcactgatgaggacgaggacatgctgtcttatatggtaagtctagaggtgggggaggaaaagcatcctgtacacttgtgcaagattatgctgttcttcagatcaaacccttatttccagaacaaggtgattacgaaagaatacctcgtaaatataactgagtatagagcttctcactcaacccctatagaatggtacccggactacgaagtggaagcctacagaagaagacaccataactcaagcctcaattttttcaattggttttcggatcacaacttcgccggctccaacaaaatcgctgaaattctgtgcaaggacttgtggcgcaacccccttcagtactacaaacgcatgaagcctcccgaggaaggaaccgaaacctcgggcgatagtcagctgctgtcttag

SEQ ID NO: 137238 - DNA, 945 bp, Artificial Sequence
  derived and/or modified sequence
atgaggcctgagggcagcctgacctacagagtgcctgagcggctgcggcagggcttctgtggggtgggccgggccgcccaggccctggtgtgtgccagcgccaaggagggcacagccttcaggatggaggccgtgcaggagggcgccgccggcgtggagagcgagcaggccgccctgggggaggaggccgtgctgctgctggatgacatcatggccgaggtggaggtggtggccgaggtggaggtggtggccgaggaggagggcctggtggagcggcgggaggaggcccagagggcccagcaggccgtgcccggccctggccccatgaccccagagagcgcccctgaggagctgctggccgtgcaggtggagctggagcctgtgaatgcccaggccaggaaggccttcagccggcagcgggagaagatggagaggaggaggaagccccacctggacagaagaggagctgtgatccagagcgtgcccggcttctgggccaacgtgattgccaaccacccccagatgtctgccctgatcacagatgaagatgaggacatgctgagctacatggtgtccctggaggtgggggaggagaagcaccctgtgcacctgtgcaagatcatgctgttcttccgcagcaacccctacttccagaacaaggtgatcaccaaggagtacctggtgaacatcacagagtaccgggccagccacagcacccccatcgagtggtacccagactatgaggtggaggcctacagaagaagacaccacaacagcagcctgaacttcttcaactggttcagtgaccacaactttgctggcagcaacaagattgctgagatcctgtgcaaggacctgtggaggaaccccctgcagtactacaagaggatgaagcccccagaggagggcacagagaccagcggggacagccagctgctgtcctag

SEQ ID NO: 137239 - DNA, 927 bp, Artificial Sequence
  derived and/or modified sequence
atgaggcctgagggcagcctgacctacagagtgcctgagcggctgcggcagggcttctgtggggtgggccgggccgcccaggccctggtgtgtgccagcgccaaggagggcacagccttcaggatggaggccgtgcaggagggcgccgccggcgtggagagcgagcaggccgccctgggggaggaggccgtgctgctgctggatgacatcatggccgaggtggaggtggtggccgaggaggagggcctggtggagcggcgggaggaggcccagagggcccagcaggccgtgcccggccctggccccatgaccccagagagcgcccctgaggagctgctggccgtgcaggtggagctggagcctgtgaatgcccaggccaggaaggccttcagccggcagcgggagaagatggagaggaggaggaagccccacctggacagaagaggagctgtgatccagagcgtgcccggcttctgggccaacgtgattgccaaccacccccagatgtctgccctgatcacagatgaagatgaggacatgctgagctacatggtgtccctggaggtgggggaggagaagcaccctgtgcacctgtgcaagatcatgctgttcttccgcagcaacccctacttccagaacaaggtgatcaccaaggagtacctggtgaacatcacagagtaccgggccagccacagcacccccatcgagtggtacccagactatgaggtggaggcctacagaagaagacaccacaacagcagcctgaacttcttcaactggttcagtgaccacaactttgctggcagcaacaagattgctgagatcctgtgcaaggacctgtggaggaaccccctgcagtactacaagaggatgaagcccccagaggagggcacagagaccagcggggacagccagctgctgtcctag

SEQ ID NO: 137240 - DNA, 945 bp, Artificial Sequence
  derived and/or modified sequence
atgcggcccgagggcagcctgacctaccgggtgcccgagcggctgaggcagggcttttgtggcgtgggccgagctgcccaggcccttgtatgcgcctctgccaaagagggtaccgcctttaggatggaagcggtccaggagggagccgccggcgtggaatccgagcaggccgcactaggggaggaagcagtactgctgcttgatgatatcatggccgaggtcgaggtggtcgcggaagtagaagtggtggctgaggaagagggccttgtggaaaggagagaagaggctcagcgggcccaacaggctgttccaggaccaggtcccatgacacccgagtctgcccccgaggaattgctggcggtgcaggtggagctcgaacccgtgaacgcccaggcaagaaaagcattttcgagacagagggagaaaatggagagaaggcgaaaaccccatctggaccggaggggggctgtgattcagtccgtgccgggattctgggcaaacgtgattgccaaccatccccaaatgagtgctttaatcaccgacgaggatgaggatatgctgagctatatggtgagcctggaggtgggcgaggagaagcacccggttcacttatgcaagattatgttgttctttagatctaatccctatttccagaataaagttattactaaagagtacctggtgaacatcaccgaatatagagcctctcactccacccccattgagtggtatccagactacgaagtcgaggcataccgtcggagacaccacaactcctccctaaacttcttcaattggttttccgatcacaactttgccggatccaacaaaatcgccgaaattctttgcaaagacctgtggcgtaaccccctgcagtactacaaaaggatgaagcctccagaggaaggtaccgagacttccggggacagccagctcttgtcttag

SEQ ID NO: 137241 - DNA, 927 bp, Artificial Sequence
  derived and/or modified sequence
atgcggcccgagggcagcctgacctaccgggtgcccgagcggctgcgccaggggttttgtggcgttggcagggccgcacaggccctggtgtgcgcaagcgccaaagagggcactgcttttaggatggaagccgttcaggaaggtgcagcgggagtggagagcgaacaagctgcattaggagaggaagccgtcctgctcctggacgatattatggccgaagttgaggtcgtcgccgaggaagaaggtctggtggagcgcagggaagaagcccaacgcgcccagcaggctgttcctggccctggtccgatgaccccagagagtgctccggaggaactcctggctgtccaggtggaactggagcctgtcaatgcacaggcacgtaaagccttctcgcgacagagggaaaagatggaacgccggaggaagccccatttagaccgacggggcgctgtgatccagtctgtgccagggttttgggctaatgtgatcgccaatcaccctcagatgagtgccctcatcaccgatgaagatgaagacatgctgagttacatggtttcactagaagtcggagaggagaagcatcctgtccatctgtgcaagataatgctcttcttcagaagcaacccttattttcaaaacaaagtgattaccaaggaatacctagtgaatattaccgaataccgagcctcgcacagcaccccaatcgaatggtacccagattacgaagttgaggcgtatcggagaagacatcataacagctcactgaatttcttcaactggttcagcgatcacaactttgccgggtccaataagattgccgaaatactgtgcaaggacctatggcgcaatcccctccagtactacaaaaggatgaaaccaccagaagagggcaccgagacttccggcgactcgcagttactctcctag

SEQ ID NO: 137242 - DNA, 945 bp, Artificial Sequence
  derived and/or modified sequence
atgcggccagagggctcattaacgtatagagtgccagagcggctaaggcagggattctgtggcgtgggaagggctgcccaagccctggtctgcgcatccgctaaagagggcactgcttttagaatggaagcagttcaggaaggcgctgctggtgtggaatccgagcaagccgctctcggagaagaggcagtgctactgctggatgacatcatggccgaagtcgaggttgtggctgaagtggaggtggtggccgaggaggagggcctagttgagagaagggaggaggcccagagagcccagcaggccgtacctggcccaggcccaatgacacctgagtcggccccagaagaacttctggctgtgcaggtggaactcgaacctgtaaacgctcaggcgcgtaaggccttcagccggcagcgcgagaagatggaacgacgccgaaaaccccacctagacagaagaggggcagtcatccagtctgtgcccggtttttgggccaacgttattgctaaccatcctcagatgtcagcattaatcaccgacgaggacgaggacatgctgtcttacatggtctccctagaggtgggggaagagaagcacccagtccacctgtgcaagattatgctgtttttccgttctaacccctatttccagaataaggtgatcacaaaggaatacctcgtgaacattacggagtatagagccagtcacagtacgcccatagagtggtatccagattatgaagttgaagcgtatcgacggaggcatcacaattcttctctgaacttcttcaactggttctcagatcacaactttgccggatcaaacaagattgccgagatcctgtgcaaggatttgtggaggaaccccctgcagtattacaagcggatgaaaccccctgaggagggaactgaaacatcaggtgactcccagctgctgagctag

SEQ ID NO: 137243 - DNA, 927 bp, Artificial Sequence
  derived and/or modified sequence
atgaggccagagggaagcctgacctacagggtgcccgagcgcctgagacaggggttctgcggagtgggcagagctgcacaggctctcgtgtgcgcgagtgccaaagaaggcacagctttcaggatggaagcggtgcaggaaggcgcagccggagtcgaatcagagcaggcggctcttggcgaagaggccgttctactcctggatgacatcatggccgaggtggaggtggtcgctgaggaggagggcctcgttgaaagaagggaggaggcacagagggcacagcaagccgtgcctgggccaggtccgatgacccctgaaagcgctccggaagagctcttggccgtccaggtagagctcgaacctgtgaacgctcaggccaggaaggcattcagtaggcagcgcgaaaaaatggaaagacgccgtaagccacatttagaccgaagaggcgctgtgatacagtcagtgccgggattctgggccaacgtaattgccaaccacccacagatgtctgctctgatcaccgacgaagacgaggacatgctgtcttacatggtttctctggaagtcggcgaagagaaacacccagtccacctgtgtaagattatgctgttctttcggtcgaacccatacttccagaataaggtcattaccaaggagtacttagtgaatatcacggaatatagagcttctcattcaacgcctattgaatggtacccggactatgaggtggaggcctatcgcaggcggcatcacaactcatctctgaattttttcaattggttctccgaccacaatttcgcaggttccaataaaattgcagaaattctgtgcaaggatctatggagaaatccccttcagtattacaaacgaatgaagcctcctgaagaaggaaccgagacttctggcgacagccaactcctatcttag

SEQ ID NO: 137244 - DNA, 1132 bp, Artificial Sequence
  derived and/or modified sequence
atgcgccctgagggctcgctgacctaccgggtgccagagaggctgcggcagggtttctgtggcgtgggtcgggcagcacaggccttggtgtgtgcgagtgccaaggagggcaccgccttcaggatggaggctgtacaggagggggcggccggggtggagagtgagcaggcggctttgggggaggaggcggtgctgctgttggatgacataatggcggaggtggaggtggtggcggaggtggaggtggtggcggaggaggagggcctcgtggagcggcgggaggaggcccagcgggcacagcaggctgtgcctggccctgggcccatgaccccagagtctgcaccggaggagctgctggccgttcaggtggagctggagccggttaatgcccaagccaggaaggccttttctcggcagcgggaaaagatggagcggaggcgcaagccccacctagaccgcagaggcgccgtcatccagagcgtccctggcttctgggccaatgttattgcaaaccacccccagatgtcagccctgatcactgacgaagatgaagacatgctgagctacatggtcagcctggaggtgggagaagagaagcatcctgttcatctctgcaagatcatgttgttctttcggagtaacccctacttccagaataaagtgattaccaaggaatatctggtgaacatcacagaatacagggcttctcattccactccaattgagtggtatccggattatgaagtggaggcctatcgccgcagacaccacaacagcagccttaacttcttcaactggttctctgaccacaacttcgcaggatctaacaagattgctgagatcctatgtaaggacctgtggcgcaatcccctgcaatactacaagaggatgaagccacctgaagagggaacagagacgtcaggggactcccagttgttgagttgaatatgatggagcatcagattttacctaatacagcagaactcctaaaaagttacagccatatgcaggacggcagtactcagcatggtcttatgcacaggaactaaaggaaaaagagatcgagtcacaaaaattcaggaagagggggtaaatgtggattgtatggaatgaaaaataaacattctcaagg

SEQ ID NO: 137245 - DNA, 1160 bp, Artificial Sequence
  derived and/or modified sequence
ggcccttcgcgcgcagtcccttagggggcgcctggaagcccggcgcatgcgccctgagggctcgctgacctaccgggtgccagagaggctgcggcagggtttctgtggcgtgggtcgggcagcacaggccttggtgtgtgcgagtgccaaggagggcaccgccttcaggatggaggctgtgcaggagggggcggccggggtggagagtgagcaggcggctttgggggaggaggcggtgctgctgttggatgacataatggcggaggtggaggtggtggcggaggaggagggcctcgtggagcggcgggaggaggcccagcgggcacagcaggctgtgcctggccctgggcccatgaccccagagtctgcaccggaggagctgctggccgttcaggtggagctggagccggttaatgcccaagccaggaaggccttttctcggcagcgggaaaagatggagcggaggcgcaagccccacctagaccgcagaggcgccgtcatccagagcgtccctggcttctgggccaatgttattgcaaaccacccccagatgtcagccctgatcactgacgaagatgaagacatgctgagctacatggtcagcctggaggtgggagaagagaagcatcctgttcatctctgcaagatcatgttgttctttcggagtaacccctacttccagaataaagtgattaccaaggaatatctggtgaacatcacagaatacagggcttctcattccactccaattgagtggtatccggattatgaagtggaggcctatcgccgcagacaccacaacagcagccttaacttcttcaactggttctctgaccacaacttcgcaggatctaacaagattgctgagatcctatgtaaggacctgtggcgcaatcccctgcaatactacaagaggatgaagccacctgaagagggaacagagacgtcaggggactcccagttgttgagttgaatatgatggagcatcagattttacctaatacagcagaactcctaaaaagttacagccatatgcaggacggcagtactcagcatggtcttatgcacaggaactaaaggaaaaagagatcgagtcacaaaaattcaggaagagggggtaaatgtggattgtatggaatgaaaaataaacattctcaagg

SEQ ID NO: 137246 - protein, 437 aa, Artificial Sequence
  derived and/or modified sequence
MSGLDGVKRTTPLQTHSIIISDQVPSDQDAHQYLRLRDQSEATQVMAEPGEGGSETVALPPPPPSEEGGVPQDAAGRGGTPQIRVVGGRGHVAIKAGQEEGQPPAEGLAAASVVMAADRSLKKGVQGGEKALEICGAQRSASELTAGAEAEAEEVKTGKCATVSAAVAERESAEVVKEGLAEKEVMEEQMEVEEQPPEGEEIEVAEEDRLEEEAREEEGPWPLHEALRMDPLEAIQLELDTVNAQADRAFQQLEHKFGRMRRHYLERRNYIIQNIPGFWMTAFRNHPQLSAMIRGQDAEMLRYITNLEVKELRHPRTGCKFKFFFRRNPYFRNKLIVKEYEVRSSGRVVSLSTPIIWRRGHEPQSFIRRNQDLICSFFTWFSDHSLPESDKIAEIIKEDLWPNPLQYYLLREGVRRARRRPLREPVEIPRPFGFQSG

SEQ ID NO: 137247 - protein, 173 aa, Artificial Sequence [sequence omitted]

SEQ ID NO: 137248 - DNA, 1314 bp, Artificial Sequence
  derived and/or modified sequence
atgagcggcctggacggcgtgaagagaaccacccccctgcagacccacagcatcatcatcagcgaccaggtgcccagcgaccaggacgcccaccagtacctgagactgagagaccagagcgaggccacccaggtgatggccgagcccggcgagggcggcagcgagaccgtggccctgcccccccccccccccagcgaggagggcggcgtgccccaggacgccgccggcagaggcggcaccccccagatcagagtggtgggcggcagaggccacgtggccatcaaggccggccaggaggagggccagccccccgccgagggcctggccgccgccagcgtggtgatggccgccgacagaagcctgaagaagggcgtgcagggcggcgagaaggccctggagatctgcggcgcccagagaagcgccagcgagctgaccgccggcgccgaggccgaggccgaggaggtgaagaccggcaagtgcgccaccgtgagcgccgccgtggccgagagagagagcgccgaggtggtgaaggagggcctggccgagaaggaggtgatggaggagcagatggaggtggaggagcagccccccgagggcgaggagatcgaggtggccgaggaggacagactggaggaggaggccagagaggaggagggcccctggcccctgcacgaggccctgagaatggaccccctggaggccatccagctggagctggacaccgtgaacgcccaggccgacagagccttccagcagctggagcacaagttcggcagaatgagaagacactacctggagagaagaaactacatcatccagaacatccccggcttctggatgaccgccttcagaaaccacccccagctgagcgccatgatcagaggccaggacgccgagatgctgagatacatcaccaacctggaggtgaaggagctgagacaccccagaaccggctgcaagttcaagttcttcttcagaagaaacccctacttcagaaacaagctgatcgtgaaggagtacgaggtgagaagcagcggcagagtggtgagcctgagcacccccatcatctggagaagaggccacgagccccagagcttcatcagaagaaaccaggacctgatctgcagcttcttcacctggttcagcgaccacagcctgcccgagagcgacaagatcgccgagatcatcaaggaggacctgtggcccaaccccctgcagtactacctgctgagagagggcgtgagaagagccagaagaagacccctgagagagcccgtggagatccccagacccttcggcttccagagcggctag

SEQ ID NO: 137249 - DNA, 522 bp, Artificial Sequence
  derived and/or modified sequence
atgagcggcctggacggcgtgaagagaaccacccccctgcagacccacagcatcatcatcagcgaccaggtgcccagcgaccaggacgcccaccagtacctgagactgagagaccagagcgaggccacccaggtgatggccgagcccggcgagggcggcagcgagaccgtggccctgcccccccccccccccagcgaggagggcggcgtgccccaggacgccgccggcagaggcggcaccccccagatcagagtggtgggcggcagaggccacgtggccatcaaggccggccaggaggagggccagccccccgccgagggcctggccgccgccagcgtggtgatggccgccgacagaagcctgaagaagggcgtgcagggcggcgagaaggccctggagatctgcggcgcccagagaagcgccagcgagctgaccgccggcgccgaggccgaggccgaggaggtgaagaccggcaagtgcgccaccgtgagcgccgccgtggccaagatgcagagatgctag

SEQ ID NO: 137250 - DNA, 1314 bp, Artificial Sequence
  derived and/or modified sequence
atgtctggcttggacggtgtgaagcgtactaccccgttgcaaacacactctataatcattagtgatcaggtgcccagtgaccaggacgctcaccagtatctgagattgagagatcagtccgaggccactcaggtaatggccgaacccggtgagggagggtcagagaccgtagccctaccccctccccccccgagcgaggaaggaggagttccccaggacgctgccggccggggaggaaccccccagattagagtggtcgggggacgaggccacgtcgccattaaagccggccaggaggaaggacagccccccgccgagggtttggctgccgcgagtgtggtaatggccgcagatcgctcactgaagaaaggagtgcaggggggggagaaagctctggagatttgcggggcgcagcgctccgcctcagaacttaccgcaggggccgaggctgaggccgaagaggtgaaaactggcaaatgcgctacagtgagtgctgccgtcgcagagcgagaatctgcggaagtggtgaaggagggtcttgccgaaaaggaagtcatggaagagcagatggaggttgaggaacaacctcccgaaggcgaagaaatagaggtggctgaggaagaccgtttggaggaagaagccagggaggaagaaggtccctggccacttcacgaagccttacgcatggacccactggaagcgatccagctggaacttgacacggtcaatgcccaggccgaccgggcctttcagcaactagaacataaattcggccggatgcggcgtcattatcttgagcgccgaaattatattattcagaatattcctggtttctggatgacagcgtttagaaaccacccacagctcagcgctatgatcagggggcaggatgccgaaatgctccgatacatcaccaatctggaggtgaaggaactgcggcatccccgtacagggtgcaaatttaaattctttttcagaaggaacccttattttaggaacaaactgatcgtgaaggaatacgaggtgagaagttctggcagagtggtgagtctgagtacaccaatcatctggcggagaggccacgagccccagtcctttattcgcagaaatcaggatctgatttgttctttcttcacttggttcagtgatcattccttacctgagtctgacaagattgccgaaattattaaggaggacctgtggcctaatccactacagtattatctgcttcgagaaggggttcgaagagcacgccggcgaccgctacgggagcctgtggaaattcctagaccttttggcttccagtctgggtag

SEQ ID NO: 137251 - DNA, 522 bp, Artificial Sequence
  derived and/or modified sequence
atgtccggcctagatggagtcaaaaggaccacccccctgcagacacattctatcattatctctgaccaagtgccaagcgatcaggacgcacaccagtacctgagattgcgagatcaatctgaggccacccaggtaatggccgagccaggggagggagggagtgaaacggtggccttacctcccccacctccatctgaagaaggcggggtgccacaggacgccgcgggtcgtggtggaacgccacagatcagagtggtgggagggagaggccatgtggcaatcaaagcaggccaggaagaagggcaaccccctgctgaaggactggccgcagcctcggtagtgatggcagcagatcgctccctgaagaagggtgtacaaggcggggagaaagccttggagatttgtggcgcccaacggagcgcttcagaattgaccgcaggtgccgaagctgaggctgaggaggtgaagaccggtaagtgtgccacggtgagcgctgctgtggctaaaatgcaaagatgttag

SEQ ID NO: 137252 - DNA, 1314 bp, Artificial Sequence
  derived and/or modified sequence
atgagcggcctggatggagtgaagaggaccacccccctgcagacccacagcatcatcatcagtgaccaggtgcccagcgaccaggatgcccaccagtacctgcggctgcgggaccagagcgaggccacccaggtgatggccgagcctggagagggcggcagcgagaccgtggccctgcccccacctcctccttctgaggagggcggcgtgccccaggatgctgctggccggggcggcaccccccagatccgggtggtgggcggccggggccacgtggccatcaaggccggccaggaggagggccagcccccagctgagggcctggccgccgcctctgtggtgatggctgctgacaggagcctgaagaagggcgtgcagggcggggagaaggccctggagatctgtggggcccagaggtctgccagcgagctgacagctggagctgaggccgaggccgaggaggtgaagacaggaaaatgtgccaccgtgtctgctgctgtggccgagcgggagagcgctgaggtggtgaaggagggcctggccgagaaggaggtgatggaggagcagatggaggtggaggagcagcccccagagggggaggagattgaggtggccgaggaggaccggctggaggaggaggcccgggaggaggagggcccctggcccctgcacgaggccctgaggatggaccccctggaggccatccagctggagctggacacagtgaatgcccaggccgaccgggccttccagcagctggagcacaagtttggaaggatgagaagacactacctggagaggaggaactacatcatccagaacatccctggcttctggatgacagccttcaggaaccacccccagctgagcgccatgatccggggccaggatgctgagatgctgcgctacatcaccaacctggaggtgaaggagctgcggcaccccaggacaggctgcaagttcaagttcttcttcagaagaaacccctacttcaggaacaagctgattgtgaaggagtatgaggtgcgcagcagcggccgggtggtgtccctgagcacccccatcatctggaggcggggccacgagccccagagcttcatcagaagaaaccaggacctgatctgcagcttcttcacctggttcagtgaccacagcctgcctgagagtgacaagattgctgagatcatcaaggaggacctgtggcccaaccccctgcagtactacctgctgcgggagggcgtgagaagagccaggagaagacccctgcgggagcctgtggagatcccccggcccttcggcttccagagcggctag

SEQ ID NO: 137253 - DNA, 522 bp, Artificial Sequence
  derived and/or modified sequence
atgagcggcctggatggagtgaagaggaccacccccctgcagacccacagcatcatcatcagtgaccaggtgcccagcgaccaggatgcccaccagtacctgcggctgcgggaccagagcgaggccacccaggtgatggccgagcctggagagggcggcagcgagaccgtggccctgcccccacctcctccttctgaggagggcggcgtgccccaggatgctgctggccggggcggcaccccccagatccgggtggtgggcggccggggccacgtggccatcaaggccggccaggaggagggccagcccccagctgagggcctggccgccgcctctgtggtgatggctgctgacaggagcctgaagaagggcgtgcagggcggggagaaggccctggagatctgtggggcccagaggtctgccagcgagctgacagctggagctgaggccgaggccgaggaggtgaagacaggaaaatgtgccaccgtgtctgctgctgtggccaagatgcagcgctgctag

SEQ ID NO: 137254 - DNA, 1314 bp, Artificial Sequence
  derived and/or modified sequence
atgagcggcctggacggcgtgaagcggaccacccccctgcagacccattccattatcatcagcgatcaagtgccctctgatcaagacgctcaccaatatctgcgactgcgagatcagagcgaagctacccaagtgatggctgaacccggggagggtggtagcgaaacagtcgctctcccaccccctccacctagcgaagaaggaggcgtacctcaagatgcggccggtcgaggagggacccctcaaatccgtgtggtcggcggacgtgggcacgtggctatcaaggcaggccaggaggaaggccaacccccggctgagggcttggcagctgcgagcgtggtcatggctgccgatcggagcctgaagaaaggagtacaagggggggaaaaagcccttgagatttgcggggcccagcgctccgcctccgagctgactgcaggagccgaggcagaagccgaggaggtcaagactggtaagtgcgccactgtgtccgccgccgttgccgagcgcgagtccgctgaggtagttaaggagggattggcagagaaagaagttatggaagaacagatggaggtggaggagcagccaccggagggagaggagattgaagtcgcagaagaagatcgtttggaggaggaagcccgcgaggaggaggggccctggccattgcacgaggctttgcgcatggatccgctggaagccatccaactggagctggatactgtgaacgcccaagccgacagagcattccagcagctcgagcacaaattcggcagaatgcggagacactatctggaaagacgtaactacattattcagaatattcctggcttttggatgaccgcgttccgcaaccacccgcagttgtctgcgatgatacgtggacaggacgcggagatgctgcggtatataacaaacctggaagtgaaagagctgcgccatccaagaactggctgcaaattcaagtttttctttaggcggaacccctatttcaggaataagttgatcgtcaaagagtacgaggttcgctcctctgggagggtcgtgagtctgtcaactcccattatttggaggaggggtcacgaaccccagtctttcatcagaaggaaccaggatcttatttgctcattttttacttggttctcagatcacagcctgccagaaagtgataagattgcagagataatcaaggaggacctgtggcccaaccctttacagtattatctgctgcgcgagggggtgaggagggccaggaggcggcctttgcgagaacctgttgagataccgagaccgttcggatttcagtctggctag

SEQ ID NO: 137255 - DNA, 522 bp, Artificial Sequence
  derived and/or modified sequence
atgagcggcctggacggcgtgaagcggaccacccccctgcagacccatagtattataattagcgatcaggttcccagtgatcaggacgctcatcaatatttgcgcctccgggaccaatccgaggcgacacaggtaatggctgaacccggagaaggagggtctgagaccgtcgcactgcctccacctcccccgagcgaggaaggaggagtgccacaggatgctgcaggccgaggaggcactccccagattcgtgtggtggggggaaggggacatgtcgcaatcaaggctggccaggaagagggtcaaccacccgccgaggggctggccgcagcttctgtcgttatggccgccgacaggtcccttaaaaaaggggtgcagggaggcgaaaaagccttagaaatctgcggagctcaaaggagcgccagcgagctgacagctggcgccgaggctgaagctgaggaagtcaaaaccggcaaatgcgccaccgtgtccgccgcggtggcaaaaatgcagaggtgttag

SEQ ID NO: 137256 - DNA, 1314 bp, Artificial Sequence
  derived and/or modified sequence
atgagtggactggacggagtgaagcgaaccacccctttgcagacccactctataattatcagtgatcaggtcccttccgatcaggatgcacaccaataccttaggttgcgcgaccagagcgaagccacccaggttatggctgagccaggcgaaggaggaagtgaaaccgtggccctgcctccgcctcctccctccgaggaaggcggagttccacaggacgcagctggcagaggaggcactcctcaaatacgagtggtggggggtcgcggacatgtggccattaaggctggccaagaggaaggccagccacctgctgagggtttggctgctgctagcgtggtgatggctgcggacaggtctctgaaaaagggtgtgcaggggggtgagaaagccctggaaatctgcggagcccaacggagcgccagcgagctaacagccggtgcagaggctgaggccgaagaggtaaagacaggtaagtgcgcaaccgtgagtgcagctgttgcggaacgagagtccgctgaggtggtgaaagaaggcctggccgaaaaggaggtaatggaggagcagatggaagtcgaggagcagcctccggaaggcgaagagattgaagtcgcagaggaggatcgactggaggaagaagcacgggaggaagaaggaccatggccgctccacgaggcccttcgaatggatcccctggaggctattcagttggaactagatacagtaaatgcccaagcagacagagctttccaacagctggagcacaagtttggacggatgagaagacattatctagaacggcgaaattatatcatccagaacatccctgggttttggatgaccgcgtttcggaaccatcctcagctgtccgccatgatcaggggccaagacgcagagatgctgcggtatattaccaatctggaggtgaaggagcttaggcaccccaggacagggtgcaaatttaaattcttttttcgaaggaacccctacttccgaaataaactcatcgtcaaggaatacgaagtgcgctcaagtgggagagtcgtttcactgtcgacacctattatctggagaagaggtcacgagcctcagtccttcattcggaggaaccaggatctcatatgctccttctttacttggttttccgaccatagcctgcctgaaagtgataaaatagcagaaatcatcaaggaggatctatggcctaatccgctgcagtactatcttctcagggaaggtgtccgtagggcccgaaggcggccactccgcgaacccgtggaaatcccacgtccatttggttttcagagcggttag

SEQ ID NO: 137257 - DNA, 522 bp, Artificial Sequence
  derived and/or modified sequence
atgtctggactcgatggggtcaagcgcacaacaccccttcaaactcacagtatcattatctcagaccaagttccctctgatcaggacgcccaccagtacctcagactgcgagaccagagcgaggccacccaggtgatggctgagcctggggaggggggttctgaaaccgtagcactcccgcctccgccaccttctgaagaggggggtgtgccgcaggacgcggcaggcagaggcggtacgccacagattcgagtcgttggtggtaggggacatgtggccattaaggccggtcaggaagaaggacagcccccagccgaaggcctcgccgctgcctccgttgtaatggccgctgaccggagcctgaagaagggcgttcaaggcggtgaaaaagcactagaaatctgtggggcacagaggtccgcctcggaactaactgccggagccgaggccgaagctgaggaggtaaagacaggcaaatgcgccaccgtgtctgctgccgtggctaagatgcagcgatgctag

SEQ ID NO: 137258 - DNA, 3326 bp, Artificial Sequence
  derived and/or modified sequence
gcggcggttagctcccagttcggcctctgaggaaaacgggcgttcgcctgcggttggtccgactgttagcaacatgagcggcctggatggggtcaagaggaccactcccctccaaacccacagcatcattatttctgaccaagtcccgagcgaccaggacgcacaccagtacctgaggctccgcgaccaaagcgaggcgacacaggtgatggcggagccgggtgagggaggctcggagaccgtcgcgctcccgcctccaccgccttcagaggaggggggcgtaccccaggatgccgcgggccgtggcggtactccccagatccgagttgttgggggtcgcggtcatgtggcgatcaaagccgggcaggaagagggccagcctcccgccgaaggcctggcagccgcttctgtggtgatggcagccgaccgcagcctgaaaaagggcgttcagggtggagagaaggccctagaaatctgtggcgcccagagatccgcgtctgagctgacggcgggggcggaggctgaggcggaggaggtgaagacaggaaagtgcgccaccgtctcagcagccgtggctgagagggagagcgctgaggtggtgaaggaaggcctggcggagaaggaggtaatggaggagcagatggaggtagaggagcagccgccagaaggtgaagaaatagaagtggcggaggaggatagattggaggaggaggcgagggaggaagaagggccctggcctttgcatgaggctctccgcatggaccctctggaggccatccagctggaactggacactgtgaatgctcaggccgacagggccttccaacagctggagcacaagtttgggcggatgcgtcgacactacctggagcggaggaactacatcattcagaatatcccgggcttctggatgactgcttttcgaaaccacccccagttgtccgccatgattaggggccaagatgcagagatgttaaggtacataaccaatttagaggtgaaggaactcagacaccctagaaccggttgcaagttcaagttcttctttagaagaaacccctacttcagaaacaagctgattgtcaaggaatatgaggtaagatcctccggccgagtggtgtctctttctactccaattatatggcgcagggggcatgaaccccagtccttcattcgcagaaaccaagacctcatctgcagcttcttcacttggttttcagaccacagccttccagagtccgacaaaattgctgagattattaaagaggatctgtggccaaatccactgcaatactacctgttgcgtgaaggagtccgtagagcccgacgtcgcccgctaagggagcctgtagagatccccaggccctttgggttccagtctggttaacatttgcccttgggaatactcctgcacaaggtctcctaccaccttctgctggacctgtgcttgggcatcagcaatgagtatgccttctattgtgctttgtttttgctgacttttctgcaccctgtttcctttggatattcagttctctcaacctcaagattgagacggtggtgggtatgcttctccacttccatatgaccttcatgctgttctggaatatcacatgctacgaggtcatccttcacactacttgtaagccaagcaaatgatactgtagattgtactgcctttatctgcactgcttggaccctgtttattcccagggcctctgaactggttgctgtcacttggatttctagctttgggagcctgttccacctactcagctctgcattgagcagtatgggcacatgccctgtggacagttactggacgttaatgaactcagaggagaaaagcagtgagccacttgttctgtgtgatttatggtacttcattgctcttccttcacctctagtcactttctattgctacctgccctacattggctcctgccaaggtccctctctctccctgttttccttttttttttttttttttttttttttgagacggaggacggagtcttgctctgtcgcccaggttggagtgcagtggcgcgatctcggctcactgcaacctccacctcccgggttcaagcgattctcctgcctcagcctcccgagtagctgggactacaggcgcgcgccgccacgcccggctaatttttatatttttagtagagacggggtttcaccatgctggccaggctggtctcgaaccccgatctcgtgatccgccctccttagcctcccaatcctctcttaaaaaagtgatagctcagaaacatttgtaaaagcaaggtttttatttcattttggctctgtcattttcagaggcaaagaagttggcctgtaaaatagagtgctagagctcttacgcccctccccttcttcccaacttcctacttcctagcccttttatcaactcctagaatagttaaagagagacacatctagatgggatgaaaggtgccctaagcaggagaaactgaacaaaaggctagaggcatgggccaggtaaaaattgggcctagagtgaagactgtgctgtcgttaagagctttcgaggaaggagtacttactccccaatgatgatgaatggaaaaatacttttcagggagaattgaaggggttaaagtgttaaatatgttgcctagacaagggttctttaaagaaagacagcgcaactttgaatgctttcttacttgttttgtgacctaatttatgtggaagattgttatttcattaggatttagtaaaatttttttttctgattctaaacttattgtgaaaattgagctgtacagatattcttttgatttcaattgggaacatttggaagaacaacagtcttacttgcctgtacaatatagagacatatgaatagtcataacagttttcaacttgttcttgtttctgttaaactatattcctagaaacatagtttgaacaacttggtctttgttaggcttgtcaaattgccttcatggaaaaataatctacaaaagtatggtttaattgattgtcttacatgataattttccctggtaacaacttagtaagtgatatatcttttttcctaaattgcttaaatactgtgaaattgctctgacaaattggaagtgtaccattggcatatttgtcttcctttttatgcatgatggtaaaataaaagcatgttgttctgctagatttcttatttttcaccttacccataaatgtaatgcttgaatgaagttgttcatattaattaaaaattatggaatcattaaagtcctttaatccattaaagttcttaatggattaaaatcattaaagttcttaatggattaaaatca

SEQ ID NO: 137259 - DNA, 1108 bp, Artificial Sequence
  derived and/or modified sequence
agttcggcctctgaggaaaacgggcgttcgcctgcggttggtccgactgttagcaacatgagcggcctggatggggtcaagaggaccactcccctccaaacccacagcatcattatttctgaccaagtcccgagcgaccaggacgcacaccagtacctgaggctccgcgaccaaagcgaggcgacacaggtgatggcggagccgggtgagggaggctcggagaccgtcgcgctcccgcctccaccgccttcagaggaggggggcgtaccccaggatgccgcgggccgtggcggtactccccagatccgagttgttgggggtcgcggtcatgtggcgatcaaagccgggcaggaagagggccagcctcccgccgaaggcctggcagccgcttctgtggtgatggcagccgaccgcagcctgaaaaagggcgttcagggtggagagaaggccctagaaatctgtggcgcccagagatccgcgtctgagctgacggcgggggcggaggctgaggcggaggaggtgaagacaggaaagtgcgccaccgtctcagcagccgtggccaagatgcagagatgttaaggtacataaccaatttagaggtgaaggaactcagacaccctagaaccggttgcaagttcaagttcttctttagaagaaacccctacttcagaaacaagctgattgtcaaggaatatgaggtaagatcctccggccgagtggtgtctctttctactccaattatatggcgcagggggcatgaaccccagtccttcattcgcagaaaccaagacctcatctgcagcttcttcacttggttttcagaccacagccttccagagtccgacaaaattgctgagattattaaagaggatctgtggccaaatccactgcaatactacctgttgcgtgaaggagtccgtagagcccgacgtcgcccgctaagggagcctgtagagatccccaggccctttgggttccagtctggttaacatttgcccttgggaatactcctgcacaaggtctcctaccaccttctgctggacctgtgcttgggcatcagcaatgagtatgccttctattgtgctttgtttttgctgacttttctgca

SEQ ID NO: 137260 - protein, 387 aa, Artificial Sequence
  derived and/or modified sequence
MEDDAPVIYGLEFQARALTPQTAETDAIRFLVGTQSLKYDNQIHIIDFDDENNIINKNVLLHQAGEIWHISASPADRGVLTTCYNRTSDSKVLTCAAVWRMPKELESGSHESPDDSSSTAQTLELLCHLDNTAHGNMACVVWEPMGDGKKIISLADNHILLWDLQESSSQAVLASSASLEGKGQLKFTSGRWSPHHNCTQVATANDTTLRGWDTRSMSQIYCIENAHGQLVRDLDFNPNKQYYLASCGDDCKVKFWDTRNVTEPVKTLEEHSHWVWNVRYNHSHDQLVLTGSSDSRVILSNMVSISSEPFGHLVDDDDISDQEDHRSEEKSKEPLQDNVIATYEEHEDSVYAVDWSSADPWLFASLSYDGRLVINRVPRALKYHILL

SEQ ID NO: 137261 - DNA, 1164 bp, Artificial Sequence
  derived and/or modified sequence
atggaggacgacgcccccgtgatctacggcctggagttccaggccagagccctgaccccccagaccgccgagaccgacgccatcagattcctggtgggcacccagagcctgaagtacgacaaccagatccacatcatcgacttcgacgacgagaacaacatcatcaacaagaacgtgctgctgcaccaggccggcgagatctggcacatcagcgccagccccgccgacagaggcgtgctgaccacctgctacaacagaaccagcgacagcaaggtgctgacctgcgccgccgtgtggagaatgcccaaggagctggagagcggcagccacgagagccccgacgacagcagcagcaccgcccagaccctggagctgctgtgccacctggacaacaccgcccacggcaacatggcctgcgtggtgtgggagcccatgggcgacggcaagaagatcatcagcctggccgacaaccacatcctgctgtgggacctgcaggagagcagcagccaggccgtgctggccagcagcgccagcctggagggcaagggccagctgaagttcaccagcggcagatggagcccccaccacaactgcacccaggtggccaccgccaacgacaccaccctgagaggctgggacaccagaagcatgagccagatctactgcatcgagaacgcccacggccagctggtgagagacctggacttcaaccccaacaagcagtactacctggccagctgcggcgacgactgcaaggtgaagttctgggacaccagaaacgtgaccgagcccgtgaagaccctggaggagcacagccactgggtgtggaacgtgagatacaaccacagccacgaccagctggtgctgaccggcagcagcgacagcagagtgatcctgagcaacatggtgagcatcagcagcgagcccttcggccacctggtggacgacgacgacatcagcgaccaggaggaccacagaagcgaggagaagagcaaggagcccctgcaggacaacgtgatcgccacctacgaggagcacgaggacagcgtgtacgccgtggactggagcagcgccgacccctggctgttcgccagcctgagctacgacggcagactggtgatcaacagagtgcccagagccctgaagtaccacatcctgctgtag

SEQ ID NO: 137262 - DNA, 1164 bp, Artificial Sequence
  derived and/or modified sequence
atggaagatgatgcccctgttatttatggcctggaatttcaggcacgggcactgactcctcaaacggcagaaacagacgcaattaggtttctggtaggtacacagagcctgaagtatgataaccagatccatatcatcgacttcgatgatgaaaataatatcattaacaagaacgtcctgctgcatcaggccggcgaaatctggcatatcagtgcgtcgccggccgaccgaggggttctcactacatgctacaatcgaactagtgattccaaagtgctgacctgtgccgctgtatggcgcatgcctaaagaattggagtcaggatctcatgagtcgccagatgatagttctagtaccgctcaaacgctggagctgctgtgccacctggacaatactgcacacggtaatatggcatgtgtggtctgggaacctatgggagacggaaaaaagataatttctctagccgataaccacatcctgctctgggatctgcaggagtccagttcccaagccgttctggcatctagtgccagtctcgaaggcaaagggcagctcaagttcacaagtggaagatggagcccccatcataattgcacccaagtggcgaccgctaatgacacaacactgcgcggctgggacacccggtccatgtcccagatatattgtattgagaatgcccatggccagctggtgcgagacctggattttaaccctaataaacagtactacctcgcaagctgtggcgacgactgtaaagtgaaattctgggacacacgcaatgttaccgagccagtgaaaactctggaggagcactcacattgggtgtggaacgtacgttacaaccactctcatgatcagcttgtactgacaggaagcagcgactcccgcgtgattcttagcaatatggttagcatcagctccgagcctttcggacacctcgtggacgacgacgacatctctgaccaggaggatcatcggagtgaagagaagtccaaagagccactgcaagataacgtgatcgcaacatacgaagaacatgaggacagtgtctacgctgtggactggagctccgccgatccatggctcttcgcgtctctgagttatgacggtcggttggtgattaaccgcgttccgagggcattgaagtaccacatactgctgtag

SEQ ID NO: 137263 - DNA, 1164 bp, Artificial Sequence
  derived and/or modified sequence
atggaggatgatgcccctgtgatctacggcctggagttccaggcccgggccctgaccccccagacagctgagacagatgccatccgcttcctggtgggcacccagagcctgaagtatgacaaccagatccacatcatcgactttgatgatgagaacaacatcatcaacaagaatgtgctgctgcaccaggccggggagatctggcacatcagcgccagccctgctgaccggggcgtgctgaccacctgctacaacagaacaagtgacagcaaggtgctgacctgtgccgctgtgtggaggatgcccaaggagctggagagcggcagccatgagagcccagatgacagcagcagcacagcccagaccctggagctgctgtgccacctggacaacacagcccacggcaacatggcctgtgtggtgtgggagcccatgggagatggcaagaagatcatcagcctggccgacaaccacatcctgctgtgggacctgcaggagagcagcagccaggccgtgctggccagcagcgccagcctggagggcaagggccagctgaagttcaccagcggccgctggagcccccaccacaactgcacccaggtggccacagccaatgacaccaccctgcggggctgggacaccaggtccatgagccagatctactgcattgaaaatgcccacggccagctggtgcgggacctggacttcaaccccaacaagcagtactacctggccagctgtggagatgactgcaaggtgaagttctgggacaccagaaatgtgacagagcctgtgaagaccctggaggagcacagccactgggtgtggaatgtgcgctacaaccacagccatgaccagctggtgctgaccggcagcagtgacagcagggtcatcctgagcaacatggtgtccatcagcagcgagcccttcggccacctggtggatgatgatgacatcagtgaccaggaggaccacaggtctgaggagaagagcaaggagcccctgcaggacaacgtcatcgccacctatgaggagcatgaagattctgtgtatgctgtggactggagcagcgctgacccctggctgtttgccagcctgtcctatgatggccgcctggtgatcaacagagtgccccgggccctgaagtaccacatcctgctgtag

SEQ ID NO: 137264 - DNA, 1164 bp, Artificial Sequence
  derived and/or modified sequence
atggaggacgacgcccccgtgatctacggcctggagttccaggcccgcgctcttacaccccaaacagctgaaactgatgcaatccgttttcttgtgggcactcagtccttgaaatatgataaccagattcatattatagatttcgacgatgaaaacaatattattaataagaacgttcttctgcaccaggcaggagaaatctggcatatctccgcgtcccccgccgaccgtggcgtgctaacaacttgctacaaccgcacatcagattctaaggtccttacctgcgctgccgtttggaggatgccgaaggagctggaatcgggctcacacgaatctcctgatgactcgtccagtaccgcacagactctggagttgttgtgccatctggacaacaccgcccatggaaatatggcctgcgtggtgtgggaacccatgggtgatggcaaaaaaatcatttctttggcagacaaccatattctcctgtgggacctgcaggagagttcaagccaggcagtcttggcgtcttctgcctccctcgagggcaagggtcagttgaaattcacaagcgggcgctggtcgccacatcacaattgtacccaggtggctaccgctaatgacaccaccttgcgtgggtgggatacgaggtctatgtcacaaatctactgcatcgaaaatgcccatggccagctggtaagggatttggactttaatcctaataaacagtattacctcgcgagttgtggcgacgattgtaaagtgaagttctgggatactagaaacgttactgaaccagtcaagaccctggaagagcactcccattgggtatggaatgttcgatataatcactctcacgatcagttggttctcactggctcctcggactccagggtgattctgtccaacatggtgagcatttccagtgaacccttcggacacctagttgacgatgatgacatcagcgatcaggaggatcacaggagcgaggaaaagagcaaggagccactgcaggacaatgtcatcgccacctacgaggaacatgaagactcagtctacgcagtagactggagttccgcggacccttggctgttcgcttcactgtcctacgacggcaggcttgtgattaacagagtgccaagggcccttaagtaccacattctactgtag

SEQ ID NO: 137265 - DNA, 1164 bp, Artificial Sequence
  derived and/or modified sequence
atggaggatgacgcccctgtcatctatggtcttgaattccaggccagagccctcaccccacagacagcggaaacagacgcaattagattcttggtgggcacccagtcattgaaatacgataaccagattcatataatcgacttcgacgacgagaacaatattattaacaaaaacgtgcttctccaccaggccggtgagatctggcatatctctgcaagtcctgctgaccggggagtgctgaccacatgctataaccgcaccagcgacagtaaggtgctcacgtgcgccgcagtgtggcgcatgcccaaggaactcgagagcggcagccatgagtcacccgatgacagtagctctacagctcagaccctcgagttgctgtgccatctggataataccgcccacggaaatatggcttgtgtagtgtgggagccaatgggagatggtaaaaagatcatcagcctagccgacaaccatatcctgctttgggatttgcaagagtccagttcacaagccgttttggcatcatccgctagtctggagggaaaggggcagctgaagtttaccagcggacggtggagtccccaccacaactgcactcaggtggccaccgctaatgacaccaccttacgcggttgggacacacggtccatgagtcagatttattgtattgagaatgcccacgggcagttagttcgcgacctcgattttaatcctaacaagcagtattacctagcgtcttgcggcgatgactgtaaggtgaagttctgggacacccgtaacgttacagaaccagtgaagaccctggaggagcacagtcactgggtttggaatgtcaggtataaccactcgcatgatcagttggtcttgacaggtagcagcgattcaagggttatactctctaacatggtgtctatttcttcagaaccttttggccacctggttgatgatgatgacattagcgatcaagaggatcaccggagcgaggaaaagtccaaagaaccgttgcaggacaacgtaattgcgacctacgaggaacacgaagacagcgtgtacgctgtcgactggtccagcgcagacccatggctattcgcctcgctcagctatgacggtaggttggttattaatcgtgttccacgtgcattgaagtaccacatactgttgtag

SEQ ID NO: 137266 - DNA, 1766 bp, Artificial Sequence
  derived and/or modified sequence
gatgacacatccgaaaaataggaagtggccactacggaagctgttctgggccagaaagacttccagtttggagtcgtttgctgcggggagggaatgaatgggcgctgggaacacgcccgcgaggtggggacgcgccggccgtagcgaggtccttagcgtgtgagtggccggggtcgggtcgcttccccgcagcatggaggacgatgcaccagtgatctacgggctggagttccaggcacgtgccttaacacctcaaactgcagaaacagatgccattcggtttttggttgggacgcagtctcttaaatatgataatcagatccatatcatagattttgacgatgaaaacaacattataaataaaaatgtcctcctccatcaagcgggtgaaatctggcatattagcgctagccctgcagacagaggtgtgctgacgacctgctacaacagaacttcagacagcaaagtcctgacatgtgcagccgtgtggaggatgccgaaggaattggaatcaggcagccacgagtcccctgatgattcatccagcactgcacagaccctggagctgctctgtcaccttgacaacacagcccatggcaacatggcctgtgtcgtgtgggagccaatgggagatgggaagaaaatcatttccttggctgataaccatatcctgctgtgggatttacaggaaagctcgagccaggctgtgctggccagctcagcgtccctggaagggaagggacaactgaagttcacctcaggacggtggagcccacatcataactgcacccaggtggccacagcgaacgacaccaccctccgtggctgggacacccggagcatgagccagatctactgcatagagaatgcccacggacagctggtgcgggaccttgactttaatcccaataagcagtactacttggccagctgcggagacgactgtaaggtgaagttctgggacacccgaaatgtcaccgaacccgtgaagaccctggaggagcactcccactgggtgtggaacgtccgctacaaccactctcatgaccagctggtcctcacgggcagcagtgacagcagagtcatcctttccaacatggtgtccatctcgtcggagcccttcggccacttggtagacgacgatgacatcagtgaccaggaggaccaccgttctgaagagaagagcaaggagcccctgcaggacaacgtgatcgccacctacgaggagcacgaggacagcgtctatgccgtggactggtcctcggctgacccgtggctgtttgcctccctgagctatgacgggaggctcgtgatcaacagggtgcccagggccctgaagtaccacatcctgctatgactcccgggcctgggttatccaggtcccattgagtggttttcctcttggcagattctcaaacagtcgcagctctttggaggtgactcgtgttccaggtggatccctctctgggagagccgctgttcccttcctgtagcagcagcatttatgaatggggtgaatggggctattgtcgacggcacagctaatgcccgaacccagcccctgtcggcagagacagagccccacattattatgtgaataacaatgttttctgttttaagggtgtcaggagtttcgctttttaaaaaaatgtctgttcctgcaatagtaactcttctttctcttgagagtaaaaaatgaaataaaataaatccacgctgcacaggtgctcggctcattctttcaggagctctgccctgtgacccca

SEQ ID NO: 137267 - protein, 152 aa, Artificial Sequence
  derived and/or modified sequence
MKSPDEVLREGELEKRSDSLFQLWKKKRGVLTSDRLSLFPASPRARPKELRFHSILKVDCVERTGKYVYFTIVTTDHKEIDFRCAGESCWNAAIALALIDFQNRRALQDFRSRQERTAPAAPAEDAVAAAAAAPSEPSEPSRPSPQPKPRTP

SEQ ID NO: 137268 - DNA, 459 bp, Artificial Sequence
  derived and/or modified sequence
atgaaaagcccggacgaagtgctcagagaaggcgagctggagaaacggtccgattctttgttccaactttggaagaagaagcgaggagtgctgaccagcgacaggttgtctctttttccagctagccctcgagctagaccaaaagagctgcgttttcactctattctcaaagttgattgtgtggagcggaccggcaagtacgtgtactttaccatagtgacaactgaccataaggagatcgacttcaggtgtgcgggggaatcatgctggaatgcggcaattgccctcgcactcatcgatttccaaaacaggcgagctcttcaggattttcgatcccggcaagagaggactgcccctgccgcccccgcggaagacgccgtcgccgccgccgccgctgccccttctgagccttctgaaccgtctagaccctccccccagccgaagcccagaactccttag

SEQ ID NO: 137269 - DNA, 459 bp, Artificial Sequence
  derived and/or modified sequence
atgaagagcccagatgaggtgctgcgggagggggagctggagaagagaagtgacagcctcttccagctgtggaagaagaagaggggcgtgctgaccagtgaccggctgagcctcttccctgccagcccccgggcccggcccaaggagctgcgcttccacagcatcctgaaggtggactgtgtggagaggacaggcaagtatgtgtacttcaccatcgtgaccacagaccacaaggagattgacttccgctgtgccggggagagctgctggaatgctgccatcgccctggccctgattgacttccagaacagaagagccctgcaggacttccgcagccggcaggagaggacagccccagctgccccagcagaagatgctgtggccgctgctgctgctgcccccagcgagcccagcgagcccagccggcccagcccccagcccaagcccaggaccccctag

SEQ ID NO: 137270 - DNA, 459 bp, Artificial Sequence
  derived and/or modified sequence
atgaagagccccgacgaggtgctgcgggagggcgagctggagaagaggtcagactctctgtttcagctctggaaaaagaaacgtggagtcctcacctctgatcgcctgtcattgtttccggcatcccccagggctagaccaaaggaactgcggttccattccattctgaaggtggattgcgttgagcggacgggaaagtatgtgtatttcaccattgtcaccaccgaccacaaggaaatcgacttcagatgtgccggagagtcctgctggaatgccgcaattgccttggctctaatcgattttcagaatagaagagctttacaggatttcagaagtagacaagagaggaccgctcctgctgcccccgctgaagacgccgtcgctgcggctgccgcagctccgagcgagccctctgaacccagccgcccgtcaccccagccgaaaccaaggacgccttag

SEQ ID NO: 137271 - DNA, 955 bp, Artificial Sequence
  derived and/or modified sequence
gcagctataaaggccgcgccggggccacgaggagcagagccggcgccgtcaccgcccgcattgccgctcccagtcccgcgctcggcacgacatgaaatcccccgacgaggtgctacgcgagggcgagttggagaagcgcagcgacagcctcttccagctatggaagaagaagcgcggggtgctcacctccgaccgcctgagcctgttccccgccagcccccgcgcgcgccccaaggagctgcgcttccactccatcctcaaggtggactgcgtggagcgcacgggcaagtacgtgtacttcaccatcgtcaccaccgaccacaaggagatcgacttccgctgcgcgggcgagagctgctggaacgcggccatcgcgctggcgctcatcgatttccagaaccgccgcgccctgcaggactttcgcagccgccaggaacgcaccgcacccgccgcacccgccgaggacgccgtggctgccgcggccgccgcaccctccgagccctcggagccctccaggccatccccgcagcccaaaccccgcacgccatgagcccgccgcgggccatacgctggacgagtcggaccgaggctaggacgtggccggcgctctccagccctgcagcagaagaacttcccgtgcgcgcggatcctcgctccgttgcacgggcgccttaagttattggactatctaatatctatgtatttatttcgctggttctttgtagtcacatattttatagtcttaatatcttgtttttgcatcactgtgcccattgcaaataaatcacttggccagtttgcttttctaccatccggctgtggctcagtgagactcctgctgggagggtggaggcccaggaatgggcgggcaggacaccctcatccagtcctgcggggctggtgtgaaaggcgctgggaaccggctttgaatgaataaatgaatcgtgtcatctgc

SEQ ID NO: 137272 - DNA, 459 bp, Artificial Sequence
  derived and/or modified sequence
atgaagtccccagacgaagtcttacgggaaggagagctcgaaaaacggtcggacagcctatttcagctatggaagaagaaacggggtgtattaacctctgatcgactttccctctttcctgcatctcccagggcacgccctaaagagctgcggttccactctattttaaaggtagattgcgtggagcggactggaaaatacgtctatttcacaatcgtaacaaccgatcacaaggaaattgacttccggtgcgccggtgagagctgctggaacgctgccattgccctggctttgatagactttcagaatcggagggccctgcaagactttcgatccagacaagagcgcaccgcccctgcggcaccggctgaagacgcggtggccgctgctgctgcggcaccctctgagccgagcgaaccttccagaccttccccacagccaaaacctcgaaccccgtag

SEQ ID NO: 137273 - DNA, 459 bp, Artificial Sequence
  derived and/or modified sequence
atgaagagccccgacgaggtgctgagagagggcgagctggagaagagaagcgacagcctgttccagctgtggaagaagaagagaggcgtgctgaccagcgacagactgagcctgttccccgccagccccagagccagacccaaggagctgagattccacagcatcctgaaggtggactgcgtggagagaaccggcaagtacgtgtacttcaccatcgtgaccaccgaccacaaggagatcgacttcagatgcgccggcgagagctgctggaacgccgccatcgccctggccctgatcgacttccagaacagaagagccctgcaggacttcagaagcagacaggagagaaccgcccccgccgcccccgccgaggacgccgtggccgccgccgccgccgcccccagcgagcccagcgagcccagcagacccagcccccagcccaagcccagaaccccctag

SEQ ID NO: 137274 - protein, 297 aa, Artificial Sequence
  derived and/or modified sequence
MVHQVLYRALVSTKWLAESIRTGKLGPGLRVLDASWYSPGTREARKEYLERHVPGASFFDIEECRDTASPYEMMLPSEAGFAEYVGRLGISNHTHVVVYDGEHLGSFYAPRVWWMFRVFGHRTVSVLNGGFRNWLKEGHPVTSEPSRPEPAVFKATLDRSLLKTYEQVLENLESKRFQLVDSRSQGRFLGTEPEPDAVGLDSGHIRGAVNMPFMDFLTEDGFEKGPEELRALFQTKKVDLSQPLIATCRKGVTACHVALAAYLCGKPDVAVYDGSWSEWFRRAPPESRVSQGKSEKA

SEQ ID NO: 137275 - protein, 244 aa, Artificial Sequence
  derived and/or modified sequence
MVHQVLYRALVSTKWLAESIRTGKLGPGLRVLDASWYSPGTREARKEYLERHVPGASFFDIEECRDTASPYEMMLPSEAGFAEYVGRLGISNHTHVVVYDGEHLGSFYAPRVWWMFRVFGHRTVSVLNGGFRNWLKEGHPVTSEPSRPEPAVFKATLDRSLLKTYEQVLENLESKRFQLVDSRSQGRFLGTEPEPDAVGLDSGHIRGAVNMPFMDFLTEDGSWSEWFRRAPPESRVSQGKSEKA

SEQ ID NO: 137276 - protein, 124 aa, Artificial Sequence
  derived and/or modified sequence
MVHQVLYRALVSTKWLAESIRTGKLGPGLRVLDASWYSPGTREARKEYLERHVPGASFFDIEECRDTASPYEMMLPSEAGFAEYVGRLGISNHTHVVVYDGEHLGSFYAPRVWWMFRVFGHRTV

SEQ ID NO: 137277 - DNA, 894 bp, Artificial Sequence
  derived and/or modified sequence
atggtgcaccaggtgctgtacagagccctggtgagcaccaagtggctggccgagagcatcagaaccggcaagctgggccccggcctgagagtgctggacgccagctggtacagccccggcaccagagaggccagaaaggagtacctggagagacacgtgcccggcgccagcttcttcgacatcgaggagtgcagagacaccgccagcccctacgagatgatgctgcccagcgaggccggcttcgccgagtacgtgggcagactgggcatcagcaaccacacccacgtggtggtgtacgacggcgagcacctgggcagcttctacgcccccagagtgtggtggatgttcagagtgttcggccacagaaccgtgagcgtgctgaacggcggcttcagaaactggctgaaggagggccaccccgtgaccagcgagcccagcagacccgagcccgccgtgttcaaggccaccctggacagaagcctgctgaagacctacgagcaggtgctggagaacctggagagcaagagattccagctggtggacagcagaagccagggcagattcctgggcaccgagcccgagcccgacgccgtgggcctggacagcggccacatcagaggcgccgtgaacatgcccttcatggacttcctgaccgaggacggcttcgagaagggccccgaggagctgagagccctgttccagaccaagaaggtggacctgagccagcccctgatcgccacctgcagaaagggcgtgaccgcctgccacgtggccctggccgcctacctgtgcggcaagcccgacgtggccgtgtacgacggcagctggagcgagtggttcagaagagccccccccgagagcagagtgagccagggcaagagcgagaaggcctag

SEQ ID NO: 137278 - DNA, 735 bp, Artificial Sequence
  derived and/or modified sequence
atggtgcaccaggtgctgtacagagccctggtgagcaccaagtggctggccgagagcatcagaaccggcaagctgggccccggcctgagagtgctggacgccagctggtacagccccggcaccagagaggccagaaaggagtacctggagagacacgtgcccggcgccagcttcttcgacatcgaggagtgcagagacaccgccagcccctacgagatgatgctgcccagcgaggccggcttcgccgagtacgtgggcagactgggcatcagcaaccacacccacgtggtggtgtacgacggcgagcacctgggcagcttctacgcccccagagtgtggtggatgttcagagtgttcggccacagaaccgtgagcgtgctgaacggcggcttcagaaactggctgaaggagggccaccccgtgaccagcgagcccagcagacccgagcccgccgtgttcaaggccaccctggacagaagcctgctgaagacctacgagcaggtgctggagaacctggagagcaagagattccagctggtggacagcagaagccagggcagattcctgggcaccgagcccgagcccgacgccgtgggcctggacagcggccacatcagaggcgccgtgaacatgcccttcatggacttcctgaccgaggacggcagctggagcgagtggttcagaagagccccccccgagagcagagtgagccagggcaagagcgagaaggcctag

SEQ ID NO: 137279 - DNA, 375 bp, Artificial Sequence
  derived and/or modified sequence
atggtgcaccaggtgctgtacagagccctggtgagcaccaagtggctggccgagagcatcagaaccggcaagctgggccccggcctgagagtgctggacgccagctggtacagccccggcaccagagaggccagaaaggagtacctggagagacacgtgcccggcgccagcttcttcgacatcgaggagtgcagagacaccgccagcccctacgagatgatgctgcccagcgaggccggcttcgccgagtacgtgggcagactgggcatcagcaaccacacccacgtggtggtgtacgacggcgagcacctgggcagcttctacgcccccagagtgtggtggatgttcagagtgttcggccacagaaccgtgtag

SEQ ID NO: 137280 - DNA, 894 bp, Artificial Sequence
  derived and/or modified sequence
atggtccatcaagtcctgtatagggcccttgttagtacaaaatggctggcggaatctatccgcacgggaaagctgggtcccgggctgcgggtgctggacgcctcttggtactcgcctggaacaagagaagcacgaaaggaatatttagagcggcacgtcccgggagcttcattcttcgacattgaagagtgcagagataccgcatccccctatgagatgatgctgccctcagaggctggattcgctgagtacgttggaaggctgggcattagtaaccatacacacgtcgtggtttacgacggggagcacttgggttctttctatgccccacgggtgtggtggatgttcagggtctttggtcaccgcaccgtttcagtgttgaatggcgggttccgtaactggctaaaggaagggcacccagtgacttccgagcccagtagacccgagccagctgttttcaaggccacgcttgatcggtcattgctgaaaacctatgaacaagtactcgagaacctggagagcaagcgctttcagctggtagacagtagatctcaagggaggttcctgggcaccgagcccgagccggacgcagtagggctggattccggtcatatcagaggagctgtgaatatgccctttatggactttttgaccgaggacggattcgagaaggggcctgaggagctacgcgctctattccagaccaagaaggttgatctcagtcagccactgattgccacatgcagaaaaggcgttaccgcctgccatgtggctttggcggcctacctttgtggaaagccagatgtggctgtgtacgacgggtcttggtcagaatggtttagacgggcacctccggaatcccgtgtgtcccagggtaaaagtgagaaggcctag

SEQ ID NO: 137281 - DNA, 894 bp, Artificial Sequence
  derived and/or modified sequence
atggtgcatcaggttctttatcgtgctctcgtctccaccaaatggctagcagagagcatccgcacaggcaaattgggccccggtctgagagtgttggatgcaagttggtactcacccgggacccgggaggctagaaaggagtaccttgagcggcacgtccctggtgcttcattctttgacatcgaggagtgcagagacactgctagtccttacgaaatgatgctccccagtgaagccggcttcgccgagtacgttggacgcctggggataagcaaccatactcatgtggtcgtctacgacggtgaacaccttggctccttctatgctcctagggtctggtggatgttcagagtgttcgggcaccgcaccgtttccgtgttaaacggcggtttcagaaactggctaaaagaagggcaccctgtaacgagcgagccatcgagacctgaacctgccgtgttcaaggccaccttagaccgtagtctgctgaagacttacgagcaggtcctcgagaaccttgaatccaagcggttccaattggtcgattctagatctcagggtcgattcctggggactgagcccgaacccgacgccgtaggcctcgactccggacacatacgcggcgctgtgaatatgccctttatggactttctaacagaagacggcttcgagaaggggccagaagagctccgtgctctctttcagaccaagaaagtggatttgagccagcctctgatcgcgacatgtagaaagggggtgacagcctgtcatgtcgccctggccgcgtacttatgtggcaaaccagatgtcgctgtgtatgatggatcctggagcgaatggttcagacgggctccgcctgagagccgggtgagccagggtaagagtgaaaaagcatag

SEQ ID NO: 137282 - DNA, 735 bp, Artificial Sequence
  derived and/or modified sequence
atggtgcaccaggtcctttacagagcactggtgtcgaccaagtggttggcagagtctattagaactgggaagctgggtcccggactgagagtgctggacgcatcttggtacagccccggtacccgtgaagctcggaaggaatatctggaacgacatgttcccggggccagtttctttgacattgaagaatgccgggatacggctagcccgtatgagatgatgttgccaagtgaagccggttttgccgagtacgtcgggcggcttggcatctcaaatcacactcacgtggttgtctatgatggagagcacttgggatccttctatgcccctagggtgtggtggatgtttagggtgttcggtcatcgtactgtgtctgtgctgaatggaggcttccgaaactggctgaaggaggggcacccagtcacgagtgaaccctctaggcccgaaccagcagtattcaaagcaaccctcgaccgctccctcctgaaaacctatgaacaagttctggagaacctagagtcgaaaagatttcagctcgtggatagtcgaagtcagggcaggtttctgggcaccgaaccagagcctgacgccgtgggactggattccgggcatattcgaggtgccgtgaacatgcccttcatggattttcttaccgaggatggctcatggtctgaatggttccgccgagctccccctgaaagcagagtttcacagggaaagagcgaaaaggcctag

SEQ ID NO: 137283 - DNA, 375 bp, Artificial Sequence
  derived and/or modified sequence
atggttcaccaggtgctgtaccgggctcttgtgagcaccaagtggctggccgagagtatacgaaccggcaagctgggccccggtttgcgcgttctcgacgcctcctggtattcccccggtaccagagaggccagaaaagagtacctggagcggcatgtgcccggtgccagcttttttgacatcgaagagtgccgagacactgccagcccctatgagatgatgctcccaagcgaggcaggctttgcggaatatgtgggtagactgggcatctccaaccatactcacgtcgttgtgtacgacggtgagcatctcggaagtttctatgcccctagagtttggtggatgttccgagtgtttggtcaccgtacagtttag

SEQ ID NO: 137284 - DNA, 894 bp, Artificial Sequence
  derived and/or modified sequence
atggtgcaccaggtgctgtaccgggccctggtgtccaccaagtggctggccgagagcatcagaacaggcaagctgggccctggcctgcgggtgctggatgcctcctggtacagccctggcacccgggaggccaggaaggagtacctggagcggcacgtgcctggggccagcttctttgatattgaagaatgtcgggacacagccagcccctatgagatgatgctgcccagcgaggccggctttgctgaatatgtgggccgcctgggcatcagcaaccacacccacgtggtggtgtatgatggagagcacctgggcagcttctacgccccccgggtgtggtggatgttccgggtgtttggccacaggacagtgtctgtgctgaatggaggcttcaggaactggctgaaggagggccaccctgtgaccagcgagcccagcaggcctgagcctgctgtgttcaaggccaccctggacaggagcctgctgaagacctatgagcaggtgctggagaacctggagagcaagcgcttccagctggtggacagccgcagccagggccgcttcctgggcacagagcctgagccagatgctgtgggcctggacagcggccacatcagaggagctgtgaacatgcccttcatggacttcctgacagaagatggctttgagaagggccctgaggagctgcgggccctcttccagaccaagaaggtggacctgagccagcccctgattgccacctgcaggaagggcgtgacagcctgccacgtggccctggccgcctacctgtgtgggaagccagatgtggccgtgtatgatggctcctggagcgagtggttcagaagagcccctcctgagagccgggtgtcccagggcaagtctgagaaggcctag

SEQ ID NO: 137285 - DNA, 735 bp, Artificial Sequence
  derived and/or modified sequence
atggtgcaccaggtgctgtaccgggccctggtgtccaccaagtggctggccgagagcatcagaacaggcaagctgggccctggcctgcgggtgctggatgcctcctggtacagccctggcacccgggaggccaggaaggagtacctggagcggcacgtgcctggggccagcttctttgatattgaagaatgtcgggacacagccagcccctatgagatgatgctgcccagcgaggccggctttgctgaatatgtgggccgcctgggcatcagcaaccacacccacgtggtggtgtatgatggagagcacctgggcagcttctacgccccccgggtgtggtggatgttccgggtgtttggccacaggacagtgtctgtgctgaatggaggcttcaggaactggctgaaggagggccaccctgtgaccagcgagcccagcaggcctgagcctgctgtgttcaaggccaccctggacaggagcctgctgaagacctatgagcaggtgctggagaacctggagagcaagcgcttccagctggtggacagccgcagccagggccgcttcctgggcacagagcctgagccagatgctgtgggcctggacagcggccacatcagaggagctgtgaacatgcccttcatggacttcctgacagaagatggctcctggagcgagtggttccggcgggcccctcctgagagccgggtgtcccagggcaagtctgagaaggcctag

SEQ ID NO: 137286 - DNA, 375 bp, Artificial Sequence
  derived and/or modified sequence
atggtgcaccaggtgctgtaccgggccctggtgtccaccaagtggctggccgagagcatcagaacaggcaagctgggccctggcctgcgggtgctggatgcctcctggtacagccctggcacccgggaggccaggaaggagtacctggagcggcacgtgcctggggccagcttctttgatattgaagaatgtcgggacacagccagcccctatgagatgatgctgcccagcgaggccggctttgctgaatatgtgggccgcctgggcatcagcaaccacacccacgtggtggtgtatgatggagagcacctgggcagcttctacgccccccgggtgtggtggatgttccgggtgtttggccacaggacagtgtag

SEQ ID NO: 137287 - DNA, 894 bp, Artificial Sequence
  derived and/or modified sequence
atggtgcaccaggtgctgtaccgggccctggtgagcaccaagtggctcgccgagagcatacggaccggaaagctcggaccaggactccgcgtactcgacgcatcttggtactcacccggtacccgcgaggcccggaaggagtacctcgagcgccacgtccctggagcctccttttttgacatagaggagtgtagggatacagcctcgccatatgagatgatgctgcccagcgaagccggattcgccgagtacgtcggccgacttggtatctctaatcacacccacgtcgtggtttacgacggcgagcaccttgggagcttctatgccccaagagtttggtggatgtttcgcgtgtttggccatcgcaccgtcagtgtgctgaatggaggatttcggaactggctgaaagaagggcaccctgtgaccagcgagccatcacggcctgaaccagctgtctttaaagcaactctggaccggtcactcctcaaaacatatgagcaggtgcttgagaaccttgaatctaaacgcttccagctcgttgactcacggagtcagggtagattcctggggactgaaccagaacctgacgctgtcgggctagattcggggcacatacggggggctgtgaacatgccatttatggatttcctgaccgaggacggtttcgaaaaaggcccggaggagctgcgggcactgttccagaccaaaaaagtcgacttgtcacaaccactcatagctacctgcagaaagggcgtcaccgcctgccacgtggccctcgctgcttacctgtgtggcaaaccagacgttgcagtatacgacgggtcttggtccgagtggttcagaagggcaccgccagagagcagagtgtctcaagggaaatctgaaaaggcctag

SEQ ID NO: 137288 - DNA, 894 bp, Artificial Sequence
  derived and/or modified sequence
atggtgcaccaggtgctgtaccgggccctggtgagcaccaagtggctcgcggagtctattcggacggggaaactgggacctgggctcagagtcttggacgcatcatggtattcgccgggcactcgcgaagccagaaaggagtaccttgaaaggcacgtgcccggagcctcattttttgacatcgaagagtgtcgcgataccgcttccccatatgaaatgatgcttccctccgaggctggttttgcagagtacgtggggcggctggggatttctaatcatacacatgtcgtagtctatgacggcgaacacctgggtagcttctatgcccccagagtatggtggatgtttcgtgtgtttggacatcgcacagttagtgtcctcaatgggggctttcgcaactggctcaaggaaggacatcccgtaacatctgaaccaagccgccccgagccagcagttttcaaggccaccctagatagaagtctcctgaagacatatgagcaggttcttgagaatcttgaatcaaagaggttccagcttgtggattcccgttcccagggacgcttcttgggtaccgaacctgagcctgacgctgtggggcttgactctggccacatccgtggtgctgtgaacatgccctttatggacttcctcaccgaggacggattcgagaaggggcccgaagaactccgggctctgttccagacaaaaaaggtagacctgagtcagcctctaatcgctacatgtaggaaaggcgtgacagcgtgccatgtcgcccttgcagcatatctttgcgggaagcccgatgtggctgtgtacgacggttcttggtccgaatggtttcgccgggctccgcctgagtctcgcgtcagccaagggaaaagtgaaaaagcatag

SEQ ID NO: 137289 - DNA, 735 bp, Artificial Sequence
  derived and/or modified sequence
atggtgcaccaggtgctgtaccgggccctggtgagcaccaagtggctggccgaaagtatccggaccgggaagctggggccaggcctccgcgtacttgacgccagctggtactcaccgggtacccgcgaggcacgcaaggagtacctggaaagacatgttcctggagcttctttctttgatatcgaggagtgtcgcgataccgcctctccgtacgagatgatgctgccttcagaggccggcttcgcagaatacgtcggccggctagggatctccaatcatactcatgtggtggtttatgacggagaacatctcggctccttttacgccccccgcgtgtggtggatgtttagggtttttggtcatcgaacggttagtgtactgaacggcggcttccgtaattggttgaaggaaggtcacccagtcacctctgagcctagtagacccgaaccagcagtgttcaaggcaacactagatcggtcccttctgaaaacttacgaacaggtactggagaacttagagagcaagcgcttccagctggtggacagccgtagccagggccgtttcctggggaccgaaccggagcccgacgctgtgggacttgattccggccacattcggggagcagtgaacatgccgtttatggactttttgacagaggacggcagctggagcgaatggttccgccgggccccgccagagtctagagtgtcccagggcaaatctgaaaaagcttag

SEQ ID NO: 137290 - DNA, 375 bp, Artificial Sequence
  derived and/or modified sequence
atggtgcaccaggtgctgtaccgggccctggtgagcaccaagtggctcgccgagtcaattcgaacaggcaagctaggacctggcctgcgcgtattagacgcatcctggtacagccctggcacacgagaagcaagaaaagagtatttagagcgacatgtcccaggagcaagttttttcgacatcgaagagtgtcgtgacacagcaagcccatatgagatgatgttgccttccgaggctgggtttgccgagtacgtcggacgcctggggattagtaatcacacacacgtggtggtttatgatggagagcacttggggtctttttacgccccacgcgtttggtggatgtttagggtcttcggacataggactgtgtag

SEQ ID NO: 137291 - DNA, 894 bp, Artificial Sequence
  derived and/or modified sequence
atggtacaccaggtcctttaccgggctttggtcagcacaaaatggctggctgaaagcatccgaacagggaaactgggtcccggattgcgcgtattagacgcgagctggtattctcctggaacacgggaagccagaaaagagtacctggagagacacgtgcccggtgctagtttcttcgacattgaagaatgccgagacaccgccagcccctatgaaatgatgcttccctccgaggctggcttcgctgagtacgtgggtcgattaggaattagtaaccacacccacgtggtcgtgtacgacggggagcatctgggctccttttacgccccacgcgtctggtggatgtttagagtgttcggtcaccgaaccgtgagtgttctgaatgggggattccgtaactggctgaaagaaggacaccctgtcacaagcgagcctagccgtccagagccagccgtctttaaggccacactcgacaggtctcttctgaagacatacgaacaggtgctggagaaccttgagtccaagcggtttcaactcgtagattctcggagtcagggcaggttcctgggaaccgagcccgaacctgacgcggtcggcctggacagtggacatattcgcggagcagttaacatgccgtttatggatttcctcacagaggacggcttcgagaagggccctgaggagctccgtgccctattccagaccaagaaggtagacttgtctcagccattgattgcaacttgtagaaagggagtcacagcctgccacgtggccctggcagcctatctctgcggcaagcctgatgttgcggtatatgacggctcatggtctgagtggtttcgaagagccccacctgagtctcgcgtgagccaggggaaaagcgagaaggcttag

SEQ ID NO: 137292 - DNA, 894 bp, Artificial Sequence
  derived and/or modified sequence
atggttcatcaggtgctatacagagcgctcgtctccaccaagtggctggccgagtccatcaggaccggaaagctcggccctggcctgcgagtgctagatgcatcttggtactcacccggtaccagagaggctcggaaggaatacctggagcggcatgtacctggcgcttccttctttgatattgaggagtgccgggatacggcttccccatacgaaatgatgttgccttctgaagccggattcgcggaatatgtcggtcgtttaggcatcagcaaccacacacatgtggtggtgtatgacggggaacacctcgggagcttttacgcacctagggtttggtggatgtttagagtctttggccatcgtactgtgtccgtgctgaatggaggatttagaaattggctcaaggaaggccatcctgtgacttcggaaccgtcgcggcctgagcctgcagtgttcaaggcaaccctcgacagaagtctgctgaagacctacgaacaggttcttgaaaacctggagagtaagcgttttcagcttgttgatagtaggtctcaaggcaggtttctgggaacggagccggagcccgacgccgtcggattagatagcggccatatccggggagcagtgaatatgccattcatggattttttgaccgaggacgggtttgaaaagggacccgaagaactgcgagcgttatttcagactaaaaaggtggacctgagtcagcctctcatagccacctgtcggaaaggggtcacagcttgtcacgtggctctggctgcctacctgtgtggtaagccggacgtggctgtgtacgacgggtcatggtcagagtggttcagacgtgcccctcctgaaagcagagtttcacagggtaagagcgagaaagcttag

SEQ ID NO: 137293 - DNA, 735 bp, Artificial Sequence
  derived and/or modified sequence
atggtgcatcaggtcctgtatcgcgctctggttagcaccaaatggcttgccgaatctatacgcaccggcaagctgggacctggactgcgggtgctcgacgccagctggtatagtccaggaacaagggaagccagaaaagagtacttagaacgacacgtgccgggtgcttcgttctttgatatcgaggaatgtagagacacggcaagtccatatgagatgatgttgccatccgaggcgggtttcgctgagtacgtgggcagactcgggatttctaaccacacacacgtggtagtctatgacggggaacatctgggaagcttttatgctcccagagtctggtggatgttccgagtgttcggtcataggaccgtcagcgtactgaacggcggttttaggaactggctgaaagagggtcaccctgtgacgagtgaaccaagccgacctgaaccagcagtcttcaaagcgacgttggatcgctctcttcttaaaacttatgaacaagtcctcgagaatctggagtccaagcgattccagctcgtcgactcccggagccaaggcagatttctgggaacagagcccgagcctgatgccgtggggcttgatagcggtcatattaggggtgctgtcaatatgcctttcatggactttctcacagaagacgggtcttggtccgagtggtttcgcagggctcctcccgaatcacgagtatcccagggaaaatctgagaaagcgtag

SEQ ID NO: 137294 - DNA, 375 bp, Artificial Sequence
  derived and/or modified sequence
atggtgcatcaggtgttatacagagcactggtctccaccaagtggctggccgaatctatccggacaggcaaactgggtcccggactgagggtcctggacgctagctggtactcacccggaacaagggaagcgcgtaaagagtacctggaaagacacgtgcccggtgctagcttctttgacatcgaggaatgccgggacaccgcatccccgtacgaaatgatgctgccgtccgaggccggattcgcggagtatgttggtcgcctcggcatcagcaatcacacccatgtcgtcgtgtatgatggcgagcacctgggaagcttctatgcccctagggtgtggtggatgttcagggttttcgggcaccgaactgtgtag

SEQ ID NO: 137295 - DNA, 1211 bp, Artificial Sequence
  derived and/or modified sequence
ggcggcgcagggtccccctctggcggtggcgcgatggtgcgcgccgcctggggagctgcggccgggggtttgaaccggccaacttctccagccggccggggcgagcgccagcgcggcgtccggggcgagtgacacgcagagctgaagccatggttcatcaggtgctctaccgggcgctggtctccaccaagtggctggcggagtccatcaggactggcaagctggggcccggcctgcgggtgctggacgcgtcctggtactcaccaggcacccgagaggcccgcaaggagtacctcgagcgccacgtacccggcgcctctttctttgacatagaagagtgccgggacacggcgtcgccctacgagatgatgctgcccagcgaggctggcttcgccgagtatgtgggccgcctgggcatcagcaaccacacgcacgtggtggtgtatgatggtgaacacctgggcagcttctatgctccccgggtctggtggatgttccgtgtgtttggccaccgcaccgtatcagtgctcaatggtggcttccggaactggctgaaggagggccacccggtgacatccgagccctcacgcccagaaccggccgtcttcaaagccacactggaccgctccctgctcaagacctacgagcaggtgctggagaaccttgaatctaagaggttccagctggtggattcaaggtctcaagggcggttcctgggcaccgagccggagccggatgcagtaggactggactcgggccatatccgtggtgccgtcaacatgcctttcatggacttcctgactgaggatggcttcgagaagggcccagaagagctccgtgctctgttccagaccaagaaggtggatctctcgcagcctctcattgccacgtgccgcaagggagtcaccgcctgccacgtggccttggctgcctacctctgcggcaagcctgatgtggccgtgtacgatggctcctggtccgagtggtttcgccgggcccccccagagagccgtgtgtcccagggaaagtctgagaaggcctgagccgtgacctcttctgcttactgtaactgcggccggtttagtgaccccatgacttacagccggttcttacctcttaggtgaaggagatgacatgtttttagaattgctgtgcaaggctcaccctctctctgtcaacactggaataaactttgccttttctgagtagtg

SEQ ID NO: 137296 - DNA, 1797 bp, Artificial Sequence
  derived and/or modified sequence
gccgggggtttgaaccggccaacttctccagccggccggggcgagcgccagcgcggcgtccggggcgagtgagtgcggggcgggggcagcggccgggcgcctgggccgccggtcgggccacctgctgcccggggaaggatagcgttgcgagagtgggacggggtgccccgggaacccctgatccacctagggcagagggcagcgagctacgggccggactcgggcactctggaggcgggcgagctcgggctgcctggggaggccgcaggcgatggcgtgtgcgcggctcgcggagcttcctagccgtgcgcccaccccctctgccttggaaggaaaggggattctaagcccaagatgccatcgccccccatcccgggcatgctttcattgctctttcctggcgggatcgagtactgtaacttctaggagccagatccccgccccaggaagcgcccctacttggagtcctcggaaactcttgccccacccgcttctgcgctgggcccccgggccggctgggaggggcggggccggctttccagagggaatctgcaaacttatcccgctgcacgccccagcctcgctggcttgctgtaaacaaggaacccgggggagtgcggagggagaaagagcttctcccaggcctcaccctactgcacacaccgacttccttcctcacgcctgtctctctttcctggttcccacccgtgccaggtgacacgcagagctgaagccatggttcatcaggtgctctaccgggcgctggtctccaccaagtggctggcggagtccatcaggactggcaagctggggcccggcctgcgggtgctggacgcgtcctggtactcaccaggcacccgagaggcccgcaaggagtacctcgagcgccacgtacccggcgcctctttctttgacatagaagagtgccgggacacggcgtcgccctacgagatgatgctgcccagcgaggctggcttcgccgagtatgtgggccgcctgggcatcagcaaccacacgcacgtggtggtgtatgatggtgaacacctgggcagcttctatgctccccgggtctggtggatgttccgtgtgtttggccaccgcaccgtatcagtgctcaatggtggcttccggaactggctgaaggagggccacccggtgacatccgagccctcacgcccagaaccggccgtcttcaaagccacactggaccgctccctgctcaagacctacgagcaggtgctggagaaccttgaatctaagaggttccagctggtggattcaaggtctcaagggcggttcctgggcaccgagccggagccggatgcagtaggactggactcgggccatatccgtggtgccgtcaacatgcctttcatggacttcctgactgaggatggcttcgagaagggcccagaagagctccgtgctctgttccagaccaagaaggtggatctctcgcagcctctcattgccacgtgccgcaagggagtcaccgcctgccacgtggccttggctgcctacctctgcggcaagcctgatgtggccgtgtacgatggctcctggtccgagtggtttcgccgggcccccccagagagccgtgtgtcccagggaaagtctgagaaggcctgagccgtgacctcttctgcttactgtaactgcggccggtttagtgaccccatgacttacagccggttcttacctcttaggtgaaggagatgacatgtttttagaattgctgtgcaaggctcaccctctctctgtcaacactggaataaactttgccttttctgagtagtg

SEQ ID NO: 137297 - DNA, 965 bp, Artificial Sequence
  derived and/or modified sequence
aacttctccagccggccggggcgagcgccagcgcggcgtccggggcgagtgacacgcagagctgaagccatggttcatcaggtgctctaccgggcgctggtctccaccaagtggctggcggagtccatcaggactggcaagctggggcccggcctgcgggtgctggacgcgtcctggtactcaccaggcacccgagaggcccgcaaggagtacctcgagcgccacgtacccggcgcctctttctttgacatagaagagtgccgggacacggcgtcgccctacgagatgatgctgcccagcgaggctggcttcgccgagtatgtgggccgcctgggcatcagcaaccacacgcacgtggtggtgtatgatggtgaacacctgggcagcttctatgctccccgggtctggtggatgttccgtgtgtttggccaccgcaccgtatcagtgctcaatggtggcttccggaactggctgaaggagggccacccggtgacatccgagccctcacgcccagaaccggccgtcttcaaagccacactggaccgctccctgctcaagacctacgagcaggtgctggagaaccttgaatctaagaggttccagctggtggattcaaggtctcaagggcggttcctgggcaccgagccggagccggatgcagtaggactggactcgggccatatccgtggtgccgtcaacatgcctttcatggacttcctgactgaggatggctcctggtccgagtggtttcgccgggcccccccagagagccgtgtgtcccagggaaagtctgagaaggcctgagccgtgacctcttctgcttactgtaactgcggccggtttagtgaccccatgacttacagccggttcttacctcttaggtgaaggagatgacatgtttttagaattgctgtgcaaggctcaccctctctctgtcaacactggaataaactttgccttttctg

SEQ ID NO: 137298 - DNA, 451 bp, Artificial Sequence
  derived and/or modified sequence
ccgcgccacccggcgtccccctcagacccccgcgggtcccggaggccccgcgcgcgaggtgacacgcagagctgaagccatggttcatcaggtgctctaccgggcgctggtctccaccaagtggctggcggagtccatcaggactggcaagctggggcccggcctgcgggtgctggacgcgtcctggtactcaccaggcacccgagaggcccgcaaggagtacctcgagcgccacgtacccggcgcctctttctttgacatagaagagtgccgggacacggcgtcgccctacgagatgatgctgcccagcgaggctggcttcgccgagtatgtgggccgcctgggcatcagcaaccacacgcacgtggtggtgtatgatggtgaacacctgggcagcttctatgctccccgggtctggtggatgttccgtgtgtttggccaccgcaccgta

SEQ ID NO: 137299 - DNA, 966 bp, Artificial Sequence
  derived and/or modified sequence
atgggcgagccccagggcagcatgagaatcctggtgaccggcggcagcggcctggtgggcaaggccatccagaaggtggtggccgacggcgccggcctgcccggcgaggactgggtgttcgtgagcagcaaggacgccgacctgaccgacaccgcccagaccagagccctgttcgagaaggtgcagcccacccacgtgatccacctggccgccatggtgggcggcctgttcagaaacatcaagtacaacctggacttctggagaaagaacgtgcacatgaacgacaacgtgctgcacagcgccttcgaggtgggcgccagaaaggtggtgagctgcctgagcacctgcatcttccccgacaagaccacctaccccatcgacgagaccatgatccacaacggccccccccacaacagcaacttcggctacagctacgccaagagaatgatcgacgtgcagaacagagcctacttccagcagtacggctgcaccttcaccgccgtgatccccaccaacgtgttcggcccccacgacaacttcaacatcgaggacggccacgtgctgcccggcctgatccacaaggtgcacctggccaagagcagcggcagcgccctgaccgtgtggggcaccggcaaccccagaagacagttcatctacagcctggacctggcccagctgttcatctgggtgctgagagagtacaacgaggtggagcccatcatcctgagcgtgggcgaggaggacgaggtgagcatcaaggaggccgccgaggccgtggtggaggccatggacttccacggcgaggtgaccttcgacaccaccaagagcgacggccagttcaagaagaccgccagcaacagcaagctgagaacctacctgcccgacttcagattcacccccttcaagcaggccgtgaaggagacctgcgcctggttcaccgacaactacgagcaggccagaaagtag

SEQ ID NO: 137300 - DNA, 360 bp, Artificial Sequence
  derived and/or modified sequence
atgggcgagccccagggcagcatgagaatcctggtgaccggcggcagcggcctggtgggcaaggccatccagaaggtggtggccgacggcgccggcctgcccggcgaggactgggtgttcgtgagcagcaaggacgccgacctgaccgacaccgcccagaccagagccctgttcgagaaggtgcagcccacccacgtgatccacctggccgccatggtgggcggcctgttcagaaacatcaagtacaacctggacttctggagaaagaacgtgcacatgaacgacaacgtgctgcacagcgccttcgaggtgggcgccagaaaggtggtgagctgcctgagcacctgcatcttcccctag

SEQ ID NO: 137301 - DNA, 807 bp, Artificial Sequence
  derived and/or modified sequence
atgggcgagccccagggcagcatgagaatcctggtgaccggcggcagcggcctggtgggcaaggccatccagaaggtggtggccgacggcgccggcctgcccggcgaggactgggtgttcgtgagcagcaaggacgccgacctgaccgacaccgcccagaccagagccctgttcgagaaggtgcagcccacccacgtgatccacctggccgccatggtgggcggcctgttcagaaacatcaagtacaacctggacttctggagaaagaacgtgcacatgaacgacaacgtgctgcacagcgccttcgaggtgggcgccagaaaggtggtgagctgcctgagcacctgcatcttccccgacaagaccacctaccccatcgacgagaccatgatccacaacggccccccccacaacagcaacttcggctacagctacgccaagagaatgatcgacgtgcagaacagagcctacttccagcagtacggctgcaccttcaccgccgtgatccccaccaacgtgttcggcccccacgacaacttcaacatcgaggacggccacgtgctgcccggcctgatccacaaggtgcacctggccaagagcagcggcagcgccctgaccgtgtggggcaccggcaaccccagaagacagttcatctacagcctggacctggcccagctgttcatctgggtgctgagagagtacaacgaggtggagcccatcatcctgagcgtgggcgaggaggacgaggtgagcatcaaggaggccgccgaggccgtggtggaggccatggacttccacggcgagtag

SEQ ID NO: 137302 - DNA, 597 bp, Artificial Sequence
  derived and/or modified sequence
atgggcgagccccagggcagcatgagaatcctggtgaccggcggcagcggcctggtgggcaaggccatccagaaggtggtggccgacggcgccggcctgcccggcgaggactgggtgttcgtgagcagcaaggacgccgacctgaccgacaccgcccagaccagagccctgttcgagaaggtgcagcccacccacgtgatccacctggccgccatggtgggcggcctgttcagaaacatcaagtacaacctggacttctggagaaagaacgtgcacatgaacgacaacgtgctgcacagcgccttcgaggtgggcgccagaaaggtggtgagctgcctgagcacctgcatcttccccgacaagaccacctaccccatcgacgagaccatgatccacaacggccccccccacaacagcaacttcggctacagctacgccaagagaatgatcgacgtgcagaacagagcctacttccagcagtacggctgcaccttcaccgccgtgatccccaccaacgtgttcggcccccacgacaacttcaacatcgaggacggccacgtgctgcccggcctgatccacaaggtgcacctggcctag

SEQ ID NO: 137303 - DNA, 966 bp, Artificial Sequence
  derived and/or modified sequence
atgggtgaaccccagggatccatgcgaatcctcgttaccggtgggtcaggactggtggggaaggcgatacagaaagtcgtagccgacggtgccggactgcctggcgaggactgggtgtttgtatcttcgaaggacgcagacctcaccgacaccgcccaaacaagagcactattcgagaaggtccagcctactcatgtaattcacctggctgcaatggttggtggcctcttccgtaacattaagtataacctcgatttctggaggaaaaatgttcacatgaatgacaacgtgctccattctgcattcgaagtaggagcacggaaagtagtctcctgtttgtcgacgtgtatctttcccgacaagaccacctatcctatcgatgaaaccatgatacacaatggccctccacacaacagcaacttcggctattcgtacgctaagaggatgatcgatgtgcagaaccgggcttacttccagcagtatggctgcacattcacagctgttatacccacaaacgtttttggccctcacgacaattttaacattgaggatgggcacgtgctgcccggcctgattcacaaagtccacctggccaagtcttcagggtccgcacttacggtgtggggaaccggcaacccacggaggcagtttatttactcccttgacctggcacagttgtttatttgggttctgcgggaatacaatgaagtagagcctattatactgagtgttggggaagaagacgaggtatctattaaggaggcggccgaggccgtcgtcgaggcgatggattttcatggagaagtgactttcgacactaccaagagtgacggacaattcaaaaaaacagccagtaactcgaagctgagaacctacctgcctgattttcggtttacaccatttaagcaagccgttaaggaaacatgcgcctggtttacagacaactatgagcaggcccggaaatag

SEQ ID NO: 137304 - DNA, 360 bp, Artificial Sequence
  derived and/or modified sequence
atgggcgagccacagggatctatgaggattctggtgactgggggaagcggtttggtggggaaggccatccagaaagtcgttgcagacggcgctggtttgccaggtgaagattgggtattcgtgagctcgaaagacgctgacctgactgacacagctcagactagggcactcttcgagaaggtgcaacccacccatgtcatccaccttgccgccatggtggggggtctgtttcgtaacattaagtacaatctagacttttggagaaagaatgtacatatgaacgataacgtcctccatagtgccttcgaggtgggtgcgaggaaggtcgtgagttgtttatcgacttgcatattcccatag

SEQ ID NO: 137305 - DNA, 807 bp, Artificial Sequence
  derived and/or modified sequence
atgggagagccccagggatccatgcggatcttagtgacaggcggcagcggcctcgtcgggaaggccatccagaaggtggtagccgacggtgcaggccttcccggggaggattgggtgtttgtttcctccaaagatgcggatctgactgatacagcccagacgcgcgccctgtttgaaaaggttcagcctactcatgtcatccatttggccgcgatggtaggcgggctcttcaggaacatcaagtataacctcgatttttggcggaagaatgtccatatgaatgataatgtgttgcattccgcattcgaagtgggcgccagaaaggtcgtcagctgtctgtctacgtgcatcttccccgacaaaaccacttacccaatcgacgaaactatgatacacaacggccccccccacaatagcaactttgggtattcgtacgccaaacggatgattgacgtgcagaatagagcatactttcagcaatatggatgtacattcactgccgtcatccctactaacgtgttcggaccccacgacaattttaacattgaggatggtcacgttctccctggcctgattcataaggtgcacctggccaaaagttccggttccgccttaaccgtctggggcaccggtaatccccggaggcagtttatctactctctggatctcgctcaactattcatctgggttctgcgggagtacaacgaggtagaacctatcatcctgtctgtgggtgaggaggatgaggtgagtattaaggaggccgctgaggcagtggtcgaggcaatggacttccacggcgaatag

SEQ ID NO: 137306 - DNA, 966 bp, Artificial Sequence
  derived and/or modified sequence
atgggagagcctcagggaagtatgcgcatattggttactggcggctccggactggtaggcaaggcgatccagaaggtggtcgcagacggcgccggccttccaggtgaagattgggtgttcgtctcgtccaaagatgctgacctcacagataccgcccagacacgcgctctcttcgagaaggttcagccaactcacgtaatacatctcgcggcaatggtgggcgggctcttcaggaatattaagtataacctcgatttttggaggaagaatgtgcatatgaacgataatgtattacactcagcgttcgaagtgggagcccggaaagtggtgtcctgcttgtctacctgtatttttccggacaagactacctaccccatagacgagacaatgattcacaatggcccgcctcacaactctaacttcggatactcctatgccaaacgcatgattgacgtgcagaatcgcgcgtatttccagcagtatgggtgtacgttcactgcagtgatcccaaccaatgtctttggtccacatgacaactttaacattgaggatgggcatgtgctgccggggctgattcacaaggtgcacctcgcgaaaagcagtggaagcgcactgaccgtgtggggaaccggcaaccccaggcgacagtttatttactccctggatctcgcccagctgttcatctgggtgctcagagagtataatgaagtggagcctattattcttagtgtaggagaagaggatgaggtgagtatcaaggaggccgcggaagccgtggtggaagccatggatttccacggcgaggtgacttttgataccactaagtctgatggccaatttaaaaagacagcatcaaacagcaaactgcgtacatatctgcccgacttcaggtttactcccttcaaacaggccgtaaaggaaacttgtgcatggttcaccgataactatgaacaagcacgcaaatag

SEQ ID NO: 137307 - DNA, 597 bp, Artificial Sequence
  derived and/or modified sequence
atgggcgaaccacagggttctatgcgaatccttgtcaccgggggatccggcttggtaggaaaggctatccagaaagtcgttgccgatggagctggtctgcccggagaggattgggtcttcgtgagtagtaaggacgccgacctgactgacaccgcacagaccagggcactgttcgagaaggtgcagcctactcatgtcatccacctggccgcaatggtgggaggtctgttccggaacatcaagtacaacctcgacttttggagaaaaaatgtgcacatgaacgacaacgttcttcacagtgcgtttgaagtcggtgccagaaaagtcgtgtcgtgtctctctacttgtatttttcccgacaagaccacctatcccatcgacgaaacgatgatacacaacgggccccctcataattcaaacttcggctacagctatgcaaagaggatgattgacgttcagaatagggcctatttccagcagtatggatgcacgtttactgctgtaatccccaccaacgttttcgggcctcatgacaattttaacatagaggacggacacgtgctccctggcttgatacataaggtccatctcgcctag

SEQ ID NO: 137308 - DNA, 966 bp, Artificial Sequence
  derived and/or modified sequence
atgggagagccccagggctccatgaggatcctggtgactggaggcagcggcctggtgggcaaggccatccagaaggtggtggctgatggagctggcctgcccggggaggactgggtgtttgtgagcagcaaggatgctgacctgacagacacagcccagacccgggccctgtttgagaaggtgcagcccacccacgtgatccacctggccgccatggtgggcggcctcttcaggaacatcaagtacaacctggacttctggaggaagaatgtgcacatgaatgacaacgtgctgcacagcgcctttgaggtgggcgccaggaaggtggtgtcctgcctgagcacctgcatcttcccagacaagaccacctaccccattgatgagaccatgatccacaatggaccaccccacaacagcaactttggctacagctatgccaagaggatgattgatgtgcagaacagagcctacttccagcagtatggctgcaccttcaccgctgtgatccccaccaacgtgtttggcccccatgacaacttcaacattgaagatggccacgtgctgcccggcctcatccacaaggtgcacctggccaagagcagcggcagcgccctgactgtgtggggcaccggcaacccccggcggcagttcatctacagcctggacctggcccagctgttcatctgggtgctgcgggagtacaatgaggtggagcccatcatcctgtctgtgggggaggaggatgaggtgtccatcaaggaggccgctgaggccgtggtggaggccatggacttccacggggaggtgacctttgacaccaccaagagtgatggccagttcaagaagacagccagcaacagcaagctgcggacctacctgcctgacttccgcttcacccccttcaagcaggccgtgaaggagacctgtgcctggttcacagacaactatgagcaggccaggaagtag

SEQ ID NO: 137309 - DNA, 360 bp, Artificial Sequence
  derived and/or modified sequence
atgggagagccccagggctccatgaggatcctggtgactggaggcagcggcctggtgggcaaggccatccagaaggtggtggctgatggagctggcctgcccggggaggactgggtgtttgtgagcagcaaggatgctgacctgacagacacagcccagacccgggccctgtttgagaaggtgcagcccacccacgtgatccacctggccgccatggtgggcggcctcttcaggaacatcaagtacaacctggacttctggaggaagaatgtgcacatgaatgacaacgtgctgcacagcgcctttgaggtgggcgccaggaaggtggtgtcctgcctgagcacctgcatcttcccctag

SEQ ID NO: 137310 - DNA, 807 bp, Artificial Sequence
  derived and/or modified sequence
atgggagagccccagggctccatgaggatcctggtgactggaggcagcggcctggtgggcaaggccatccagaaggtggtggctgatggagctggcctgcccggggaggactgggtgtttgtgagcagcaaggatgctgacctgacagacacagcccagacccgggccctgtttgagaaggtgcagcccacccacgtgatccacctggccgccatggtgggcggcctcttcaggaacatcaagtacaacctggacttctggaggaagaatgtgcacatgaatgacaacgtgctgcacagcgcctttgaggtgggcgccaggaaggtggtgtcctgcctgagcacctgcatcttcccagacaagaccacctaccccattgatgagaccatgatccacaatggaccaccccacaacagcaactttggctacagctatgccaagaggatgattgatgtgcagaacagagcctacttccagcagtatggctgcaccttcaccgctgtgatccccaccaacgtgtttggcccccatgacaacttcaacattgaagatggccacgtgctgcccggcctcatccacaaggtgcacctggccaagagcagcggcagcgccctgactgtgtggggcaccggcaacccccggcggcagttcatctacagcctggacctggcccagctgttcatctgggtgctgcgggagtacaatgaggtggagcccatcatcctgtctgtgggggaggaggatgaggtgtccatcaaggaggccgctgaggccgtggtggaggccatggacttccacggggagtag

SEQ ID NO: 137311 - DNA, 597 bp, Artificial Sequence
  derived and/or modified sequence
atgggagagccccagggctccatgaggatcctggtgactggaggcagcggcctggtgggcaaggccatccagaaggtggtggctgatggagctggcctgcccggggaggactgggtgtttgtgagcagcaaggatgctgacctgacagacacagcccagacccgggccctgtttgagaaggtgcagcccacccacgtgatccacctggccgccatggtgggcggcctcttcaggaacatcaagtacaacctggacttctggaggaagaatgtgcacatgaatgacaacgtgctgcacagcgcctttgaggtgggcgccaggaaggtggtgtcctgcctgagcacctgcatcttcccagacaagaccacctaccccattgatgagaccatgatccacaatggaccaccccacaacagcaactttggctacagctatgccaagaggatgattgatgtgcagaacagagcctacttccagcagtatggctgcaccttcaccgctgtgatccccaccaacgtgtttggcccccatgacaacttcaacattgaagatggccacgtgctgcccggcctcatccacaaggtgcacctggcctag

SEQ ID NO: 137312 - DNA, 966 bp, Artificial Sequence
  derived and/or modified sequence
atgggcgagccccagggcagcatgcggatcctggtgaccggcggctccgggctggtggggaaggcgattcagaaggtggtggccgacggcgcgggcctcccaggagaggactgggtgttcgtcagttccaaggacgctgatctgaccgatacagctcagacacgtgcgctgtttgagaaggtgcagcccactcacgtcattcacctcgccgccatggtgggcggactctttaggaacattaaatataatctggatttctggcgaaagaatgtgcatatgaacgataacgtcctccattctgcttttgaggtaggcgcccgtaaagttgtgagctgtttgagcacctgcatattccctgataaaaccacttacccaattgacgagactatgattcacaacgggcctccacataatagcaattttggttattcgtacgctaagcgcatgattgacgtgcagaatcgagcctacttccagcaatacgggtgtacatttacagcagtgatccccacgaacgtatttggaccacatgacaatttcaatatagaggatggacacgtgctgccggggctcattcacaaggtccaccttgcaaagagctctggcagcgcactaaccgtgtgggggaccggtaatcctcggcggcaattcatttacagcctcgacctggcccagctgtttatctgggttctgagagaatataacgaagtggaacctataattctgtcggttggcgaggaggatgaggtgtccattaaggaagccgcagaagctgttgtggaggctatggacttccatggagaagtgacctttgacaccaccaagtccgatggacagtttaaaaaaactgcctcaaacagtaagttacggacctatctgcctgattttagattcacacccttcaaacaagcggtcaaagaaacttgcgcatggttcaccgacaattacgaacaggccagaaagtag

SEQ ID NO: 137313 - DNA, 360 bp, Artificial Sequence
  derived and/or modified sequence
atgggcgagccccagggcagcatgcggatcctggtgaccggcggctccgggttggtgggaaaggcgattcaaaaggtcgtagcggacggggcaggcctgcccggggaggattgggtttttgtctcttctaaggatgcagatctgaccgatacagctcagactcgcgccctgttcgagaaagtacagcctacccacgtgatccatctagccgctatggtgggaggactgttcagaaacatcaaatacaaccttgatttttggaggaaaaacgtccacatgaatgacaatgtcttacactccgcctttgaggtgggggcacgaaaggtggtttcatgcttgtcaacatgtattttcccttag

SEQ ID NO: 137314 - DNA, 807 bp, Artificial Sequence
  derived and/or modified sequence
atgggcgagccccagggcagcatgcggatcctggtgaccggcggctctggactcgtgggcaaggccattcaaaaggtagtggccgatggcgcagggctgccgggagaagactgggttttcgtgagtagtaaagatgctgatctgaccgatactgcccaaactcgggctctctttgaaaaggtgcagcccacgcatgtcattcaccttgccgctatggtggggggcctgtttagaaacatcaaatacaatctggatttttggaggaagaacgttcacatgaatgataacgtactgcattccgcttttgaggtgggggccagaaaggtcgtttcctgcctttctacctgtatcttcccggataaaactacttatcctatcgatgagacaatgattcacaatggccctccacacaattctaattttggatactcttacgctaaacggatgatagacgtgcagaaccgggcctactttcagcagtatggttgcaccttcaccgccgtcattcccacaaatgtatttgggcctcatgataacttcaacatcgaagatggacacgtattacctggactgatacataaggttcacctggccaagagctccgggagtgccctcactgtgtggggtaccggcaatccaagaaggcaattcatttacagtctcgacctcgcccagctcttcatttgggttctgcgcgagtataatgaagtcgagccgattatcctttccgtgggcgaggaagacgaggtgtctatcaaagaggcagctgaagccgtggtggaggcaatggatttccacggcgaatag

SEQ ID NO: 137315 - DNA, 966 bp, Artificial Sequence
  derived and/or modified sequence
atgggcgagccccagggcagcatgcggatcctggtgaccggcggcagcgggttagtcggcaaggccattcagaaggtcgtggctgatggcgctgggctgccaggagaggactgggtttttgtgagctcaaaggatgctgacctgaccgatacggctcagacacgggctctgtttgaaaaggttcaacctactcacgtgatccaccttgccgctatggtgggaggcctgtttcggaacattaagtataatttagatttttggcgcaagaatgtacatatgaacgataatgtcctgcatagcgcgtttgaagtgggcgctcggaaggtcgtgtcctgccttagtacctgtatttttccagataagaccacatatcccatcgatgagacaatgattcacaacggccctccacacaactccaacttcggctactcatatgccaagcggatgatcgatgttcagaatcgcgcctacttccaacaatacggttgcaccttcactgcggtgattccaaccaacgtcttcggccctcacgacaatttcaacatcgaagatgggcacgtcctgccaggcctcatccacaaagtgcatctggcaaaaagctccggatctgcactgacagtgtggggcactgggaatccaaggagacaatttatttatagcctggacctggcccagctcttcatttgggtccttcgggaatataatgaggtcgagcccatcatcctgagcgtgggcgaggaggacgaagtctcaataaaagaagcggcagaggccgtggtggaggctatggacttccacggcgaagtcacgtttgatactaccaaatcggatgggcagttcaagaaaaccgcctcaaactcaaagctcagaacctatctgcccgatttccggtttactccatttaagcaagcagtgaaagaaacctgtgcctggttcactgacaattacgagcaggccaggaagtag

SEQ ID NO: 137316 - DNA, 597 bp, Artificial Sequence
  derived and/or modified sequence
atgggcgagccccagggcagcatgcggatcctggtgaccggcggcagtgggctggttggaaaagccatccagaaggttgtggccgatggggcaggtctgcctggcgaagactgggtctttgtgtcatccaaggatgccgacctgacagacaccgcccagacgcgcgccctgtttgaaaaagtgcagccaactcacgtcatccatctggctgccatggtcgggggtctcttccggaatattaaatataatctggatttttggaggaagaacgtccacatgaacgacaacgttctgcacagcgctttcgaagtgggagcccgcaaggttgtctcctgcctgagcacttgtatcttccccgataaaacaacatacccaatcgatgagactatgatacacaatggtccaccgcataattccaacttcggttactcttatgcaaagagaatgattgacgttcaaaatagggcctacttccaacaatacgggtgcacctttaccgcggttatcccgacaaatgtttttgggcctcacgataacttcaacatcgaagacggccatgtgctgccaggtcttattcacaaggtacacctggcttag

SEQ ID NO: 137317 - DNA, 966 bp, Artificial Sequence
  derived and/or modified sequence
atgggtgagcctcagggctccatgaggatccttgtcacgggcggaagcggcctagtgggtaaggcgattcagaaggtggtcgccgacggcgctggactaccaggcgaggattgggtgttcgtgtcatcaaaagacgccgatctaacagataccgcacagactcgggctctctttgaaaaggtgcaacccacacacgtgatccatctggcagctatggtgggaggcctctttcgcaacatcaaatataatttagacttttggcgtaagaacgtgcatatgaacgacaacgtacttcattctgcttttgaggtgggggctagaaaagtggtttcttgtttgagcacgtgcatcttcccagacaaaaccacatatcctatcgacgagaccatgattcacaatgggccaccacacaattccaactttgggtacagctatgcgaagcgaatgatcgatgtgcaaaaccgcgcatatttccaacagtacggatgtaccttcactgccgtcattccaaccaacgtgtttgggccacacgataattttaatatcgaggatggccacgtgttacccggtctgatccacaaggtgcacctcgctaagagctctggaagtgcactgactgtctggggtaccggaaaccctcggcgacagttcatctattccctagacttggcccaactcttcatttgggtgctgagggagtacaacgaggtggaaccaatcattctgtcggtgggagaggaggacgaggtgtcaattaaggaagcagctgaggctgtggttgaagctatggattttcacggtgaggtcacttttgacactaccaagagtgatggccagtttaaaaaaactgcttccaacagcaagctcaggacgtaccttcccgactttagattcacacccttcaagcaggctgtcaaggagacatgtgcttggttcacggacaactatgaacaggcgagaaagtag

SEQ ID NO: 137318 - DNA, 360 bp, Artificial Sequence
  derived and/or modified sequence
atgggcgagccacagggttctatgcgcatcctggttaccggtggatctgggctggtcgggaaagctatccagaaagtggtggccgacggggctgggcttcctggtgaggactgggtttttgttagctccaaagacgctgatttgacggatacagctcagacgcgggcactctttgaaaaagttcaacctacccacgtaattcatctcgccgctatggtcgggggactgttccgcaacattaaatacaacttggacttctggaggaaaaacgtacatatgaatgacaacgtcttgcacagtgcgtttgaggtgggcgcacgaaaggtggtttcctgcctgtcaacctgtatcttcccttag

SEQ ID NO: 137319 - DNA, 807 bp, Artificial Sequence
  derived and/or modified sequence
atgggcgaaccccaggggtctatgagaatcctggttaccggaggttccggacttgtcggaaaggcaattcagaaagtagtggccgatggggctggtctccccggagaggattgggtttttgtgtcttccaaggatgctgacctgactgacaccgcccaaactcgtgccttgtttgaaaaggtacaacctacccacgttatccatttggcggcaatggtaggtggcctgttcaggaatattaagtacaacctggacttttggcggaaaaacgtgcacatgaacgataatgtgctgcactctgccttcgaggtgggggctaggaaagttgttagttgcctgtcgacttgcatcttcccagacaagaccacataccctatcgacgagaccatgatccataatggcccacctcataatagcaattttggatatagctatgctaaaaggatgatcgatgtgcagaacagggcttatttccagcagtacggctgcacgtttacagcagtcatcccgaccaatgttttcggaccccacgataactttaacatcgaagacgggcatgtactccccggtctaattcacaaagtgcacctggcaaaatctagtggcagtgccctgacagtctggggtacaggcaatcccagacgacaattcatctattctctagacttggcccagctgtttatatgggttctgcgcgaatataatgaggtggagcctatcattctgagcgttggcgaggaggatgaagtctctattaaagaggcagcagaagcggtggttgaggcaatggattttcacggagaatag

SEQ ID NO: 137320 - DNA, 966 bp, Artificial Sequence
  derived and/or modified sequence
atgggggagccccaagggtcaatgcgtatcctggttacgggcggatccggcctcgtcggtaaggctatacagaaggtggtggcagacggtgctggtctccctggggaagattgggtgttcgttagctcaaaggacgcagacctgactgatacagcacagacacgcgctctgttcgaaaaagtgcagccaacgcacgtcatccatttggccgcaatggtcggtggactcttccgcaatattaaatataacttagacttctggcgaaagaacgtccacatgaatgacaatgtactccattccgcatttgaggtaggagctcggaaggtggtcagttgtttgagtacctgcatatttcccgataaaactacctaccccatcgacgaaacaatgatccataatggcccaccccataattctaacttcggatattcatatgccaagagaatgattgatgtgcagaatcgagcctacttccagcagtatggctgcacattcactgcagtgatccccaccaatgttttcgggcctcacgacaacttcaatatagaagacggccacgtgctgcccggactgatccacaaggtgcatttagcaaagtctagtggttctgctctcacggtttggggtactggtaatccacggaggcagtttatatactccttggacctcgcccagctattcatctgggttctccgcgagtacaatgaggtagaacctatcatcctcagcgtcggcgaagaagatgaggtgtctataaaagaagctgcagaggcggtggtcgaggccatggatttccacggcgaagtgaccttcgacacaaccaaatcagacggccagtttaaaaagactgctagtaatagcaagttacggacttacctgcctgatttcagattcaccccatttaaacaggctgtgaaagagacatgcgcatggttcactgacaattacgagcaagccagaaaatag

SEQ ID NO: 137321 - DNA, 597 bp, Artificial Sequence
  derived and/or modified sequence
atgggcgagccccagggcagtatgaggatcctagtgaccggcggatccggactcgtaggcaaagctatccagaaggtggtcgctgacggcgcaggcctgccgggagaagattgggtgtttgtgtcatcaaaggacgcagatctgacagatacggcccagacaagagctctgttcgaaaaagtacagccaacccatgtgatccacctcgcagccatggttgggggactattcagaaatatcaagtacaacctggatttttggcgcaaaaatgtacacatgaacgataacgtgctgcattccgcattcgaagtaggggcacggaaggtggtgtcatgtctgagcacatgcatcttccccgacaaaacaacataccccatagatgagaccatgattcacaatgggcctccgcataactcaaactttggctactcttacgcaaagcggatgattgatgtccagaaccgcgcttacttccagcagtacgggtgtacatttaccgcagttatacccacaaacgttttcggaccccatgataattttaatatcgaagacgggcacgtgttgcccggtctcatccataaggtccacctcgcctag

SEQ ID NO: 137322 - protein, 494 aa, Artificial Sequence
  derived and/or modified sequence
MAAAAECDVVMAATEPELLDDQEAKREAETFKEQGNAYYAKKDYNEAYNYYTKAIDMCPKNASYYGNRAATLMMLGRFREALGDAQQSVRLDDSFVRGHLREGKCHLSLGNAMAACRSFQRALELDHKNAQAQQEFKNANAVMEYEKIAETDFEKRDFRKVVFCMDRALEFAPACHRFKILKAECLAMLGRYPEAQSVASDILRMDSTNADALYVRGLCLYYEDCIEKAVQFFVQALRMAPDHEKACIACRNAKALKAKKEDGNKAFKEGNYKLAYELYTEALGIDPNNIKTNAKLYCNRGTVNSKLRKLDDAIEDCTNAVKLDDTYIKAYLRRAQCYMDTEQYEEAVRDYEKVYQTEKTKEHKQLLKNAQLELKKSKRKDYYKILGVDKNASEDEIKKAYRKRALMHHPDRHSGASAEVQKEEEKKFKEVGEAFTILSDPKKKTRYDSGQDLDEEGMNMGDFDPNNIFKAFFGGPGGFSFEASGPGNFFFQFG

SEQ ID NO: 137323 - DNA, 1485 bp, Artificial Sequence
  derived and/or modified sequence
atggccgccgccgccgagtgcgacgtggtgatggccgccaccgagcccgagctgctggacgaccaggaggccaagagagaggccgagaccttcaaggagcagggcaacgcctactacgccaagaaggactacaacgaggcctacaactactacaccaaggccatcgacatgtgccccaagaacgccagctactacggcaacagagccgccaccctgatgatgctgggcagattcagagaggccctgggcgacgcccagcagagcgtgagactggacgacagcttcgtgagaggccacctgagagagggcaagtgccacctgagcctgggcaacgccatggccgcctgcagaagcttccagagagccctggagctggaccacaagaacgcccaggcccagcaggagttcaagaacgccaacgccgtgatggagtacgagaagatcgccgagaccgacttcgagaagagagacttcagaaaggtggtgttctgcatggacagagccctggagttcgcccccgcctgccacagattcaagatcctgaaggccgagtgcctggccatgctgggcagataccccgaggcccagagcgtggccagcgacatcctgagaatggacagcaccaacgccgacgccctgtacgtgagaggcctgtgcctgtactacgaggactgcatcgagaaggccgtgcagttcttcgtgcaggccctgagaatggcccccgaccacgagaaggcctgcatcgcctgcagaaacgccaaggccctgaaggccaagaaggaggacggcaacaaggccttcaaggagggcaactacaagctggcctacgagctgtacaccgaggccctgggcatcgaccccaacaacatcaagaccaacgccaagctgtactgcaacagaggcaccgtgaacagcaagctgagaaagctggacgacgccatcgaggactgcaccaacgccgtgaagctggacgacacctacatcaaggcctacctgagaagagcccagtgctacatggacaccgagcagtacgaggaggccgtgagagactacgagaaggtgtaccagaccgagaagaccaaggagcacaagcagctgctgaagaacgcccagctggagctgaagaagagcaagagaaaggactactacaagatcctgggcgtggacaagaacgccagcgaggacgagatcaagaaggcctacagaaagagagccctgatgcaccaccccgacagacacagcggcgccagcgccgaggtgcagaaggaggaggagaagaagttcaaggaggtgggcgaggccttcaccatcctgagcgaccccaagaagaagaccagatacgacagcggccaggacctggacgaggagggcatgaacatgggcgacttcgaccccaacaacatcttcaaggccttcttcggcggccccggcggcttcagcttcgaggccagcggccccggcaacttcttcttccagttcggctag

SEQ ID NO: 137324 - DNA, 1317 bp, Artificial Sequence
  derived and/or modified sequence
atgtgtcctaagaacgccagttactatgggaatcgcgctgctactttgatgatgttggggcgattccgggaggctctgggagacgcccaacagagcgtccgattggatgactccttcgtccggggacatctgagggagggaaagtgccacctgtctctcgggaatgctatggcggcttgcagaagctttcaaagggccctggaattagaccacaagaatgcacaagcccagcaggagtttaaaaatgccaatgcagtcatggaatatgagaaaattgctgaaacagattttgagaaaagagatttccgaaaagtggtgttctgcatggatagggccttggaatttgctcctgcatgccatagattcaaaatcctgaaggccgaatgcctcgccatgctgggccggtatcctgaagcccagtctgtggcatcagacattcttaggatggattcaaccaacgcagatgccctgtatgtgcgcggactctgcctgtattacgaggattgcatcgaaaaggctgtgcaattctttgtgcaggcacttcgtatggcgccggatcatgaaaaggcgtgtattgcgtgtcgcaacgcaaaggctctcaaggctaaaaaagaagatgggaacaaagcttttaaggaaggaaattacaagcttgcctatgaactatataccgaagcactcgggattgatcctaataatatcaagaccaatgccaagctgtactgcaaccgaggtacggtcaacagcaaattgaggaagctggacgatgccattgaggactgcactaacgctgttaaacttgacgatacttacattaaggcctacttgcgtagggctcagtgttacatggataccgagcagtacgaagaggccgtacgggattatgaaaaagtgtaccagactgagaaaaccaaggagcataagcagttattgaaaaatgctcaacttgagttgaagaagagtaaacgcaaggactattataagattctaggggtggacaaaaacgcctctgaggacgaaattaaaaaggcctaccggaaacgagcacttatgcaccaccctgataggcactctggggcgtcagctgaggtacagaaggaagaggagaaaaaattcaaggaggtcggtgaggcgtttaccatcttgtcggaccccaaaaaaaagacaagatatgatagcggccaagacctggatgaagagggcatgaacatgggcgatttcgacccaaataatatttttaaagcttttttcggcgggcctggcggcttctcattcgaggcgtcaggacccgggaatttcttttttcaatttggatag

SEQ ID NO: 137325 - DNA, 1317 bp, Artificial Sequence
  derived and/or modified sequence
atgtgcccgaaaaacgcttcctattacggcaacagagctgccaccctgatgatgctggggagattccgggaggccctgggcgacgcacagcaatctgtccgccttgacgacagcttcgtgcgtggccatctgcgcgaaggcaaatgccacctttcactgggaaatgccatggccgcatgcaggagctttcagagggctctcgagcttgaccacaaaaacgcccaagctcagcaggaatttaagaatgccaacgcggtcatggaatacgagaagatcgcagaaaccgatttcgaaaaacgggacttccgcaaggtcgtcttttgtatggatcgggctctggagttcgcacctgcttgtcaccgcttcaaaatcctgaaggcggaatgcctagccatgctggggcgatatcctgaggcacaatctgttgcatccgatatcttacgaatggactctacgaacgccgacgccctctatgtgcgcggcttatgtctgtattacgaagactgcatcgagaaagccgttcagtttttcgttcaggctctgcggatggcacccgaccacgagaaagcctgtatagcatgtcggaacgccaaagccctgaaggctaagaaggaagatggaaacaaagcatttaaggaaggcaattacaaactggcatatgagctctataccgaagctctcggcatcgacccaaacaacatcaagactaacgccaagctctattgcaatagggggacagtcaatagtaagctccgaaagctggatgatgccatcgaagactgtacgaacgctgtaaaacttgacgatacctacattaaagcatatctccgccgggcccaatgttacatggatacggagcaatacgaggaagccgtgcgagactatgagaaggtataccagactgaaaagacaaaggaacataagcaattgctgaagaatgcccagctagaactgaaaaagagcaagcgaaaggattattacaaaattttgggcgtagacaaaaacgcaagcgaagatgaaatcaaaaaggcctacagaaaacgggccctcatgcaccacccagaccggcactctggggcaagcgctgaagtgcaaaaagaggaagaaaaaaaatttaaagaggtaggtgaggcattcactatcctgtccgaccccaaaaagaagaccagatacgacagcggccaggatttagacgaggaagggatgaacatgggcgactttgatcccaacaacatatttaaggcattcttcggtggtcccggtggcttcagcttcgaggccagcggcccaggcaacttttttttccagttcggctag

SEQ ID NO: 137326 - DNA, 1485 bp, Artificial Sequence
  derived and/or modified sequence
atggccgctgccgccgagtgcgacgtggtgatggcggcaactgaaccagagctgctcgacgatcaagaggcgaaacgggaagccgagacttttaaggagcaggggaacgcgtattatgctaaaaaagattataacgaggcctataactattacacaaaggccattgatatgtgcccaaagaacgctagttactacggcaaccgggccgcgaccctcatgatgctaggccggttcagggaggcacttggagacgcccagcaatccgtgagactggacgactctttcgttcggggacacctaagagaaggtaagtgtcatttgtcactgggcaacgcgatggctgcgtgtcggtctttccaaagagcactcgaacttgaccataaaaacgctcaggcacagcaagaatttaaaaacgccaacgctgtgatggaatatgaaaaaatagcagagacagactttgagaagcgggattttaggaaggttgttttctgcatggatcgtgctttggagttcgcgcctgcatgtcaccgctttaagatcttgaaggccgagtgccttgccatgcttggtaggtacccagaggcgcagtcagtggctagcgacatcctacggatggacagcacaaacgcagatgcactctacgttcggggcttatgtctgtattacgaggattgtattgaaaaggccgtccagttctttgtgcaggcactgcgtatggctcctgaccatgagaaggcctgcattgcctgtcggaatgccaaggctctgaaggcaaagaaggaggatgggaataaggccttcaaggaggggaactataagttggcctacgaactgtacacagaagcattaggtattgaccccaataacataaagaccaatgccaaactctattgcaacaggggaacagtgaattctaagttgaggaagttagatgacgctatcgaggactgtactaacgccgtcaaactggacgacacttacattaaagcttacctaaggcgcgcccaatgttacatggataccgagcagtatgaagaggcggtgagggactacgaaaaggtgtaccagacagagaaaacaaaagagcataagcagctgctgaagaacgcccaactggagttaaaaaaatccaaaaggaaggactattataagatcttgggggtggataagaacgcaagtgaggacgagattaaaaaggcctataggaagagagccttaatgcaccatcctgatagacactccggcgccagcgccgaggtccagaaggaagaggaaaagaagttcaaggaggtcggggaagcctttaccattctgtcggatcccaaaaaaaagacaagatacgattctggtcaagacctagacgaggaaggaatgaatatgggcgactttgatcccaacaacatcttcaaggcttttttcggaggtcctggcggatttagtttcgaggcttccgggcctggcaacttcttcttccagtttggatag

SEQ ID NO: 137327 - DNA, 1317 bp, Artificial Sequence
  derived and/or modified sequence
atgtgccccaagaatgccagctactacggcaacagagctgccaccctgatgatgctgggccgcttccgggaggccctgggagatgcccagcagagcgtgcggctggatgacagctttgtgcggggccacctgcgggagggcaagtgccacctgagcctgggcaatgccatggccgcctgccgctccttccagagggccctggagctggaccacaagaatgcccaggcccagcaggagttcaagaatgccaatgctgtgatggagtatgagaagattgctgagacagactttgagaagagggacttcaggaaggtggtgttctgcatggaccgggccctggagtttgccccagcctgccaccgcttcaagatcctgaaggccgagtgcctggccatgctgggccgctacccagaggcccagagcgtggccagtgacatcctgaggatggacagcaccaatgctgatgccctgtatgtgcggggcctgtgcctgtactatgaggactgcatcgagaaggctgtgcagttctttgtgcaggccctgaggatggccccagaccacgagaaggcctgcatcgcctgcagaaatgccaaggccctgaaggccaagaaggaggatggcaacaaggccttcaaggagggcaactacaagctggcctatgagctgtacacagaggccctgggcatcgaccccaacaacatcaagaccaatgccaagctgtactgcaacagaggcaccgtgaacagcaagctgaggaagctggatgatgccatcgaggactgcaccaatgctgtgaagctggatgacacctacatcaaggcctacctgcggcgggcccagtgctacatggacacagagcagtatgaggaggccgtgcgggactatgagaaggtgtaccagacagagaagaccaaggagcacaagcagctgctgaagaatgcccagctggagctgaagaagagcaagaggaaggactactacaagatcctgggcgtggacaagaatgcctctgaagatgagatcaagaaggcctacaggaagagggccctgatgcaccacccagacagacacagcggggccagcgctgaggtgcagaaggaggaggagaagaagttcaaggaggtgggggaggccttcaccatcctgagtgaccccaagaagaagaccaggtatgattctggccaggacctggatgaggagggcatgaacatgggagactttgaccccaacaacatcttcaaggccttctttggaggccctgggggcttctcctttgaggccagcggccctggcaacttcttcttccagtttggatag

SEQ ID NO: 137328 - DNA, 1485 bp, Artificial Sequence
  derived and/or modified sequence
atggctgctgctgctgaatgtgatgtggtgatggccgccacagagcctgagctgctggatgaccaggaggccaagcgggaggccgagaccttcaaggagcagggcaatgcctactatgccaagaaggactacaatgaggcctacaactactacaccaaggccatcgacatgtgccccaagaatgccagctactacggcaacagagctgccaccctgatgatgctgggccgcttccgggaggccctgggagatgcccagcagagcgtgcggctggatgacagctttgtgcggggccacctgcgggagggcaagtgccacctgagcctgggcaatgccatggccgcctgccgctccttccagagggccctggagctggaccacaagaatgcccaggcccagcaggagttcaagaatgccaatgctgtgatggagtatgagaagattgctgagacagactttgagaagagggacttcaggaaggtggtgttctgcatggaccgggccctggagtttgccccagcctgccaccgcttcaagatcctgaaggccgagtgcctggccatgctgggccgctacccagaggcccagagcgtggccagtgacatcctgaggatggacagcaccaatgctgatgccctgtatgtgcggggcctgtgcctgtactatgaggactgcatcgagaaggctgtgcagttctttgtgcaggccctgaggatggccccagaccacgagaaggcctgcatcgcctgcagaaatgccaaggccctgaaggccaagaaggaggatggcaacaaggccttcaaggagggcaactacaagctggcctatgagctgtacacagaggccctgggcatcgaccccaacaacatcaagaccaatgccaagctgtactgcaacagaggcaccgtgaacagcaagctgaggaagctggatgatgccatcgaggactgcaccaatgctgtgaagctggatgacacctacatcaaggcctacctgcggcgggcccagtgctacatggacacagagcagtatgaggaggccgtgcgggactatgagaaggtgtaccagacagagaagaccaaggagcacaagcagctgctgaagaatgcccagctggagctgaagaagagcaagaggaaggactactacaagatcctgggcgtggacaagaatgcctctgaagatgagatcaagaaggcctacaggaagagggccctgatgcaccacccagacagacacagcggggccagcgctgaggtgcagaaggaggaggagaagaagttcaaggaggtgggggaggccttcaccatcctgagtgaccccaagaagaagaccaggtatgattctggccaggacctggatgaggagggcatgaacatgggagactttgaccccaacaacatcttcaaggccttctttggaggccctgggggcttctcctttgaggccagcggccctggcaacttcttcttccagtttggatag

SEQ ID NO: 137329 - DNA, 1317 bp, Artificial Sequence
  derived and/or modified sequence
atgtgccccaagaacgccagctactacggcaaccgggccgccaccctgatgatgctagggagattccgtgaagcgcttggggacgcacagcagagcgttcggcttgatgattctttcgtgcgagggcacctccgagagggcaaatgtcacctgtctctcggtaacgcaatggctgcctgtagaagcttccaaagggccttagagctcgaccataaaaacgcccaggcccaacaggagttcaagaacgccaatgctgtgatggagtatgagaaaatcgctgagaccgatttcgaaaaaagagacttccgaaaggtcgtgttttgtatggacagggctctcgaattcgctcctgcctgccatagatttaagattcttaaggctgaatgcttagcaatgctgggaagatatccagaagcccagagcgtagccagcgatatattaagaatggatagtacaaatgcagacgccctgtacgtaagaggtctctgcttatattacgaggattgtattgagaaagctgtgcagttcttcgtccaggcattgcgaatggctccggatcacgaaaaggcttgcattgcttgtcgtaacgctaaggcacttaaggccaaaaaggaggatgggaataaggcctttaaggaaggaaattacaaacttgcttatgaattgtacaccgaagctttgggcattgatcccaataacattaagaccaacgcaaagctatactgtaatcgagggacagtcaatagtaaactcagaaaactggatgatgcaatcgaggattgtacaaatgcagtcaaactggatgacacctacatcaaggcatacctacgccgcgctcaatgctatatggataccgaacaatatgaggaagctgttcgagactatgaaaaggtgtatcagacagaaaaaacaaaggaacataaacagctgctgaagaacgctcaactggaactgaaaaaatcgaagagaaaagactactataagatactgggagtggataagaatgccagcgaagatgagataaagaaggcttaccgcaaaagagccctcatgcatcaccccgaccgtcatagtggagcctcagccgaggtccagaaggaagaggaaaagaagtttaaggaagtcggcgaagccttcaccattctgtccgatccaaagaagaaaacccgctacgatagtggtcaggaccttgatgaggagggaatgaatatgggagacttcgatcctaacaacatcttcaaggcttttttcggcggcccgggtgggttttcgtttgaagccagtggtccaggaaatttcttctttcagttcggttag

SEQ ID NO: 137330 - DNA, 1317 bp, Artificial Sequence
  derived and/or modified sequence
atgtgccccaagaacgccagctactacggcaaccgggccgccaccttgatgatgctcggacgattcagagaggcactgggagatgcccagcaatcagtccgactcgatgatagttttgtcaggggccaccttagagaggggaagtgccacctgtccttaggcaacgccatggccgcttgtagaagcttccagagggccctggagctggaccacaagaacgcacaggcacagcaagagtttaaaaacgctaacgcggtgatggagtacgaaaagatcgctgagacagatttcgaaaagcgggattttcgcaaagttgtgttctgcatggacagagcattagaattcgccccagcctgccacagatttaaaattctcaaagccgaatgcttagccatgcttggccgctacccggaggctcaatcagtagcatcagatattcttaggatggattctacaaatgcagacgccctgtacgttcggggcttgtgcctttactatgaggattgcatcgagaaagccgttcagtttttcgtgcaggccctgcggatggcacccgatcacgagaaggcatgtatcgcctgccgaaacgctaaagctcttaaggctaagaaagaggatggtaacaaagccttcaaggaaggcaactataagctggcttacgaactctacacagaagccctgggcattgaccccaacaacatcaagactaacgcaaagctgtattgtaaccgtgggactgttaatagcaagcttaggaaattggacgacgcaatagaggactgcactaatgccgtgaaactcgacgatacctacatcaaagcatatttgcgacgcgctcagtgctacatggatactgaacagtacgaagaagcagtacgcgactatgagaaagtttaccaaaccgagaagactaaggaacataaacaactccttaagaatgcccaattggagctgaaaaagtctaagcggaaggactattataagatcctaggggtcgataaaaatgccagcgaggatgaaatcaagaaagcatatagaaaacgggcgttaatgcaccatcccgacagacatagcggcgctagcgccgaggtgcagaaggaagaggagaagaagtttaaggaagtaggggaggcgtttacgattttatccgacccgaagaagaagacccgttatgactctggccaagaccttgatgaggagggtatgaatatgggagattttgatccgaacaacatattcaaagcctttttcggaggtcccggagggttcagctttgaagcatctggccctggtaatttcttctttcagtttgggtag

SEQ ID NO: 137331 - DNA, 1485 bp, Artificial Sequence
  derived and/or modified sequence
atggccgccgccgccgagtgcgacgtggtgatggccgccaccgagcctgaattgctggacgaccaggaggcgaagcgcgaggcggagaccttcaaagagcagggaaatgcatactatgccaagaaggattataacgaggcttacaactattacacgaaagcaattgacatgtgtccgaagaatgcgtcttactatgggaatagagcagccacgttaatgatgctcggccggttccgggaggcccttggcgatgcccagcagtccgtccgcctggatgatagctttgtgcgtgggcatctcagagaggggaaatgccacttgtcccttgggaacgcaatggccgcttgtcgatccttccagagagcgctcgaactggaccacaagaacgcccaggctcagcaagagtttaaaaacgccaacgcagtgatggagtatgagaaaatcgccgagaccgacttcgaaaaacgcgacttcagaaaggtggtgttttgtatggacagagcactggagttcgctcccgcctgtcatagattcaagatactcaaagctgaatgtctggcaatgctcggccggtaccctgaggcgcagtccgtggcctccgatatcctcaggatggattcgacaaacgctgatgccttatacgtgagaggcctctgtttatactacgaggactgtatcgaaaaggccgtccagtttttcgttcaggcgttacgcatggctcccgatcacgagaaagcctgtattgcatgccgcaacgccaaggcccttaaggcaaagaaagaggatggtaacaaagcgttcaaagagggtaactacaagctagcctatgagctgtatacagaggctctaggcatcgaccctaataacataaagactaacgccaaactgtattgtaacagggggacggtgaactcaaagcttcggaagttagatgatgctatcgaagattgcactaacgccgttaagctggacgatacctatatcaaggcctacctcagacgcgctcagtgttacatggataccgagcagtacgaggaagcagtccgggattacgagaaggtctatcagaccgagaagaccaaggagcataagcaactgctgaagaatgctcagctggaacttaaaaaaagcaaacgtaaggactactataagattctaggtgtcgataagaatgcctctgaggacgagattaagaaagcctacaggaagagagcgctaatgcaccaccccgacaggcacagcggggcctctgcggaagtgcagaaagaagaagaaaagaaatttaaagaagtcggagaagcatttacgattctgtctgaccctaagaagaaaaccagatatgactccggacaggacctggacgaagagggcatgaatatgggtgattttgaccccaacaacatcttcaaggccttctttggcggtcctgggggctttagttttgaggcctccggacccggcaatttctttttccaattcggatag

SEQ ID NO: 137332 - DNA, 1317 bp, Artificial Sequence
  derived and/or modified sequence
atgtgccctaaaaacgcttcatattacggaaaccgagcggcaaccctgatgatgttaggacggttccgggaggcactgggcgatgcccagcaatccgtgaggcttgacgactctttcgttcgcggtcaccttcgcgaaggcaaatgtcacctgtccctgggtaacgcaatggctgcatgccgttcctttcagagggctctcgaacttgatcacaagaatgcacaggcacagcaggagtttaaaaacgctaacgccgtcatggaatacgagaagatagccgagacagacttcgagaagagagacttccggaaggtggtgttctgtatggatagggctctggaattcgcgcctgcatgtcacaggtttaagattctcaaagccgagtgcctcgcaatgctaggtagataccctgaggcccagtcagtggctagcgatattttacgaatggactcaacaaatgcagatgctctgtacgtacgtggactctgtctctactatgaagactgcatagagaaggctgtccagttcttcgtgcaagcattgcggatggcacctgaccatgagaaggcctgcatcgcatgccgcaatgcgaaagctctcaaggccaagaaggaagatggcaataaagcgttcaaagaaggtaattataagctggcctacgaactttacacggaggccctgggcatcgaccccaacaatattaaaactaatgccaagctgtattgcaaccgaggcacagtaaacagcaaattaagaaaactggatgatgcaattgaagactgtaccaatgccgtcaagctggatgacacctatatcaaggcttacctgagacgagctcagtgctacatggacaccgaacagtatgaggaggcggtcagggattatgaaaaagtttaccaaacagaaaaaacgaaggagcacaagcaacttctgaagaatgcacagcttgaactcaaaaaaagcaagcgaaaggattattacaagatcctgggggttgacaagaacgcatctgaggatgaaatcaaaaaggcctataggaaacgggcactgatgcatcacccggatcgccattctggagcaagtgccgaagttcagaaagaggaggagaaaaaatttaaagaagttggagaagcttttaccatcctgagcgatcccaaaaagaaaactcgatacgacagtggtcaggatctagatgaagaaggcatgaacatgggtgattttgatcctaataacattttcaaggccttttttggcggacccggtggattctccttcgaagcgtccggcccaggaaatttcttctttcagtttggctag

SEQ ID NO: 137333 - DNA, 1317 bp, Artificial Sequence
  derived and/or modified sequence
atgtgtcccaaaaatgcctcttactacggaaaccgggctgctacactgatgatgctcggcagattccgtgaggccctcggcgatgcacaacagtctgtgcgtttggacgattccttcgtccgtggacacttacgcgagggaaaatgtcacctgagcctcgggaatgccatggcggcatgtcggtctttccagcgggctttggagctggatcacaaaaatgctcaggctcagcaagagttcaaaaatgccaatgccgttatggagtacgaaaaaattgctgagacagattttgaaaagcgcgatttcaggaaagttgtgttctgtatggacagggcactggagtttgctccagcctgtcatcgttttaaaatccttaaagcagagtgcttagctatgctggggaggtacccagaggcacagtccgtagcatccgatattttgagaatggactccacaaacgcagatgctctgtacgttcgagggctgtgtctgtattatgaggactgcatagaaaaggcagtgcaattttttgtccaggctctgagaatggcccctgatcacgagaaggcatgcatcgcatgtcgcaacgcgaaagcgctgaaagctaaaaaggaggatggtaacaaggccttcaaagaaggcaactataaattggcgtatgaactctatactgaggcgctgggcatcgatcctaacaatatcaaaactaacgcaaagctatattgcaataggggcaccgttaactctaagctgaggaagctcgacgatgctatagaggactgcaccaatgccgtgaaactcgatgatacttatatcaaggcgtatcttcggagagcgcagtgctacatggatacagagcaatatgaggaagccgtccgagactacgagaaggtgtaccaaacagaaaagaccaaagagcataagcagttgctgaaaaacgcccagttggagcttaaaaagtctaagcgaaaagattactacaaaattctgggagtcgacaaaaatgcctccgaggacgagattaagaaggcctaccgaaaacgcgcactgatgcatcatccggataggcacagcggcgctagcgcagaggtgcagaaagaagaggagaaaaagtttaaggaggtgggggaggcattcaccattctgtccgatcctaagaagaagaccaggtacgacagtggccaagacttggacgaggaggggatgaatatgggcgacttcgaccccaacaatattttcaaggccttctttggcggaccaggcggtttctccttcgaggcatccggcccaggaaactttttcttccagttcgggtag

SEQ ID NO: 137334 - DNA, 1485 bp, Artificial Sequence
  derived and/or modified sequence
atggccgctgcagcggaatgtgacgtcgtgatggccgctacagaacccgagttgctcgatgatcaagaggcgaagcgagaagccgaaacgtttaaggagcaagggaatgcatactacgccaaaaaggactacaatgaggcgtataattattataccaaggcaatagacatgtgccccaagaatgccagttactacggcaatcgggctgcaactcttatgatgttgggaaggtttcgagaagcactgggcgacgctcaacaatctgtccgcctggacgactcattcgtcaggggacacctccgagaaggaaaatgtcatttgagtctcggcaacgctatggctgcctgccggagctttcagagagccttggagttggaccataagaacgcccaagcccagcaggagttcaagaatgctaacgccgtgatggagtacgagaagatagcagagaccgattttgaaaaaagggatttccggaaggtggtgttctgcatggaccgagcccttgaattcgcgccagcctgccaccgcttcaagattctgaaggccgaatgcctggcgatgctgggccgatatcctgaggcccagagtgtcgccagtgatatactccggatggacagtacaaacgccgatgctctctacgtgcggggactgtgtctgtattacgaggattgtatcgaaaaggcagtgcagttctttgtgcaggctctccgtatggcacctgaccatgagaaggcgtgcatcgcatgccgaaacgcaaaggcattaaaggcaaaaaaagaagatggcaacaaagccttcaaggaggggaattacaaactcgcttacgagctttatactgaggccctcggcatcgatccgaataatattaagacaaacgctaagttatactgtaaccgaggcactgttaattccaaactgaggaaactcgatgacgcgattgaagattgcaccaacgccgtgaagctggatgacacgtacattaaagcctacttgaggagggctcagtgttatatggacacagagcagtatgaagaggcggtgagggattacgaaaaggtgtatcagactgaaaagactaaggagcataagcagttgctaaaaaatgcacagctcgaactgaagaaaagcaagcggaaagactattataagattctgggcgtcgacaaaaacgcttcggaggatgaaattaagaaagcatacagaaaaagggcactgatgcatcatcctgaccgacattcaggggctagcgccgaagtccagaaggaggaggagaagaaatttaaagaggtgggagaagcttttaccatcctttcggaccctaagaagaaaacacggtacgacagcggccaagatctcgacgaagaaggaatgaacatgggcgatttcgatcccaataatatcttcaaggcattctttggcggtccaggtgggttcagctttgaagcatctggccctggcaacttcttcttccagtttgggtag

SEQ ID NO: 137335 - DNA, 2078 bp, Artificial Sequence
  derived and/or modified sequence
aagccctagagaggctaccaccggtacaccccgccttcccacccacgggtaaagtggcgccgcctacgcaccggcacagcccctgggctcccgccccggcgcggagaccaccgtggacatccgggggcgggaggccgctctggccccaagcggagcctctctctggtagacgagcccgagggagcccttctgggcgcggcgccgcggagctgctctatgctccaaccggaagtgctcttcaccgccggcctcccacccagctctctggtcccggcggtaagatggcggctgccgcggagtgcgatgtggtaatggcggcgaccgagccggagctgctcgacgaccaagaggcgaagagggaagcagagactttcaaggaacaaggaaatgcatactatgccaagaaagattacaatgaagcttataattattatacaaaagccatagatatgtgtcctaaaaatgctagctattatggtaatcgagcagccaccttgatgatgcttggaaggttccgggaagctcttggagatgcacaacagtcagtgaggttggatgacagttttgtccggggacatctacgagagggcaagtgccacctctctctggggaatgccatggcagcatgtcgcagcttccagagagccctagaactggatcataaaaatgctcaggcacaacaagagttcaagaatgctaatgcagtcatggaatatgagaaaatagcagaaacagattttgagaagcgagattttcggaaggttgttttctgcatggaccgtgccctagaatttgcccctgcctgccatcgcttcaaaatcctcaaggcagaatgtttagcaatgctgggtcgttatccagaagcacagtctgtggctagtgacattctacgaatggattccaccaatgcagatgctctgtatgtacgaggtctttgcctttattacgaagattgtattgagaaggcagttcagtttttcgtacaggctctcaggatggctcctgaccacgagaaggcctgcattgcctgcagaaatgccaaagcactcaaagcaaagaaagaagatgggaataaagcatttaaggaaggaaattacaaactagcatatgaactgtacacagaagccctggggatagaccccaacaatataaaaacaaatgctaaactctactgtaatcggggtacggttaattccaagcttaggaaactagatgatgcaatagaagactgcacaaatgcagtgaagcttgatgacacttacataaaagcctacttgagaagagctcagtgttacatggacacagaacagtatgaagaagcagtacgagactatgaaaaagtataccagacagagaaaacaaaagaacacaaacagctcctaaaaaatgcgcagctggaactgaagaagagtaagaggaaagattactacaagattctaggagtggacaagaatgcctctgaggacgagatcaagaaagcttatcggaaacgggccttgatgcaccatccagatcggcatagtggagccagtgctgaggttcagaaggaggaggagaagaagttcaaggaagttggagaggcctttactatcctctctgatcccaagaaaaagactcgctatgacagtggacaggacctagatgaggagggcatgaatatgggtgattttgatccaaacaatatcttcaaggcattctttggcggtcctggcggcttcagctttgaagcatctggtccagggaatttcttttttcaatttggctaatgaagggcaaccacccagaacccagaaaatgcagattcactcagtttaatcttgaatgtggaaacagttcacctcctcccttcatcacgtctccgtgtgcttagagcagtttcgttttctcagttggatgccctgtgtctctgtgagtggggtggagcaaagggaaccaatgccgaagaccgagggcaggggagggaggcgggggtggacagggaggcagcttgtgaatttttgttttactgtttaactttattaaaaaagaaaaaaaaaagagaataaaatgttttgacccttcctggccctttgctctgg

SEQ ID NO: 137336 - DNA, 1317 bp, Artificial Sequence
  derived and/or modified sequence
atgtgccccaagaacgccagctactacggcaacagagccgccaccctgatgatgctgggcagattcagagaggccctgggcgacgcccagcagagcgtgagactggacgacagcttcgtgagaggccacctgagagagggcaagtgccacctgagcctgggcaacgccatggccgcctgcagaagcttccagagagccctggagctggaccacaagaacgcccaggcccagcaggagttcaagaacgccaacgccgtgatggagtacgagaagatcgccgagaccgacttcgagaagagagacttcagaaaggtggtgttctgcatggacagagccctggagttcgcccccgcctgccacagattcaagatcctgaaggccgagtgcctggccatgctgggcagataccccgaggcccagagcgtggccagcgacatcctgagaatggacagcaccaacgccgacgccctgtacgtgagaggcctgtgcctgtactacgaggactgcatcgagaaggccgtgcagttcttcgtgcaggccctgagaatggcccccgaccacgagaaggcctgcatcgcctgcagaaacgccaaggccctgaaggccaagaaggaggacggcaacaaggccttcaaggagggcaactacaagctggcctacgagctgtacaccgaggccctgggcatcgaccccaacaacatcaagaccaacgccaagctgtactgcaacagaggcaccgtgaacagcaagctgagaaagctggacgacgccatcgaggactgcaccaacgccgtgaagctggacgacacctacatcaaggcctacctgagaagagcccagtgctacatggacaccgagcagtacgaggaggccgtgagagactacgagaaggtgtaccagaccgagaagaccaaggagcacaagcagctgctgaagaacgcccagctggagctgaagaagagcaagagaaaggactactacaagatcctgggcgtggacaagaacgccagcgaggacgagatcaagaaggcctacagaaagagagccctgatgcaccaccccgacagacacagcggcgccagcgccgaggtgcagaaggaggaggagaagaagttcaaggaggtgggcgaggccttcaccatcctgagcgaccccaagaagaagaccagatacgacagcggccaggacctggacgaggagggcatgaacatgggcgacttcgaccccaacaacatcttcaaggccttcttcggcggccccggcggcttcagcttcgaggccagcggccccggcaacttcttcttccagttcggctag

SEQ ID NO: 137337 - protein, 371 aa, Artificial Sequence
  derived and/or modified sequence
MSMSPKHTTPFSVSDILSPLEESYKKVGMEGGGLGAPLAAYRQGQAAPPTAAMQQHAVGHHGAVTAAYHMTAAGVPQLSHSAVGGYCNGNLGNMSELPPYQDTMRNSASGPGWYGANPDPRFPAISRFMGPASGMNMSGMGGLGSLGDVSKNMAPLPSAPRRKRRVLFSQAQVYELERRFKQQKYLSAPEREHLASMIHLTPTQVKIWFQNHRYKMKRQAKDKAAQQQLQQDSGGGGGGGGTGCPQQQQAQQQSPRRVAVPVLVKDGKPCQAGAPAPGAASLQGHAQQQAQHQAQAAQAAAAAISVGSGGAGLGAHPGHQPGSAGQSPDLAHHAASPAALQGQVSSLSHLNSSGSDYGTMSCSTLLYGRTW

SEQ ID NO: 137338 - DNA, 2352 bp, Artificial Sequence
  derived and/or modified sequence
gaaacttaaaggtgtttaccttgtcatcagcatgtaagctaattatctcgggcaagatgtaggcttctattgtcttgttgctttagcgcttacgccccgcctctggtggctgcctaaaacctggcgccgggctaaaacaaacgcgaggcagcccccgagcctccactcaagccaattaaggaggactcggtccactccgttacgtgtacatccaacaagatcggcgttaaggtaacaccagaatatttggcaaagggagaaaaaaaaagcagcgaggcttcgccttccccctctcccttttttttcctcctcttccttcctcctccagccgccgccgaatcatgtcgatgagtccaaagcacacgactccgttctcagtgtctgacatcttgagtcccctggaggaaagctacaagaaagtgggcatggagggcggcggcctcggggctccgctggcggcgtacaggcagggccaggcggcaccgccaacagcggccatgcagcagcacgccgtggggcaccacggcgccgtcaccgccgcctaccacatgacggcggcgggggtgccccagctctcgcactccgccgtggggggctactgcaacggcaacctgggcaacatgagcgagctgccgccgtaccaggacaccatgaggaacagcgcctctggccccggatggtacggcgccaacccagacccgcgcttccccgccatctcccgcttcatgggcccggcgagcggcatgaacatgagcggcatgggcggcctgggctcgctgggggacgtgagcaagaacatggccccgctgccaagcgcgccgcgcaggaagcgccgggtgctcttctcgcaggcgcaggtgtacgagctggagcgacgcttcaagcaacagaagtacctgtcggcgccggagcgcgagcacctggccagcatgatccacctgacgcccacgcaggtcaagatctggttccagaaccaccgctacaaaatgaagcgccaggccaaggacaaggcggcgcagcagcaactgcagcaggacagcggcggcggcgggggcggcgggggcaccgggtgcccgcagcagcaacaggctcagcagcagtcgccgcgacgcgtggcggtgccggtcctggtgaaagacggcaaaccgtgccaggcgggtgcccccgcgccgggcgccgccagcctacaaggccacgcgcagcagcaggcgcagcaccaggcgcaggccgcgcaggcggcggcagcggccatctccgtgggcagcggtggcgccggccttggcgcacacccgggccaccagccaggcagcgcaggccagtctccggacctggcgcaccacgccgccagccccgcggcgctgcagggccaggtatccagcctgtcccacctgaactcctcgggctcggactacggcaccatgtcctgctccaccttgctatacggtcggacctggtgagaggacgccgggccggccctagcccagcgctctgcctcaccgcttccctcctgcccgccacacagaccaccatccaccgctgctccacgcgcttcgacttttcttaacaacctggccgcgtttagaccaaggaacaaaaaaaccacaaaggccaaactgctggacgtctttctttttttccccccctaaaatttgtgggtttttttttttaaaaaaagaaaatgaaaaacaaccaagcgcatccaatctcaaggaatctttaagcagagaagggcataaaacagctttggggtgtctttttttggtgattcaaatgggttttccacgctagggcggggcacagattggagagggctctgtgctgacatggctctggactctaaagaccaaacttcactctgggcacactctgccagcaaagaggactcgcttgtaaataccaggatttttttttttttttgaagggaggacgggagctggggagaggaaagagtcttcaacataacccacttgtcactgacacaaaggaagtgccccctccccggcaccctctggccgcctaggctcagcggcgaccgccctccgcgaaaatagtttgtttaatgtgaacttgtagctgtaaaacgctgtcaaaagttggactaaatgcctagtttttagtaatctgtacattttgttgtaaaaagaaaaaccactcccagtccccagcccttcacattttttatgggcattgacaaatctgtgtatattatttggcagtttggtatttgcggcgtcagtctttttctgttgtaacttatgtagatatttggcttaaatatagttcctaagaagcttctaataaattatacaaattaaaaagattctttttctgattaaaaaaaaaaaaaaaaaa

SEQ ID NO: 137339 - DNA, 1116 bp, Artificial Sequence
  derived and/or modified sequence
atgagcatgagccccaagcacaccacccccttcagcgtgagcgacatcctgagccccctggaggagagctacaagaaggtgggcatggagggcggcggcctgggcgcccccctggccgcctacagacagggccaggccgccccccccaccgccgccatgcagcagcacgccgtgggccaccacggcgccgtgaccgccgcctaccacatgaccgccgccggcgtgccccagctgagccacagcgccgtgggcggctactgcaacggcaacctgggcaacatgagcgagctgcccccctaccaggacaccatgagaaacagcgccagcggccccggctggtacggcgccaaccccgaccccagattccccgccatcagcagattcatgggccccgccagcggcatgaacatgagcggcatgggcggcctgggcagcctgggcgacgtgagcaagaacatggcccccctgcccagcgcccccagaagaaagagaagagtgctgttcagccaggcccaggtgtacgagctggagagaagattcaagcagcagaagtacctgagcgcccccgagagagagcacctggccagcatgatccacctgacccccacccaggtgaagatctggttccagaaccacagatacaagatgaagagacaggccaaggacaaggccgcccagcagcagctgcagcaggacagcggcggcggcggcggcggcggcggcaccggctgcccccagcagcagcaggcccagcagcagagccccagaagagtggccgtgcccgtgctggtgaaggacggcaagccctgccaggccggcgcccccgcccccggcgccgccagcctgcagggccacgcccagcagcaggcccagcaccaggcccaggccgcccaggccgccgccgccgccatcagcgtgggcagcggcggcgccggcctgggcgcccaccccggccaccagcccggcagcgccggccagagccccgacctggcccaccacgccgccagccccgccgccctgcagggccaggtgagcagcctgagccacctgaacagcagcggcagcgactacggcaccatgagctgcagcaccctgctgtacggcagaacctggtag

SEQ ID NO: 137340 - DNA, 1116 bp, Artificial Sequence
  derived and/or modified sequence
atgtcaatgtctccaaagcacactactccattcagtgtcagcgacatcctctctcccttggaagagtcctacaaaaaagtggggatggagggtggtggactcggagcccccttagctgcctatagacagggacaggcggcacccccaaccgcggcgatgcagcagcatgccgtcggccatcatggcgccgtcacagccgcctaccatatgactgccgccggcgtcccacagctctcacatagcgcagtaggaggctactgcaatggcaacctggggaatatgtcagagctccccccttatcaggatacaatgaggaacagcgcctcagggcccgggtggtacggcgctaatcccgatccccggtttccggcaatcagcagattcatgggccctgcctcaggcatgaacatgagcggcatggggggactcgggtcgctcggagacgtgagtaagaatatggccccactgcctagcgcacctcggagaaagaggcgtgtgctgttcagccaggcgcaggtctacgaacttgagcggcggttcaaacagcagaaatacctcagtgcacctgaacgtgaacacttggcttctatgattcacctgacacccacacaggtcaaaatatggttccagaaccacagatacaagatgaagaggcaggccaaggacaaggctgctcagcagcaattacagcaggacagtggcggtggcggtgggggaggtggtacaggctgtccacagcagcagcaggctcagcagcaatccccgaggagagtggctgttcctgtgcttgtcaaggatggcaagccatgtcaagctggggcacccgcaccaggagcagcttctctgcaaggccatgcccagcagcaggcccaacaccaggcccaagcagctcaggcggcagctgccgctatatcagtgggctccggtggcgcaggccttggcgcacaccccggccaccagcctggctccgcaggccagtcacccgacctcgcacaccacgccgccagtcccgcagcccttcaaggccaagtgagcagcctgtcgcacctaaattcctcagggagcgactacgggacaatgtcctgctccacgctgttatatggacgtacatggtag

SEQ ID NO: 137341 - DNA, 1116 bp, Artificial Sequence
  derived and/or modified sequence
atgtccatgtcccccaagcacacaacaccgttctctgtctctgacattttatcccccctggaggagagttataaaaaggtgggaatggaaggtggaggactgggcgcccctctagcggcgtatcgtcagggccaagccgcccctcctacagctgcaatgcagcagcacgctgtaggacaccatggcgcggttacggccgcctatcacatgacggcagctggcgtgccacagttgtcccactcggctgtcggaggctactgtaatggaaacctgggaaatatgtccgaactgcccccctaccaggacacaatgcgaaactccgcttccggaccaggttggtacggcgccaaccctgatcctaggttcccagctatatcccgatttatgggacccgctagtgggatgaacatgtccggaatgggaggactaggcagcctgggagatgtttctaagaatatggcacctttgccatcagcacctagacgcaagcggcgtgtgctgtttagccaggcgcaggtatacgaacttgaaagacggtttaagcaacagaaatacctgtctgcccccgagagagagcacctggcctccatgatacatctaacaccaacccaggtgaaaatatggttccagaatcatcggtataagatgaaaaggcaggccaaagataaggccgctcaacaacagttgcagcaggactctggtggaggtgggggtggcggtggtacgggctgcccacagcaacagcaggcacagcagcagtcacccaggcgagtggcagtccctgtgctagtgaaggacggtaaaccttgccaagccggagctcccgcccccggagccgcgtcattgcaggggcacgctcagcagcaggcccagcaccaggcccaggccgcgcaggctgcagcagcagccattagtgtgggctccgggggcgccggcctgggggcacaccctggacaccagccggggagtgccggtcagtcaccggacttggcccaccacgctgccagccctgcagctcttcaggggcaggtaagcagcttgagccacctgaactctagtgggagcgactatggtaccatgagttgttctactttactttatggacggacgtggtag

SEQ ID NO: 137342 - DNA, 1116 bp, Artificial Sequence
  derived and/or modified sequence
atgagtatgtcccctaagcacaccacaccattctctgtctccgacatcctatctcccctcgaggagagctacaaaaaggttggcatggagggcgggggacttggcgccccactcgctgcttatcggcagggtcaggctgccccacctactgccgccatgcagcagcatgccgtgggccatcatggtgccgtcaccgccgcttatcacatgaccgctgctggcgtacctcagctttcgcactcagcggtaggcggttattgcaacggcaacctcgggaatatgagcgagctgcctccctaccaggacacaatgcgtaacagcgcctcagggcccggttggtatggggctaaccccgatcccagatttccagccattagtcgatttatgggccccgcctccggaatgaatatgagtggaatgggcggcctgggatcgctaggggacgtgtccaagaacatggcacctctgcccagcgcacccagacggaaaaggagagtgctgttcagccaagcccaggtttatgagctggaaagaaggttcaaacagcagaagtatttgtcggcaccagagcgagagcatctcgcctctatgatccacctaactccaactcaagttaaaatttggttccagaatcaccgctacaaaatgaagcggcaagccaaagataaagctgctcaacaacagctccaacaggactcaggagggggaggaggcggcgggggcactgggtgtccccagcaacaacaagctcaacagcaatccccgcgcagagtggcggtaccagtgttggtgaaggatggcaagccctgtcaggctggtgcccccgctcctggcgcggccagtttacagggccatgcgcaacagcaggctcaacaccaggctcaagctgcacaggccgccgccgccgcaatctcagttgggtctggaggtgctggtctcggagctcaccctgggcatcaacctggctcagccggccagagtcctgatcttgcgcaccacgccgctagccccgccgcactccagggacaggtgtcttcactgtcacatttgaatagttccgggtccgattacggcaccatgtcatgcagcacgctgctgtacggaaggacctggtag

SEQ ID NO: 137343 - DNA, 1116 bp, Artificial Sequence
  derived and/or modified sequence
atgtccatgagccccaagcacaccacccccttctctgtgtctgacatcctgagccccctggaggagagctacaagaaggtgggcatggagggcggcggcctgggcgcccccctggccgcctaccggcagggccaggccgccccacccacagctgccatgcagcagcacgctgtgggccaccacggggctgtgacagctgcctaccacatgacagctgctggggtgccccagctgagccacagcgctgtgggcggctactgcaatggaaacctgggcaacatgtctgagctgcccccctaccaggacaccatgagaaattctgccagcggccctggctggtacggggccaacccagacccccgcttccctgccatcagccgcttcatgggccctgccagcggcatgaacatgagcggcatgggcggcctgggcagcctgggagatgtgtccaagaacatggcccccctgcccagcgcccccaggaggaagagaagagtgctcttcagccaggcccaggtgtatgagctggagcggcgcttcaagcagcagaagtacctgagcgcccctgagcgggagcacctggcctccatgatccacctgacccccacccaggtgaagatctggttccagaaccaccgctacaagatgaagaggcaggccaaggacaaggccgcccagcagcagctgcagcaggacagcggcggcggcggcggcggcggcggcaccggctgcccccagcagcagcaggcccagcagcagagcccccggcgggtggccgtgcctgtgctggtgaaggatggcaagccctgccaggccggggccccagcccctggagctgccagcctgcagggccacgcccagcagcaggcccagcaccaggcccaggccgcccaggccgctgctgctgccatctctgtgggcagcggcggggccggcctgggcgcccaccctggccaccagcccggcagcgctggccagagcccagacctggcccaccacgccgccagccctgctgccctgcagggccaggtgagcagcctgagccacctgaacagcagcggcagtgactatggcaccatgagctgcagcaccctgctgtatggccgcacctggtag

SEQ ID NO: 137344 - DNA, 1116 bp, Artificial Sequence
  derived and/or modified sequence
atgagcatgagccccaagcacaccacccccttcagcgtgagcgacatactgagccccctcgaggagtcctacaaaaaggttgggatggaaggcggcggtctcggcgcacccctcgccgcatacaggcaggggcaggcggccccacctaccgccgctatgcagcagcatgcagtcggacatcacggggcagtaacggccgcctaccacatgacagccgccggggtgccccagctgagccactcagccgtgggcggttactgcaacggcaatctggggaacatgagcgaactgccaccctaccaggatactatgaggaatagtgccagtggccctggatggtacggcgctaatccagacccccggttccctgcaatttctcggtttatggggcccgctagcggcatgaatatgtctggcatgggagggctcgggtccctcggggacgtgtccaagaacatggcacctctcccctcggccccaagaaggaaacgacgggtgctgtttagccaagcccaagtgtacgagctagaaagaagattcaaacagcagaaatacctgtccgcaccagaacgggaacacctcgccagcatgatacatcttacgccgacccaagtgaagatctggtttcaaaatcatcgctataagatgaagagacaagctaaggataaggcggcgcagcagcagctgcagcaagatagcgggggaggggggggtggtggggggacgggttgcccacaacagcaacaggcccaacagcagtcacccaggcgtgtcgccgtgcctgtgctcgtgaaggacgggaagccctgccaggccggagctcctgcccccggagcagcaagtctgcaaggccacgcacagcaacaggcacagcatcaggcccaggcggcacaggcggcagccgctgccattagcgtaggcagcggaggggccggcttgggcgcccacccaggacaccagcctggttctgccgggcagtccccagacttggctcaccatgcggctagccctgctgccctacagggtcaagtgtcatcactctcacatcttaatagtagtggctccgattacgggaccatgtcatgttcaaccctgttatatggtcgaacatggtag

SEQ ID NO: 137345 - DNA, 1116 bp, Artificial Sequence
  derived and/or modified sequence
atgagcatgagccccaagcacaccacccccttcagcgtgagcgacattctgtcaccacttgaggaatcgtataagaaggtgggtatggagggggggggactgggcgctcctttagctgcataccggcagggtcaagccgccccgccaaccgctgccatgcagcagcacgccgtgggacatcatggagccgttaccgctgcctaccacatgaccgcagctggagtcccacagttgagtcattctgccgtcggcggttactgtaatgggaatcttggaaacatgtcagaactgcccccataccaggacacaatgaggaacagtgcctccggtcccggttggtacggtgcaaatccggaccctagatttcccgccattagccgttttatggggcctgcgagtgggatgaacatgagcgggatgggcggacttggcagtctgggggatgtcagcaaaaacatggctcctctcccttccgcgcctcgcagaaaaaggcgagttcttttttcacaggcccaggtctatgaactggagcgccgcttcaagcagcagaagtatctcagcgcccccgagcgcgaacacttggcttccatgattcacctcacacccacacaggttaaaatctggttccagaaccaccgctacaaaatgaagcgacaggcgaaggataaagcagctcagcagcagctccagcaggacagcggaggaggggggggcgggggcgggaccggatgcccacagcagcagcaggcccaacagcagtcgccacggagagtggccgtccccgttctggtcaaggatgggaagccttgtcaggccggcgcaccggcccccggcgccgcatcacttcagggtcacgctcagcaacaggcgcagcaccaagcacaggcggcacaagccgcggccgcggccatttcggtggggagtggcggcgccggtttgggcgcccatcccggacatcagccagggagcgccggacagtccccagacctagctcatcacgccgcttcaccggccgccctccaaggccaggtgtccagcctatcacacctaaactcctctggtagcgattatgggaccatgtcctgttccacccttctctatgggagaacatggtag

SEQ ID NO: 137346 - DNA, 1116 bp, Artificial Sequence
  derived and/or modified sequence
atgagcatgagccccaagcacaccacccccttcagcgtgagcgacatcctttctccgctggaagagtcctataagaaggtgggaatggagggcggtgggctcggcgcaccgctggcagcataccgacagggacaggccgcccctcctaccgcggccatgcagcagcatgccgtaggtcaccacggcgctgttacagcagcgtaccacatgactgcagctggcgtgccacagctcagccattcagccgtgggaggttactgtaatggaaaccttgggaacatgtcagaactgcctccttaccaggatactatgcggaactctgccagcggccctgggtggtacggggcgaatcccgaccctcgctttcccgctatctccagattcatggggcccgcctcagggatgaacatgtctggaatgggaggccttggatctctcggcgatgtgtcaaaaaacatggcccccctcccatccgctccacgcaggaagaggcgagtactctttagccaggcccaggtttacgaattggagaggcggtttaaacagcaaaagtatcttagcgcgccagagcgcgagcaccttgcgtctatgattcacctgacaccgacccaagtcaaaatttggttccagaatcaccggtacaagatgaagcgccaggctaaggacaaggcagcccagcagcagctgcagcaagattctggcggcggcgggggtggagggggtacaggatgcccgcagcagcagcaggcgcaacaacagtccccacgaagggtggccgtgcctgtgcttgtcaaggacgggaagccatgccaggccggcgcccccgccccgggcgccgcctctctccaaggccacgctcagcaacaggctcagcaccaggcacaagccgcccaggccgcagcagccgccatctccgtcggctctggaggcgctggcctaggagcgcacccaggccatcagcctggcagtgccggacagtcccccgatctcgcccaccacgccgcttctcccgcggccctgcaaggccaggtttcttcactgtctcacctgaattctagtggctctgactacggaacgatgagctgtagcactcttctgtatggacgcacctggtag

SEQ ID NO: 137347 - DNA, 2330 bp, Artificial Sequence
  derived and/or modified sequence
ttaaaggtgtttaccttgtcatcagcatgtaagctaattatctcgggcaagatgtaggcttctattgtcttgttgctttagcgcttacgccccgcctctggtggctgcctaaaacctggcgccgggctaaaacaaacgcgaggcagcccccgagcctccactcaagccaattaaggaggactcggtccactccgttacgtgtacatccaacaagatcggcgttaaggtaacaccagaatatttggcaaagggagaaaaaaaaagcagcgaggcttcgccttccccctctcccttttttttcctcctcttccttcctcctccagccgccgccgaatcatgtcgatgagtccaaagcacacgactccgttctcagtgtctgacatcttgagtcccctggaggaaagctacaagaaagtgggcatggagggcggcggcctcggggctccgctggcggcgtacaggcagggccaggcggcaccgccaacagcggccatgcagcagcacgccgtggggcaccacggcgccgtcaccgccgcctaccacatgacggcggcgggggtgccccagctctcgcactccgccgtggggggctactgcaacggcaacctgggcaacatgagcgagctgccgccgtaccaggacaccatgaggaacagcgcctctggccccggatggtacggcgccaacccagacccgcgcttccccgccatctcccgcttcatgggcccggcgagcggcatgaacatgagcggcatgggcggcctgggctcgctgggggacgtgagcaagaacatggccccgctgccaagcgcgccgcgcaggaagcgccgggtgctcttctcgcaggcgcaggtgtacgagctggagcgacgcttcaagcaacagaagtacctgtcggcgccggagcgcgagcacctggccagcatgatccacctgacgcccacgcaggtcaagatctggttccagaaccaccgctacaaaatgaagcgccaggccaaggacaaggcggcgcagcagcaactgcagcaggacagcggcggcggcgggggcggcgggggcaccgggtgcccgcagcagcaacaggctcagcagcagtcgccgcgacgcgtggcggtgccggtcctggtgaaagacggcaaaccgtgccaggcgggtgcccccgcgccgggcgccgccagcctacaaggccacgcgcagcagcaggcgcagcaccaggcgcaggccgcgcaggcggcggcagcggccatctccgtgggcagcggtggcgccggccttggcgcacacccgggccaccagccaggcagcgcaggccagtctccggacctggcgcaccacgccgccagccccgcggcgctgcagggccaggtatccagcctgtcccacctgaactcctcgggctcggactacggcaccatgtcctgctccaccttgctatacggtcggacctggtgagaggacgccgggccggccctagcccagcgctctgcctcaccgcttccctcctgcccgccacacagaccaccatccaccgctgctccacgcgcttcgacttttcttaacaacctggccgcgtttagaccaaggaacaaaaaaaccacaaaggccaaactgctggacgtctttctttttttccccccctaaaatttgtgggtttttttttttaaaaaaagaaaatgaaaaacaaccaagcgcatccaatctcaaggaatctttaagcagagaagggcataaaacagctttggggtgtctttttttggtgattcaaatgggttttccacgctagggcggggcacagattggagagggctctgtgctgacatggctctggactctaaagaccaaacttcactctgggcacactctgccagcaaagaggactcgcttgtaaataccaggatttttttttttttttgaagggaggacgggagctggggagaggaaagagtcttcaacataacccacttgtcactgacacaaaggaagtgccccctccccggcaccctctggccgcctaggctcagcggcgaccgccctccgcgaaaatagtttgtttaatgtgaacttgtagctgtaaaacgctgtcaaaagttggactaaatgcctagtttttagtaatctgtacattttgttgtaaaaagaaaaaccactcccagtccccagcccttcacattttttatgggcattgacaaatctgtgtatattatttggcagtttggtatttgcggcgtcagtctttttctgttgtaacttatgtagatatttggcttaaatatagttcctaagaagcttctaataaattatacaaattaaaaagattctttttctgatta

SEQ ID NO: 137348 - DNA, 1116 bp, Artificial Sequence
  derived and/or modified sequence
atgtccatgagcccaaaacatactacccctttttccgtgtcagacatactctcccccctagaagaatcctataagaaagtcggaatggagggaggtggtctgggggcaccgctggctgcctatcggcagggccaggcggctcctcccacagcggctatgcaacagcacgccgttggccaccatggggctgtgaccgcagcatatcatatgaccgctgccggagtcccacagctgtcccactccgccgtggggggttattgtaacggtaacctgggaaacatgagcgagcttccaccttaccaggacacgatgagaaactctgcttcgggtcccggatggtacggggctaacccggaccccagattccccgctatctcacggttcatgggtcccgcatccggaatgaacatgtctggcatggggggtttggggagcctgggggatgtttccaagaacatggcacctctgccctccgcaccccgaaggaaacggcgtgtgctcttttcacaggcccaggtttacgagctggaacgccgttttaaacagcagaaatatcttagtgcaccagagagagagcatctggcctcaatgatccatttgacacctacccaagttaaaatatggttccagaaccatcggtacaaaatgaaacggcaggctaaggataaagcggctcagcagcagttacagcaggactccgggggagggggaggagggggagggactgggtgtccacaacagcagcaggcgcagcagcaaagcccccgtagagtcgccgtgcctgtgctcgtgaaggacgggaagccctgccaggccggagcacctgcgcctggagcagcttcactgcaggggcatgcacaacaacaggcccagcaccaggctcaggcagctcaggcagctgcagctgcaatcagcgttggaagcgggggtgccggacttggggctcatcccggacatcaacctggttctgccggacagtcccctgatttggctcaccatgctgcatctcctgccgcactgcaagggcaggtaagcagtttaagccaccttaactcatccggttccgactacgggaccatgagttgtagtactctgctgtacggacgaacctggtag

SEQ ID NO: 137349 - DNA, 1116 bp, Artificial Sequence
  derived and/or modified sequence
atgagtatgtcaccaaagcatactacccccttcagtgtgtccgatattctgtctccacttgaagagagttataaaaaggtgggaatggaaggaggcggactgggagcacctctggccgcttaccggcagggtcaggccgctcccccaactgcagccatgcagcagcatgcagttggccaccacggcgcagttactgccgcataccacatgactgccgctggggtcccccagctctcgcactccgcagtgggagggtattgtaacggcaaccttggcaacatgtccgaactgcctccctaccaggataccatgaggaattccgcatccggacccggttggtatggggctaaccctgatccaaggttccccgcaatttccagattcatggggccagctagcggcatgaatatgagcgggatggggggtcttggatcgctgggggacgtgtctaagaacatggcgcctctgccatcagccccacgacgtaagcgcagggtgctcttttctcaggcccaggtatacgagcttgagcgccgtttcaagcagcagaagtacctttcagcccctgaacgagagcacctggctagtatgatccacttgacaccaacccaagtgaagatttggttccagaaccaccgctacaaaatgaaacgccaggcaaaggataaggctgcgcaacagcaactgcagcaggactccggcggagggggtggagggggaggcaccggatgcccacaacaacagcaagcccagcaacagtccccaagaagggtggccgtgccagttctggtgaaggacgggaagccctgccaggcaggcgctccagcgccaggggctgccagtttacaggggcacgctcagcagcaggcccagcatcaggcccaggcggctcaggctgccgctgcggctatttccgtgggaagcgggggtgcagggctgggggcacatcctgggcatcagcctggcagcgctggccagtctcccgaccttgcccaccatgcagccagtccggcagccctgcaggggcaggtgagttcattgtcacacttgaactcctctgggtctgattatggcaccatgtcttgctcaaccctcctgtacggcagaacatggtag

SEQ ID NO: 137350 - DNA, 1116 bp, Artificial Sequence
  derived and/or modified sequence
atgtctatgtccccaaagcatacaactccattctcagtcagcgacatcctttcgccactggaggaatcctacaaaaaagtcgggatggaggggggaggccttggtgcccctctagcagcctacagacagggccaggctgccccacctactgccgctatgcagcagcatgcagtcggccaccacggcgctgttaccgcggcataccacatgaccgccgcaggagtacctcagctctcccacagcgctgtgggcggatattgcaatggaaatctgggcaatatgtcagagctgcccccataccaggatactatgagaaatagcgctagcgggcctgggtggtacggtgctaatcccgaccctcgcttccctgcaatctcccggtttatggggccagcttccgggatgaatatgtccggaatgggaggcttgggatccctgggggacgtcagtaagaacatggcacccctccctagcgcaccaagaaggaaaaggcgggtgctgttttcccaggcacaggtgtatgagcttgaaaggcggttcaaacaacagaaatatctcagcgcccctgagagagagcacctggcttctatgattcatctgacccctacccaggttaaaatctggttccagaaccatagatacaaaatgaagaggcaggccaaagataaggcagcccagcaacagttgcagcaggactctgggggtggcggaggaggtggagggacgggttgccctcagcagcaacaagcacaacagcaatcaccccgaagagtagccgtacccgtcctcgtgaaagacggtaagccatgtcaggcaggtgccccagcaccgggtgctgccagtcttcagggccatgcccagcagcaagcccagcaccaggctcaggccgcacaagccgcagcagcggctatcagcgtcgggagcggaggagcgggacttggcgctcaccctggtcatcagcccggtagcgctggccagtcacccgatctggcccatcatgccgcttcccctgccgcactgcagggccaggtttcttctctcagccacttgaactcgagcggaagcgattatggcaccatgtcatgctccacactcctttacggcaggacatggtag

SEQ ID NO: 137351 - DNA, 544 bp, Artificial Sequence
  derived and/or modified sequence
aacaacaaaagccaagccaaaagccaaaacaaacaaatccagccaaatcaatcattgagaaacaataatattaataaaatccaaaactaaatcaaaccaatcaaggcaccaagacgcaggggggatatccacagttcgatcaaggttgacgatgtgtcacactgtgtaagggaatcgcatggagatgggcattccgaactgttaatggggacatgggactccagttgtctctgatcacttgtgtggattttcctggcgtagaacgacagaagccgctagtaagtcgccaagacctacagcaggaattctgcaccaaagcttaaaaaagtgaggaggaagtaaatgctaaattattcatgagcctcatttgacagcacatcagaaggggaagtgtcaggggttttataaagggcataaaatcttgttattttaatttgcatctgggagaatgtctgagcaaggagacctgaatcaggcaatagcagaggaaggagggactgagcaggagacggccactccagagaacggcattgttaaatcagaa

SEQ ID NO: 137352 - DNA, 1122 bp, Artificial Sequence
  derived and/or modified sequence
gtggtgcccgagaagaaggtgcccctggtggtgcccaagaagcccgaggccccccccgccaaggtgcccgaggtgcccaaggaggtggtgcccgagaagaaggtggccgtgcccaagaagcccgaggtgccccccgccaaggtgcccgaggtgcccaagaagcccgtgctggaggagaagcccgccgtgcccgtgcccgagagagccgagagccccccccccgaggtgtacgaggagcccgaggagatcgcccccgaggaggagatcgcccccgaggaggagaagcccgtgcccgtggccgaggaggaggagcccgaggtgcccccccccgccgtgcccgaggagcccaagaagatcatccccgagaagaaggtgcccgtgatcaagaagcccgaggcccccccccccaaggagcccgagatgcccaagaaggtggtgcccgtgaagaaggtgcccaccgtgaagaagcccgagacccccgccgccaaggtgcccgaggtgcccaagaagctggtgcccgtgaagaaggagcccgtgcccgtgaccaagaagcccgaggtgctgcccgagaaggtgcccaaggtgcccgagaagatcatccccgagaaggaggtgagcgtgcccatccccgccgagcccgaggtgccccccgccgaggtggaggagacccccgaggagatcatctacgaggagaaggccagcatcaccatcggcagaaaggagaccccccccgtggaggagagagagatcgagaagtacatcaagcccgaggagcccgagcccgagccccagcccgaggagatccccgtgaaggagcccgagcccgagaaggtgatcgagaagcccaagctgaagcccagaccccccccccccccccccgccccccccaaggaggacgtgaaggagaagatcttccagctgaaggccatccccaagaagaaggtgcccgagaagccccaggtgcccgagaaggtggagctgacccccctgaaggtgcccgagccccccccccccaagcccgtggaggaggtggaggtgcccaccgtgaccaagagagagagaaagatccccgagcccaccaaggtgcccgagatcaagcccgccatccccctgcccgcctag

SEQ ID NO: 137353 - DNA, 1122 bp, Artificial Sequence
  derived and/or modified sequence
gtggttccagaaaagaaagtgccactggtggttcccaaaaagcccgaggcgccacctgccaaggttccggaggtgcccaaagaagtggtgcccgagaaaaaggtggcagtcccaaagaagcccgaggtgccaccagccaaagtgccagaagtgcctaagaaacccgtcctggaagagaaaccagcagtccccgttccagaacgggccgagagtccgcctccagaagtgtacgaggagccagaggaaatcgcacctgaggaagaaatcgcgcccgaggaagaaaagccagtgccggtcgctgaagaggaggagccagaagtcccccctcccgctgtgcccgaagaacctaagaagattattccggagaaaaaagtaccggttatcaagaagccagaggctcctcctccaaaggagccagaaatgccaaaaaaggtggttccggttaagaaagttccaaccgtgaagaagccggaaacccccgcagcgaaggtgcctgaggttccaaaaaaactggtgccagtcaagaaggaacccgtgcccgtcacaaaaaaaccagaggtcctccctgagaaggtgcccaaagtccccgagaagatcatcccggagaaagaggtgagcgtgcctatccccgctgaacctgaggtaccacctgccgaggttgaagaaactcccgaagaaatcatttatgaggagaaggcctccattactatcggccgtaaggagacccctccagttgaagaacgcgaaattgagaagtatatcaagcccgaggagccggagccagaaccccagcccgaggagatccctgtgaaggagccagagcctgagaaagtgattgagaagcctaagcttaagccccgtcctccacctccgccacccgctccccccaaagaagacgtcaaagagaagattttccagctgaaggctattcccaaaaaaaaagtgcccgaaaaaccccaagtgcccgagaaggttgagctgacacccctgaaggtgcctgaacccccaccacctaaacccgtcgaagaggtagaggtccccaccgtgaccaagcgggagaggaaaattcctgagcccactaaagtgcctgagataaagccagctatccctctgcccgcttag

SEQ ID NO: 137354 - DNA, 1122 bp, Artificial Sequence
  derived and/or modified sequence
gtggtgcctgagaagaaggtgcccctggtggtgcccaagaagccagaggcccccccagccaaggtgcctgaggtgcccaaggaggtggtgcctgagaagaaggtggccgtgcccaagaagccagaggtgcccccagccaaggtgcctgaggtgcccaagaagcctgtgctggaggagaagccagctgtgcctgtgcctgagagagctgagagccccccacctgaggtgtatgaggagcctgaggagatcgcccctgaggaggagatcgcccctgaggaggagaagcctgtgcctgtggccgaggaggaggagcctgaggtgcccccacctgctgtgcctgaggagcccaagaagatcatccctgagaagaaggtgcctgtgatcaagaagccagaggcccccccacccaaggagcctgagatgcccaagaaggtggtgcctgtgaagaaggtgcccaccgtgaagaagccagagaccccagctgccaaggtgcctgaggtgcccaagaagctggtgcctgtgaagaaggagcctgtgcctgtgaccaagaagccagaggtgctgcctgagaaggtgcccaaggtgcctgagaagatcatccctgagaaggaggtgtctgtgcccatcccagctgagcctgaggtgcccccagctgaggtggaggagaccccagaggagatcatctatgaggagaaggccagcatcaccatcggcaggaaggagaccccacctgtggaggagcgggagattgagaagtacatcaagccagaggagcctgagcctgagccccagcctgaggagatccctgtgaaggagcctgagcctgagaaggtgattgagaagcccaagctgaagccccggcccccacctcctcctccagccccacccaaggaggatgtgaaggagaagatcttccagctgaaggccatccccaagaagaaggtgcctgagaagccccaggtgcctgagaaggtggagctgacccccctgaaggtgcctgagcccccaccacccaagcctgtggaggaggtggaggtgcccaccgtgaccaagcgggagaggaagatccctgagcccaccaaggtgcctgagatcaagccagccatccccctgcctgcctag

SEQ ID NO: 137355 - DNA, 1122 bp, Artificial Sequence
  derived and/or modified sequence
gtggtgcccgagaagaaggtgcccctggtggtgcccaagaagcccgaagcaccaccagccaaagttcccgaggtcccgaaagaggttgtgccggagaaaaaggtcgcagtcccaaagaagcctgaggtgccgccggccaaggtacctgaggtaccaaagaaacctgtcctcgaggaaaaacctgccgtccccgtgcctgagcgagccgagagtcccccccccgaggtctacgaggagcccgaagagatcgctcctgaagaggagatagcacccgaagaagagaaacctgtccctgttgccgaagaagaggagccagaagtgcctcccccagctgtcccagaagagccaaagaaaatcatcccggaaaaaaaggttccggtcatcaaaaagcctgaagctccacccccgaaagagccagagatgccgaaaaaagtggtgcccgtgaaaaaagtccctactgtcaagaaacctgaaacaccagccgcaaaagtgcccgaggtacctaagaagctcgtccctgtcaagaaggaaccggtccccgttaccaaaaagcccgaggttttaccagagaaagtgcccaaagtccctgaaaagatcattccagagaaagaagtatctgtcccaatcccggctgagccagaagtgccccctgccgaggtcgaggaaaccccagaggaaattatctatgaggagaaagccagcattacgatcggccgcaaagaaaccccaccagttgaggaacgcgaaattgaaaaatatatcaagcccgaggagcccgaacctgaaccacagccagaggagatccctgtgaaagagcctgagccagagaaggtgatcgagaaaccaaagctgaagccccggccgcctcctccacctcctgcaccacctaaagaggacgtgaaggaaaaaatcttccagcttaaggccatacctaaaaagaaagtccctgaaaagcctcaggtgcccgaaaaagtggaattaacccctcttaaagtgcccgagccacccccgccaaaaccagtcgaagaggtggaagtgcccacagtgacgaagagagaacgaaaaatccccgaacctaccaaagtccctgaaataaaacccgcgattccgctgcccgcatag

SEQ ID NO: 137356 - DNA, 1122 bp, Artificial Sequence
  derived and/or modified sequence
gtagtaccagaaaagaaagtcccactggtcgtgcctaagaagcccgaagcaccacctgctaaagttccagaggtaccaaaagaggtcgtgccggagaagaaggttgcggtgcccaaaaaacctgaagtgccccctgcaaaggtgcctgaggtgcccaagaagccggtgttggaagagaagcccgctgtgccagtgccagagcgggctgaaagcccaccacctgaggtgtacgaagagcccgaagagatcgctccggaagaagaaattgcacccgaagaagagaaacctgtacccgtagctgaagaagaagaacccgaagtccctccgccagccgtgcccgaagaacctaagaagatcatacccgagaagaaggtccccgtaattaagaaacccgaggccccacctcctaaagaacccgagatgcctaagaaagttgtgcccgtgaagaaggtgcctaccgtgaaaaagccagaaacccccgctgccaaagtaccagaggttcccaagaaactggtgccagtgaaaaaagaacccgtgccggtcaccaagaaacctgaagtgcttcctgaaaaggttccgaaggtgccagagaagataatacctgaaaaggaagtatctgttcccattcctgctgagccagaggtgccgcctgctgaagtggaagagacgcccgaagagattatctacgaggagaaggcctccatcaccatcggaagaaaggaaactccccctgtagaagagcgggagattgaaaagtatattaaaccagaggagccggagccggaaccacagcccgaggaaattcctgtaaaggaaccagaaccagaaaaagtcattgagaagccaaagttaaagcccagaccgccacctcccccaccggcaccaccaaaggaggatgtgaaagagaagatcttccaattaaaggcaattcccaagaaaaaggtccccgaaaagcctcaggtgccagagaaggtagagctcaccccattaaaagtgcccgagccaccacctccgaaacctgtcgaggaagtcgaggtccctaccgtgactaagcgagaacggaagataccggaacccaccaaagtgcccgagatcaaaccagcgattccactcccggcttag

SEQ ID NO: 137357 - protein, 561 aa, Artificial Sequence
  derived and/or modified sequence
MGARTPLPSFWVSFFAETGILFPGGTPWPMGSQHSKQHRKPGPLKRGHRRDRRTTRRKYWKEGREIARVLDDEGRNLRQQKLDRQRALLEQKQKKKRQEPLMVQANADGRPRSRRARQSEEQAPLVESYLSSSGSTSYQVQEADSLASVQLGATRPTAPASAKRTKAAATAGGQGGAARKEKKGKHKGTSGPAALAEDKSEAQGPVQILTVGQSDHAQDAGETAAGGGERPSGQDLRATMQRKGISSSMSFDEDEEDEEENSSSSSQLNSNTRPSSATSRKSVREAASAPSPTAPEQPVDVEVQDLEEFALRPAPQGITIKCRITRDKKGMDRGMYPTYFLHLDREDGKKVFLLAGRKRKKSKTSNYLISVDPTDLSRGGDSYIGKLRSNLMGTKFTVYDNGVNPQKASSSTLESGTLRQELAAVCYETNVLGFKGPRKMSVIVPGMNMVHERVSIRPRNEHETLLARWQNKNTESIIELQNKTPVWNDDTQSYVLNFHGRVTQASVKNFQIIHGNDPDYIVMQFGRVAEDVFTMDYNYPLCALQAFAIALSSFDSKLACE

SEQ ID NO: 137358 - DNA, 6432 bp, Artificial Sequence
  derived and/or modified sequence
cttgaggattcagtctggtcctgaagggtttggggggagactgcgaccagaagatgtttccatgtcctaattaatgggtgatggtggttgttagtctgactgttgccacggtgatgaagggagacatccaagtgctggtttcagtactgaggcgaatacagggaatttcaacaggctccaggtcttactatgcagcctgaagtgggaccatcccttaaacccactccatcctgtggccacgatgggggccaggacacctttgccttctttctgggtttctttctttgccgagacagggattttgttcccaggaggcactccctggcccatgggatctcagcattcaaagcagcacaggaaacctgggcccctgaaacggggccaccgaagagatcggagaacaaccaggaggaagtactggaaggaaggaagggagatcgctcgtgtcttagatgatgagggcagaaacctgaggcagcagaagcttgatcggcagcgggccctgctggagcagaagcagaagaagaagcgccaggagcccctgatggtgcaggccaatgcagatgggcggccccggagccggcgggcccggcagtcagaggaacaagcccccctggtggagtcctacctcagcagcagtggcagcaccagctaccaagttcaagaggccgactcactcgccagtgtgcagctgggagccacgcgcccaacagcaccagcttcagccaagagaaccaaggcggcagctacagcagggggccagggtggcgccgctaggaaggagaagaagggaaagcacaaaggcaccagcgggccagcagcactggcagaagacaagtctgaggcccaaggcccagtgcagattctgactgtgggccagtcagaccacgcccaggacgcaggggagacggcagctggtgggggcgaacggcccagcgggcaggatctccgtgccacgatgcagaggaagggcatctccagcagcatgagctttgacgaggatgaggaggatgaggaggagaatagctccagctcctcccagctaaatagtaacacccgccccagctctgctactagcaggaagtccgtcagggaggcagcctcagcccctagcccaacagctccagagcaaccagtggacgttgaggtccaggatcttgaggagtttgcactgaggccggccccccagggtatcaccatcaaatgccgcatcactcgggacaagaaagggatggaccggggcatgtaccccacctactttctgcacctggaccgtgaggatgggaagaaggtgttcctcctggcgggaaggaagagaaagaagagtaaaacttccaattacctcatctctgtggacccaacagacttgtctcgaggaggggacagctatatcgggaaactgcggtccaacttgatgggcaccaagttcactgtttatgacaatggagtcaaccctcagaaggcctcatcctccactttggaaagtggaaccttacgtcaggagctggcagctgtgtgctacgagacaaacgtcttaggcttcaaggggcctcggaagatgagcgtgattgtcccaggcatgaacatggttcatgagagagtctctatccgcccccgcaacgagcatgagacactgctagcacgctggcagaataagaacacggagagtatcatcgagctgcaaaacaagacacctgtctggaatgatgacacacagtcctatgtactcaacttccatgggcgcgtcacacaggcctccgtgaagaacttccagatcatccatggcaatgacccggactacatcgtgatgcagtttggccgggtagcagaggatgtgttcaccatggattacaactacccgctgtgtgcactgcaggcctttgccattgccctgtccagcttcgacagcaagctggcgtgcgagtagaggcctcttcgtgccctttggggttgcccagcctggagcggagcttgcctgcctgcctgtggagacagccctgcctatcctctgtatataggccttccgccagatgaagctttggccctcagtgggctccctggcccagccagccaggaactggctcctttgcctctgctactgaggcaggggagtagtggagagcgggtgggtgggtgtgaagggatgagaataattctttccatgccacgagatcaacacacactcccacccttggggtagtagtgtgttgtagtcgtacttaccaagctgagcaacctcttcagctgggaaggccgcaagaggcatagagggagaggaagcacactgcagggctgctgtggcccagtcgtccgctcagccaaggagtcagatggcaatgggtactccagcaggtaggggcacagtgaatgtgtgtatgtatgaaggccacatcaactttatgtagcaaagggcttggtggccaagcctggcccttaaacaactgcagaaagcccttcaacttcagaaggcctcactcaagcctgagagaagttgggagggtggtggggacaggtaagtggcaggaccctgtcaggattgcaggtgcctggcttgctgtggctatgggaatcagctggtggctaggtttctagcgcatttgatttctccaggtttgctgtgtctcacagaggcagtaggaacccagctctcagggctgtcttggtggatgggccctgcaagacacaggctcagcatgcagaagtgcatgaacagggtccctggatcagggttgttctgggagtcctgtcagcttccccaggagctctctgctgagcagcccagcacaacccccaggaaacacaaatggggtccaggtcaccagcctgactgcacacagctaggcatgcctgggaatcctgctgccagagaaccattcccaagccatggcatgctccttgaagaatctctcctctctctctctctctggaaagacccaactttctcactgctgtcagccaagtcatggttggtaaccatgtaggttcttgggagggaatgggacagggtgaataaagcagggaatattttagaaccacaagagatcagcagtggcaggacccttaggaatctagtacaaccttgttgctttaggtgagtcacactcagaaaatggggcttgccctgggtcacctagctggttaatggcagcattcagaacttcaagttctcttgatttctttgttcccactgtcccccaagaaactagtatctctggcctcctgggggcccattctgcatgccctccccacttcccccgattcagagacttagaagcatcagagttgataaattagattgaaaccattccagtaggaaatcaggcagttccctgttgaaagttgtctggctttttgcacgtgagtatgatccaggattggcctgtgtctggcccctccgcgagggctactcagcagtaagcaggccttagtacggctgctgcacacttctcggtctaggtgggagagagtgcataaaggttctggggctgggcctgagcctaactccctccactaccgctatttctccttggatggcaccatccaccctgcaggcttgggaactgtaagctcaagcttttgctcatttgtcatttaccctggtggaggcttcttgcccagatagagatctgaaattggtgggaagcaagcaggggtcgtaccttgctttagagtagatgtttggaaaagctaagtagaaattttttaaaatagaagttgtattttaaacgtgttaggctttataggtgaaggacttgttttgacttaagtagaagtaatatgctctcatttctttgtaatctagattttcctatgttgaatgcttaaagcaaggcatacctgtcctagcaggatctgcccacacctcggccgtacatctctgtgagagaccccctccaacgattagcttttgcaacatggtccagtttctagagggcactagaactttgtgccagcgctggcgagataccatggtgccatcctcctttctatagttccagtttagcccttccctgcctttaaggagaagagatcttcatggtgacatttgagatgatggaaactagatcgtctctaatgttaggtcaagctatttctctggatctatgattttaagatagaacaggctggttctgagttctggtgagacggagaccccggtggcagtggaaaaatcagaagcacaaaggaaaactcttggcctctgctttctcctgtagcacaaagagggagttggctggatcttttggtggagtcaggaaagacaggctgagctttctagcctaagtgtggagaaggatagcctcagccacaaaactctgtcaggcattgaatgacaagcatcagtagctgagtgcactcctggtgatcctggttttccttgaccactggccctggggccatgggtgcatggactcgtaaagctgctagggcccctagaaaccacctgggttcagcctctcccacaataagagttcttgcccttcataccctctacctggatggatggtctttgggcagggaattaatgacagaatgagcagtccctaatggtattgggcagttgggagtgagtttaggcagcttctctgtaaccgcttctggggccacaccccaaaactctacaccctctgccccagaacaattctgcagagtggtgaagttcacttccccaactcttctccaagtctagctttcctttccttctggctccaaggtgctctgtgtccgtctgtgtatgtgtgtgtctgtgcgtctgtgtgtttatttggggaaaagggcaatcagcaatcaactgaggtttcttaattgtgattatattcctgagaatgaatgagtaggaaaggaataaggatgttgttatgatcgcctgtggattttgtccattcatctcatgctctctgaacagaaggtatacctgggaagataccagctttttctctcagggttctgagtcagaggacaccatccaagaatgttgttagcttttcagttcccgctctgcattgcctgaaaaaactggtatgttgcacgtatgcttttggttgaaattgaacatactctagtgaatgtgccttaaaaatcaagacactagttcagaggaagcacataatgtccagatctatggcgaacacaggtgttggaagccaggactgtgataatcagaagctataagagaactttcggagcctgcctccttcagtgacaagtagggcacaaaattctagaagcagaaggttgtttttttttttttttctccattctgaaaatagcaggacatttacctcttaaataaacttagcatttagaggtaattctaaatttaacaagtgacagggttggtttcaaagaaaaaggtccatgctttgcttacaatggagtctgcagtgaggggagatgctgggatagccatttccatggctctgttatgcaagcacaaatttcatctcctagatggacttcctggttttctcttactgcagtaacactggccttcccttctctaattccttaccccagctgcggcatccctgtgttaactcaggatgccaagtggccctcagattacacttctccagatagctgaatgagtctgctttcactgtgactgggacctgaatgacctgcagtcagggcccagagttgggactctatactaccctgggctctggtctgtaggtttgtagtagccaccggtaataagccaagggctaggctcttgtttgagtttatggccacctggaattttcagtcatctcatgatacaggcgggaggggcagaacagatagattacgacaggtttggtttttaaattttccaaccaagtggaaaggcaagttggtcttatagaaagcactactgcacttagtagctatgtgattttgagcaaaccacataatctctctaggtccattttcctaaccacaagataaagatgttacattgtcaaagcttgccgtaggatttggggtgaatgaaaattattccttgctttcatcactacctttatagctctcatcactacctttatagctcatcactgtgcctttttttctttcctaagaaagacatcacatccctctcctctcctcctctgtgctcctgtccctccctccccctagcaaggtccaggcaaagctggagatgaggctgagatccagagtttcctagaacgcaacttaggatggctaggaaagggaagcctgactgctcggtcaggagggtgcagtatctcttgctgggaacacagccagttttcacaatgcctagactgtgtatgtctatttgcacaagattgtcttttcctattttggagtggtcagacattttatttttgttcaagattatctggcgttttagacaaatttgcaaaactgtgcttttattgactttttgaataaactttggtattctggaaaaaaaaaaaaaaaaaa

SEQ ID NO: 137359 - DNA, 1686 bp, Artificial Sequence
  derived and/or modified sequence
atgggggctcggacacccctcccaagtttctgggtttctttctttgctgaaacaggaattctttttccagggggaacaccctggcccatgggatcgcagcactccaagcaacacaggaaacccggtcctcttaagaggggacatcgtagagatagacggaccaccaggaggaaatactggaaggaggggagagaaatcgctagagtgctggacgacgagggacgtaacctcaggcagcagaaactggacaggcagcgagctctgctggaacagaagcagaaaaagaagcggcaggaacccctgatggttcaggccaatgctgatggaaggcctcgctccaggcgcgctcgccaaagtgaggagcaggcaccccttgtggaatcctacttgagctcgtcgggctccacctcttatcaagtgcaagaggcagattcactcgctagtgtgcagcttggcgctaccagacccacagctccggctagcgctaagaggaccaaggcagctgctacagctggagggcagggaggcgctgcccgaaaagaaaagaaaggaaaacataaaggcacttcagggccagctgctctggccgaggataaatctgaagctcaaggacctgtacaaatacttactgttggccagtccgaccatgcccaggatgccggagagacagcggctgggggaggagagcgacccagcgggcaggatttgagggccaccatgcagcgcaagggcatctctagttctatgtcattcgatgaagacgaagaggatgaggaggagaattctagtagctcctctcaacttaacagtaataccaggcccagttccgctacctctagaaagtcggttcgcgaagccgcaagcgctccatcccccacagcgcctgagcagccagtcgatgttgaggttcaggacctagaggaattcgccttacggcctgcaccgcagggtattaccataaagtgccgtatcactcgtgataagaagggcatggacagggggatgtatcctacctacttcctacatctggatcgtgaagatgggaagaaggtgtttttgctggccggacggaagcggaagaagtccaaaacgtctaattacctgatcagcgtggaccctaccgacctcagcaggggcggagactcttacattggcaaactacgttcgaatctcatggggactaaattcactgtgtacgacaacggtgtgaacccgcagaaagcttcatcaagtactctggagtctggaacgctccgccaagagctcgccgcagtgtgttacgagacaaatgtgctgggctttaagggccctcggaagatgtcggtaattgtgccaggaatgaatatggtgcacgaacgagtctctatccgcccacggaatgagcacgagacattgctcgcaaggtggcagaataagaataccgaaagcatcattgaactccaaaacaaaactccagtgtggaacgatgacacgcagtcctatgtcttgaattttcacggccgtgtgacacaggcctcggtgaaaaattttcaaattatccacggcaatgatcctgattatatcgtgatgcagttcggtcgtgttgctgaagacgtctttaccatggattataattacccgctgtgtgctctccaggctttcgccatcgctctgtcaagctttgactcaaaattggcctgcgagtag

SEQ ID NO: 137360 - DNA, 1686 bp, Artificial Sequence
  derived and/or modified sequence
atgggggcgcgtacaccactcccgtctttttgggtgagttttttcgcagagaccggaattctttttcctggaggcacgccatggcctatgggatcacaacactccaagcaacaccggaaacctgggcctctgaagcgaggacatcggagagacaggaggacaacacgcagaaaatactggaaagaaggccgcgaaatagcaagagtcttggacgatgagggccggaacctgagacagcagaagttagacaggcaacgagccttgcttgagcaaaaacagaagaagaagcggcaggagcccctgatggtacaggccaacgcagacgggcggccccgctccaggcgagcccgtcaatccgaagagcaggcgccgctggttgaaagttacctcagcagctccggatctacatcttaccaggtgcaggaagcagactcactcgcaagcgtacagcttggcgctactcgtcccacagctcctgcatccgcgaagcgcacgaaggcagctgcaacagcgggcgggcaaggcggagccgcccgtaaggagaagaaaggtaagcacaagggcacgtctgggccagctgctctcgcagaggacaagtctgaagcccagggaccagtccagatcctgactgtgggccaatcagatcacgcccaggacgccggggaaactgctgcgggggggggagagcgcccctctggccaggacctccgcgccaccatgcaacgcaagggaatcagctcatcaatgtcatttgacgaagacgaggaggatgaggaggagaatagcagcagctcctcccaactgaattcgaatacccgtccttcctccgcaacaagtaggaaaagtgttagggaggctgcttctgctcctagccccactgctcctgagcagcctgttgatgttgaggttcaagacctggaggagttcgcgttaaggcctgctccacaggggatcacaattaaatgcagaattacaagggataaaaaaggaatggaccgcggcatgtaccctacgtatttcctccacttggaccgcgaagacggaaaaaaagtatttctcctggccggcagaaaacgtaaaaaaagcaagacctctaactacctgatatctgttgaccctaccgacctgtcaagaggcggagattcttacatcggcaaactacgatccaaccttatgggcactaagttcaccgtctatgataacggcgtaaaccctcagaaggcttcttcgagcacgctcgagagcggtacgttacgccaggagctcgccgccgtgtgttacgagactaatgtgttgggctttaaaggtcccagaaagatgtcagttattgtgcctggaatgaacatggtgcacgaacgcgtttccatccgacctcgcaatgagcacgaaactcttttggctaggtggcagaataagaatactgagtctatcattgagctgcagaacaagactccagtgtggaatgacgacactcagagttacgtcttgaatttccatggcagagtgactcaagcatccgttaagaacttccagattattcacggtaatgatcccgactacattgtgatgcaatttggccgcgttgcggaagatgtgtttactatggattacaactaccctttatgcgctttacaagcgtttgctattgcattaagctccttcgattctaagctggcttgcgagtag

SEQ ID NO: 137361 - DNA, 1686 bp, Artificial Sequence
  derived and/or modified sequence
atgggggcaaggactccactaccatccttttgggtgagcttttttgcagaaacagggattcttttcccaggtggaacgccatggcccatgggctcccaacacagcaagcaacatagaaaacctggtccactgaaaaggggccatcggagagaccgtaggacaacccggcgcaaatactggaaggagggacgtgaaattgcccgcgtactggacgacgaagggcggaatttgagacagcagaaactagatcggcagagggcccttttggagcagaagcagaagaagaagagacaagagccgttgatggtgcaggctaatgcagacgggcggcctcgaagtcgaagagctaggcagtcagaagaacaggcacctctggtggagagttacttgtcctctagtgggagcacgtcttatcaggtacaggaagccgacagtttagccagcgtccagctcggtgctactcgtcctacagctcccgcctcggccaaacggaccaaagctgccgcaacagcaggaggccagggcggcgccgcacggaaagaaaagaaagggaaacataaaggaacctcaggcccagccgccctcgcagaagacaaaagtgaagcccagggccccgtccaaatcctgactgtcggacaatccgaccatgcgcaggacgcaggtgagaccgccgcaggtggtggcgaacgaccttctggccaggatctgagagcaacaatgcagcgaaaagggatcagttccagcatgtcctttgatgaggatgaggaggatgaagaagagaatagctctagttctagtcaactgaattcgaatacccgcccaagctccgcaacatcccgaaaatctgtcagggaggccgcttctgcaccttctccaaccgccccagaacagcccgtggacgttgaggttcaagacctggaggagttcgcgttaaggcctgctccacaggggatcacaattaaatgcagaattacaagggataaaaaaggaatggaccgcggcatgtaccctacgtatttcctccacttggaccgcgaagacggaaaaaaagtatttctcctggccggcagaaaacgtaaaaaaagcaagacctctaactacctgatatctgttgaccctaccgacctgtcaagaggcggagattcttacatcggcaaactacgatccaaccttatgggcactaagttcaccgtctatgataacggtgtgaacccccaaaaagcctcttcatcgactttagagagcggaacgctgagacaggaattggcagctgtctgttatgaaactaatgtactcggcttcaaaggcccacggaaaatgagcgtgatcgtccccggcatgaatatggtccacgagcgggtatctatcaggcctcgcaatgagcacgagacgctcttggcacgttggcaaaacaagaacactgagagtattatagaacttcaaaataagacaccagtatggaacgacgatacacagtcttacgtgctgaatttccatggcagagtgactcaagcatccgttaagaacttccagattattcacggtaatgatcccgactacattgtgatgcaatttggccgcgttgcggaagatgtgtttactatggattacaactaccctttatgcgctttacaagcgtttgctattgcattaagctccttcgattctaagctggcttgcgagtag

SEQ ID NO: 137362 - DNA, 1686 bp, Artificial Sequence
  derived and/or modified sequence
atgggcgccagaacccccctgcccagcttctgggtgagcttcttcgccgagaccggcatcctgttccccggcggcaccccctggcccatgggcagccagcacagcaagcagcacagaaagcccggccccctgaagagaggccacagaagagacagaagaaccaccagaagaaagtactggaaggagggcagagagatcgccagagtgctggacgacgagggcagaaacctgagacagcagaagctggacagacagagagccctgctggagcagaagcagaagaagaagagacaggagcccctgatggtgcaggccaacgccgacggcagacccagaagcagaagagccagacagagcgaggagcaggcccccctggtggagagctacctgagcagcagcggcagcaccagctaccaggtgcaggaggccgacagcctggccagcgtgcagctgggcgccaccagacccaccgcccccgccagcgccaagagaaccaaggccgccgccaccgccggcggccagggcggcgccgccagaaaggagaagaagggcaagcacaagggcaccagcggccccgccgccctggccgaggacaagagcgaggcccagggccccgtgcagatcctgaccgtgggccagagcgaccacgcccaggacgccggcgagaccgccgccggcggcggcgagagacccagcggccaggacctgagagccaccatgcagagaaagggcatcagcagcagcatgagcttcgacgaggacgaggaggacgaggaggagaacagcagcagcagcagccagctgaacagcaacaccagacccagcagcgccaccagcagaaagagcgtgagagaggccgccagcgcccccagccccaccgcccccgagcagcccgtggacgtggaggtgcaggacctggaggagttcgccctgagacccgccccccagggcatcaccatcaagtgcagaatcaccagagacaagaagggcatggacagaggcatgtaccccacctacttcctgcacctggacagagaggacggcaagaaggtgttcctgctggccggcagaaagagaaagaagagcaagaccagcaactacctgatcagcgtggaccccaccgacctgagcagaggcggcgacagctacatcggcaagctgagaagcaacctgatgggcaccaagttcaccgtgtacgacaacggcgtgaacccccagaaggccagcagcagcaccctggagagcggcaccctgagacaggagctggccgccgtgtgctacgagaccaacgtgctgggcttcaagggccccagaaagatgagcgtgatcgtgcccggcatgaacatggtgcacgagagagtgagcatcagacccagaaacgagcacgagaccctgctggccagatggcagaacaagaacaccgagagcatcatcgagctgcagaacaagacccccgtgtggaacgacgacacccagagctacgtgctgaacttccacggcagagtgacccaggccagcgtgaagaacttccagatcatccacggcaacgaccccgactacatcgtgatgcagttcggcagagtggccgaggacgtgttcaccatggactacaactaccccctgtgcgccctgcaggccttcgccatcgccctgagcagcttcgacagcaagctggcctgcgagtag

SEQ ID NO: 137363 - DNA, 6420 bp, Artificial Sequence
  derived and/or modified sequence
cttgaggattcagtctggtcctgaagggtttggggggagactgcgaccagaagatgtttccatgtcctaattaatgggtgatggtggttgttagtctgactgttgccacggtgatgaagggagacatccaagtgctggtttcagtactgaggcgaatacagggaatttcaacaggctccaggtcttactatgcagcctgaagtgggaccatcccttaaacccactccatcctgtggccacgatgggggccaggacacctttgccttctttctgggtttctttctttgccgagacagggattttgttcccaggaggcactccctggcccatgggatctcagcattcaaagcagcacaggaaacctgggcccctgaaacggggccaccgaagagatcggagaacaaccaggaggaagtactggaaggaaggaagggagatcgctcgtgtcttagatgatgagggcagaaacctgaggcagcagaagcttgatcggcagcgggccctgctggagcagaagcagaagaagaagcgccaggagcccctgatggtgcaggccaatgcagatgggcggccccggagccggcgggcccggcagtcagaggaacaagcccccctggtggagtcctacctcagcagcagtggcagcaccagctaccaagttcaagaggccgactcactcgccagtgtgcagctgggagccacgcgcccaacagcaccagcttcagccaagagaaccaaggcggcagctacagcagggggccagggtggcgccgctaggaaggagaagaagggaaagcacaaaggcaccagcgggccagcagcactggcagaagacaagtctgaggcccaaggcccagtgcagattctgactgtgggccagtcagaccacgcccaggacgcaggggagacggcagctggtgggggcgaacggcccagcgggcaggatctccgtgccacgatgcagaggaagggcatctccagcagcatgagctttgacgaggatgaggaggatgaggaggagaatagctccagctcctcccagctaaatagtaacacccgccccagctctgctactagcaggaagtccgtcagggaggcagcctcagcccctagcccaacagctccagagcaaccagtggacgttgaggtccaggatcttgaggagtttgcactgaggccggccccccagggtatcaccatcaaatgccgcatcactcgggacaagaaagggatggaccggggcatgtaccccacctactttctgcacctggaccgtgaggatgggaagaaggtgttcctcctggcgggaaggaagagaaagaagagtaaaacttccaattacctcatctctgtggacccaacagacttgtctcgaggaggggacagctatatcgggaaactgcggtccaacttgatgggcaccaagttcactgtttatgacaatggagtcaaccctcagaaggcctcatcctccactttggaaagtggaaccttacgtcaggagctggcagctgtgtgctacgagacaaacgtcttaggcttcaaggggcctcggaagatgagcgtgattgtcccaggcatgaacatggttcatgagagagtctctatccgcccccgcaacgagcatgagacactgctagcacgctggcagaataagaacacggagagtatcatcgagctgcaaaacaagacacctgtctggaatgatgacacacagtcctatgtactcaacttccatgggcgcgtcacacaggcctccgtgaagaacttccagatcatccatggcaatgacccggactacatcgtgatgcagtttggccgggtagcagaggatgtgttcaccatggattacaactacccgctgtgtgcactgcaggcctttgccattgccctgtccagcttcgacagcaagctggcgtgcgagtagaggcctcttcgtgccctttggggttgcccagcctggagcggagcttgcctgcctgcctgtggagacagccctgcctatcctctgtatataggccttccgccagatgaagctttggccctcagtgggctccctggcccagccagccaggaactggctcctttgcctctgctactgaggcaggggagtagtggagagcgggtgggtgggtgtgaagggatgagaataattctttccatgccacgagatcaacacacactcccacccttggggtagtagtgtgttgtagtcgtacttaccaagctgagcaacctcttcagctgggaaggccgcaagaggcatagagggagaggaagcacactgcagggctgctgtggcccagtcgtccgctcagccaaggagtcagatggcaatgggtactccagcaggtaggggcacagtgaatgtgtgtatgtatgaaggccacatcaactttatgtagcaaagggcttggtggccaagcctggcccttaaacaactgcagaaagcccttcaacttcagaaggcctcactcaagcctgagagaagttgggagggtggtggggacaggtaagtggcaggaccctgtcaggattgcaggtgcctggcttgctgtggctatgggaatcagctggtggctaggtttctagcgcatttgatttctccaggtttgctgtgtctcacagaggcagtaggaacccagctctcagggctgtcttggtggatgggccctgcaagacacaggctcagcatgcagaagtgcatgaacagggtccctggatcagggttgttctgggagtcctgtcagcttccccaggagctctctgctgagcagcccagcacaacccccaggaaacacaaatggggtccaggtcaccagcctgactgcacacagctaggcatgcctgggaatcctgctgccagagaaccattcccaagccatggcatgctccttgaagaatctctcctctctctctctctctggaaagacccaactttctcactgctgtcagccaagtcatggttggtaaccatgtaggttcttgggagggaatgggacagggtgaataaagcagggaatattttagaaccacaagagatcagcagtggcaggacccttaggaatctagtacaaccttgttgctttaggtgagtcacactcagaaaatggggcttgccctgggtcacctagctggttaatggcagcattcagaacttcaagttctcttgatttctttgttcccactgtcccccaagaaactagtatctctggcctcctgggggcccattctgcatgccctccccacttcccccgattcagagacttagaagcatcagagttgataaattagattgaaaccattccagtaggaaatcaggcagttccctgttgaaagttgtctggctttttgcacgtgagtatgatccaggattggcctgtgtctggcccctccgcgagggctactcagcagtaagcaggccttagtacggctgctgcacacttctcggtctaggtgggagagagtgcataaaggttctggggctgggcctgagcctaactccctccactaccgctatttctccttggatggcaccatccaccctgcaggcttgggaactgtaagctcaagcttttgctcatttgtcatttaccctggtggaggcttcttgcccagatagagatctgaaattggtgggaagcaagcaggggtcgtaccttgctttagagtagatgtttggaaaagctaagtagaaattttttaaaatagaagttgtattttaaacgtgttaggctttataggtgaaggacttgttttgacttaagtagaagtaatatgctctcatttctttgtaatctagattttcctatgttgaatgcttaaagcaaggcatacctgtcctagcaggatctgcccacacctcggccgtacatctctgtgagagaccccctccaacgattagcttttgcaacatggtccagtttctagagggcactagaactttgtgccagcgctggcgagataccatggtgccatcctcctttctatagttccagtttagcccttccctgcctttaaggagaagagatcttcatggtgacatttgagatgatggaaactagatcgtctctaatgttaggtcaagctatttctctggatctatgattttaagatagaacaggctggttctgagttctggtgagacggagaccccggtggcagtggaaaaatcagaagcacaaaggaaaactcttggcctctgctttctcctgtagcacaaagagggagttggctggatcttttggtggagtcaggaaagacaggctgagctttctagcctaagtgtggagaaggatagcctcagccacaaaactctgtcaggcattgaatgacaagcatcagtagctgagtgcactcctggtgatcctggttttccttgaccactggccctggggccatgggtgcatggactcgtaaagctgctagggcccctagaaaccacctgggttcagcctctcccacaataagagttcttgcccttcataccctctacctggatggatggtctttgggcagggaattaatgacagaatgagcagtccctaatggtattgggcagttgggagtgagtttaggcagcttctctgtaaccgcttctggggccacaccccaaaactctacaccctctgccccagaacaattctgcagagtggtgaagttcacttccccaactcttctccaagtctagctttcctttccttctggctccaaggtgctctgtgtccgtctgtgtatgtgtgtgtctgtgcgtctgtgtgtttatttggggaaaagggcaatcagcaatcaactgaggtttcttaattgtgattatattcctgagaatgaatgagtaggaaaggaataaggatgttgttatgatcgcctgtggattttgtccattcatctcatgctctctgaacagaaggtatacctgggaagataccagctttttctctcagggttctgagtcagaggacaccatccaagaatgttgttagcttttcagttcccgctctgcattgcctgaaaaaactggtatgttgcacgtatgcttttggttgaaattgaacatactctagtgaatgtgccttaaaaatcaagacactagttcagaggaagcacataatgtccagatctatggcgaacacaggtgttggaagccaggactgtgataatcagaagctataagagaactttcggagcctgcctccttcagtgacaagtagggcacaaaattctagaagcagaaggttgtttttttttttttttctccattctgaaaatagcaggacatttacctcttaaataaacttagcatttagaggtaattctaaatttaacaagtgacagggttggtttcaaagaaaaaggtccatgctttgcttacaatggagtctgcagtgaggggagatgctgggatagccatttccatggctctgttatgcaagcacaaatttcatctcctagatggacttcctggttttctcttactgcagtaacactggccttcccttctctaattccttaccccagctgcggcatccctgtgttaactcaggatgccaagtggccctcagattacacttctccagatagctgaatgagtctgctttcactgtgactgggacctgaatgacctgcagtcagggcccagagttgggactctatactaccctgggctctggtctgtaggtttgtagtagccaccggtaataagccaagggctaggctcttgtttgagtttatggccacctggaattttcagtcatctcatgatacaggcgggaggggcagaacagatagattacgacaggtttggtttttaaattttccaaccaagtggaaaggcaagttggtcttatagaaagcactactgcacttagtagctatgtgattttgagcaaaccacataatctctctaggtccattttcctaaccacaagataaagatgttacattgtcaaagcttgccgtaggatttggggtgaatgaaaattattccttgctttcatcactacctttatagctctcatcactacctttatagctcatcactgtgcctttttttctttcctaagaaagacatcacatccctctcctctcctcctctgtgctcctgtccctccctccccctagcaaggtccaggcaaagctggagatgaggctgagatccagagtttcctagaacgcaacttaggatggctaggaaagggaagcctgactgctcggtcaggagggtgcagtatctcttgctgggaacacagccagttttcacaatgcctagactgtgtatgtctatttgcacaagattgtcttttcctattttggagtggtcagacattttatttttgttcaagattatctggcgttttagacaaatttgcaaaactgtgcttttattgactttttgaataaactttggtattctggagcaaa

SEQ ID NO: 137364 - DNA, 1686 bp, Artificial Sequence
  derived and/or modified sequence
atgggggcaaggacccctctgccatccttttgggtgtcgttctttgccgagacagggattctgttcccaggcggaactccatggcctatgggaagccaacattcgaagcagcacaggaaaccaggccctcttaagaggggtcatcggcgtgaccggaggacgacgcgtcgcaaatattggaaagaggggagagaaatcgctcgagtgctggatgacgaagggagaaatctgaggcagcagaagctcgaccggcaacgggccttgttggaacagaagcagaagaagaagaggcaggaacctctgatggtgcaggcaaacgccgacggccgcccgcggtctagacgggctcgacaatctgaggaacaggcgcccctcgtggagtcttacctctcttcttcaggctccacctcctaccaggtacaagaagctgacagccttgcgagcgtgcagttgggtgcaactagaccaacagccccagctagcgctaagagaacaaaagcagcggccaccgccggcggacaaggaggagctgccaggaaagagaagaaaggcaaacacaaggggaccagtggcccggccgctctcgctgaagacaaaagcgaggcccagggcccagttcagatcttgacggtgggccagtctgaccatgcccaagacgcgggcgagactgccgctggtggtggagagaggcccagtggccaggatttgcgcgccacaatgcagcgcaagggtattagttcttccatgtcatttgatgaagatgaggaagacgaggaagaaaacagctctagttccagtcagctgaacagcaacacgcggcccagctccgctacatctcgaaaaagcgtgcgagaagccgcctccgcacctagtcccacagcccctgagcagcctgtagatgttgaggtccaggacctcgaggagttcgcacttcgccccgcaccacagggaatcacaatcaagtgtcgcatcaccagggacaagaagggcatggaccgcgggatgtaccccacatacttcctgcatctggacagagaggatggaaagaaggttttcttgcttgctggcaggaagcgtaaaaagtctaagacatccaactacttaatcagcgtcgatcctacagacttaagccgcgggggtgatagctacatcggtaagttgcgaagcaatctcatgggaaccaaatttacagtatacgacaatggggtcaaccctcagaaggcatcatcctctacgctggagtcgggcaccctgcggcaggagctggccgcggtgtgctacgaaaccaacgtcctcggatttaaagggcccaggaagatgagcgtcattgtgccgggcatgaatatggtacacgagcgggtatctatcagaccacgcaatgaacacgagacactgcttgctaggtggcagaataaaaataccgaaagcatcattgagcttcagaacaaaacccctgtatggaacgatgacactcagtcatatgtcctgaatttccacgggcgggtaacccaagcaagtgtgaaaaattttcagataattcacggaaacgatcccgactacattgtgatgcagttcggacgcgtcgcagaagatgtttttacaatggactacaactatccactgtgcgccttgcaagcgtttgccatcgcactgagttcattcgattcgaagctggcttgcgagtag

SEQ ID NO: 137365 - DNA, 1686 bp, Artificial Sequence
  derived and/or modified sequence
atgggcgcccggacccccctgcccagcttctgggtgtccttctttgctgagaccggcatcctcttccctgggggcaccccctggcccatgggcagccagcacagcaagcagcacaggaagccaggccccctgaagaggggccacagaagagacaggaggaccaccaggaggaagtactggaaggagggccgggagatcgcccgggtgctggatgatgagggcaggaacctgcggcagcagaagctggaccggcagagggccctgctggagcagaagcagaagaagaagaggcaggagcccctgatggtgcaggccaatgctgatggccggcccaggagccggcgggcccggcagagcgaggagcaggcccccctggtggagagctacctgagcagcagcggcagcaccagctaccaggtgcaggaggccgacagcctggcctctgtgcagctgggcgccacccggcccacagccccagccagcgccaagaggaccaaggccgccgccacagctgggggccagggcggggccgccaggaaggagaagaagggcaagcacaagggcaccagcggccctgctgccctggccgaggacaagtctgaggcccagggccctgtgcagatcctgactgtgggccagagcgaccacgcccaggatgctggggagacagctgctgggggcggggagcggcccagcggccaggacctgcgggccaccatgcagaggaagggcatcagcagctccatgagctttgatgaagatgaggaggatgaggaggagaacagcagcagcagcagccagctgaacagcaacacccggcccagcagcgccaccagcaggaagtctgtgcgggaggccgccagcgcccccagccccacagcccctgagcagcctgtggatgtggaggtgcaggacctggaggagtttgccctgcggcctgccccccagggcatcaccatcaagtgccgcatcacccgggacaagaagggcatggaccggggcatgtaccccacctacttcctgcacctggaccgggaggatggcaagaaggtgttcctgctggccggcaggaagaggaagaagagcaagaccagcaactacctgatctctgtggaccccacagacctgagcagaggaggagacagctacatcggcaagctgcggagcaacctgatgggcaccaagttcaccgtgtatgacaatggagtgaacccccagaaggccagcagcagcaccctggagagcggcaccctgcggcaggagctggccgctgtgtgctatgagaccaacgtgctgggcttcaagggccccaggaagatgtctgtgattgtgcccggcatgaacatggtgcatgagcgggtgtccatccggcccagaaatgagcacgagaccctgctggcccgctggcagaacaagaacacagagagcatcatcgagctgcagaacaagacccctgtgtggaatgatgacacccagagctatgtgctgaacttccacggccgggtgacccaggcctctgtgaagaacttccagatcatccacggcaatgaccctgactacatcgtgatgcagtttggccgggtggccgaggatgtgttcaccatggactacaactaccccctgtgtgccctgcaggcctttgccatcgccctgagcagctttgacagcaagctggcctgtgagtag

SEQ ID NO: 137366 - DNA, 1686 bp, Artificial Sequence
  derived and/or modified sequence
atgggcgcccggacccccctgcccagcttctgggtgagcttcttcgcagaaaccgggatactgtttcctggagggacaccttggccaatggggtctcagcactcgaaacagcacaggaagccggggccactgaagcggggccaccgacgcgatagaaggaccacccgaagaaagtactggaaggaggggcgcgaaatcgcccgcgtgctggacgacgaggggcgcaatctcagacagcagaagctggacaggcaaagagcactgctagagcagaagcagaagaagaaacgacaggagcctctcatggtccaggccaacgccgacggacgcccacgctcacggagagcgaggcagtccgaagagcaggcacctctcgtcgaatcttatcttagtagttctggtagtactagctaccaggtgcaggaggccgacagccttgcctcagtgcagctgggggcaactcgccctacagcgccagcttccgccaagcgcaccaaagccgccgctaccgctggggggcaaggtggagcagctcgcaaagagaagaaaggaaagcacaagggcaccagcgggcccgccgcccttgccgaagacaagtccgaggcccaaggacctgtccaaattcttactgtgggacagtcagatcacgcacaagacgccggcgagaccgccgctgggggcggtgagaggcccagcgggcaggatcttagagccaccatgcaacgaaaggggatcagcagttctatgtcttttgacgaagatgaggaggacgaggaggaaaatagctcttctagcagtcagttaaatagtaatactaggcccagtagcgcaaccagcagaaagtcagtacgggaggccgcaagcgccccctccccaaccgctcccgaacagcccgttgatgtggaggtgcaggatctcgaagagttcgcccttcgtccagcccctcaaggaattacaataaagtgtaggataacgagagacaaaaaaggcatggaccgtggcatgtacccaacatactttctgcatctcgatcgggaagacggaaagaaggtttttctgttggcaggaaggaaaaggaagaagagcaaaaccagtaattatctcatatccgttgaccccaccgatctgtcaaggggaggtgactcctatatagggaagttgagatccaatttaatgggaaccaagtttaccgtgtatgataacggtgttaatccccagaaggccagttctagtactcttgagtcggggactctccgacaggaactggctgcagtgtgctatgagaccaatgtcctcgggttcaaggggcccaggaaaatgagtgtcatcgtgcctggaatgaatatggtgcacgagagggttagcatccgaccgcgtaacgaacacgaaactctccttgcccgttggcagaataagaacactgagtctattattgagttgcagaataagacgccagtgtggaatgacgatacacaatcctatgtgctcaattttcacggccgcgttacccaggcttctgtcaagaatttccaaattatacatgggaacgatccagactatatcgttatgcagtttggtcgagtggcagaagacgtcttcaccatggattataactatccactttgtgcgttgcaggcttttgcgatagcactatcctcattcgatagtaaattagcatgcgagtag

SEQ ID NO: 137367 - RNA, 1686 nt, Artificial Sequence
  derived and/or modified sequence
augggggcgcguacaccacucccgucuuuuugggugaguuuuuucgcagagaccggaauucuuuuuccuggaggcacgccauggccuaugggaucacaacacuccaagcaacaccggaaaccugggccucugaagcgaggacaucggagagacaggaggacaacacgcagaaaauacuggaaagaaggccgcgaaauagcaagagucuuggacgaugagggccggaaccugagacagcagaaguuagacaggcaacgagccuugcuugagcaaaaacagaagaagaagcggcaggagccccugaugguacaggccaacgcagacgggcggccccgcuccaggcgagcccgucaauccgaagagcaggcgccgcugguugaaaguuaccucagcagcuccggaucuacaucuuaccaggugcaggaagcagacucacucgcaagcguacagcuuggcgcuacucgucccacagcuccugcauccgcgaagcgcacgaaggcagcugcaacagcgggcgggcaaggcggagccgcccguaaggagaagaaagguaagcacaagggcacgucugggccagcugcucucgcagaggacaagucugaagcccagggaccaguccagauccugacugugggccaaucagaucacgcccaggacgccggggaaacugcugcgggggggggagagcgccccucuggccaggaccuccgcgccaccaugcaacgcaagggaaucagcucaucaaugucauuugacgaagacgaggaggaugaggaggagaauagcagcagcuccucccaacugaauucgaauacccguccuuccuccgcaacaaguaggaaaaguguuagggaggcugcuucugcuccuagccccacugcuccugagcagccuguugauguugagguucaagaccuggaggaguucgcguuaaggccugcuccacaggggaucacaauuaaaugcagaauuacaagggauaaaaaaggaauggaccgcggcauguacccuacguauuuccuccacuuggaccgcgaagacggaaaaaaaguauuucuccuggccggcagaaaacguaaaaaaagcaagaccucuaacuaccugauaucuguugacccuaccgaccugucaagaggcggagauucuuacaucggcaaacuacgauccaaccuuaugggcacuaaguucaccgucuaugauaacggcguaaacccucagaaggcuucuucgagcacgcucgagagcgguacguuacgccaggagcucgccgccguguguuacgagacuaauguguugggcuuuaaaggucccagaaagaugucaguuauugugccuggaaugaacauggugcacgaacgcguuuccauccgaccucgcaaugagcacgaaacucuuuuggcuagguggcagaauaagaauacugagucuaucauugagcugcagaacaagacuccaguguggaaugacgacacucagaguuacgucuugaauuuccauggcagagugacucaagcauccguuaagaacuuccagauuauucacgguaaugaucccgacuacauugugaugcaauuuggccgcguugcggaagauguguuuacuauggauuacaacuacccuuuaugcgcuuuacaagcguuugcuauugcauuaagcuccuucgauucuaagcuggcuugcgaguag

SEQ ID NO: 137368 - RNA, 1686 nt, Artificial Sequence
  derived and/or modified sequence
augggggcaaggacuccacuaccauccuuuugggugagcuuuuuugcagaaacagggauucuuuucccagguggaacgccauggcccaugggcucccaacacagcaagcaacauagaaaaccugguccacugaaaaggggccaucggagagaccguaggacaacccggcgcaaauacuggaaggagggacgugaaauugcccgcguacuggacgacgaagggcggaauuugagacagcagaaacuagaucggcagagggcccuuuuggagcagaagcagaagaagaagagacaagagccguugauggugcaggcuaaugcagacgggcggccucgaagucgaagagcuaggcagucagaagaacaggcaccucugguggagaguuacuuguccucuagugggagcacgucuuaucagguacaggaagccgacaguuuagccagcguccagcucggugcuacucguccuacagcucccgccucggccaaacggaccaaagcugccgcaacagcaggaggccagggcggcgccgcacggaaagaaaagaaagggaaacauaaaggaaccucaggcccagccgcccucgcagaagacaaaagugaagcccagggccccguccaaauccugacugucggacaauccgaccaugcgcaggacgcaggugagaccgccgcaggugguggcgaacgaccuucuggccaggaucugagagcaacaaugcagcgaaaagggaucaguuccagcauguccuuugaugaggaugaggaggaugaagaagagaauagcucuaguucuagucaacugaauucgaauacccgcccaagcuccgcaacaucccgaaaaucugucagggaggccgcuucugcaccuucuccaaccgccccagaacagcccguggacguugagguucaagaccuggaggaguucgcguuaaggccugcuccacaggggaucacaauuaaaugcagaauuacaagggauaaaaaaggaauggaccgcggcauguacccuacguauuuccuccacuuggaccgcgaagacggaaaaaaaguauuucuccuggccggcagaaaacguaaaaaaagcaagaccucuaacuaccugauaucuguugacccuaccgaccugucaagaggcggagauucuuacaucggcaaacuacgauccaaccuuaugggcacuaaguucaccgucuaugauaacggugugaacccccaaaaagccucuucaucgacuuuagagagcggaacgcugagacaggaauuggcagcugucuguuaugaaacuaauguacucggcuucaaaggcccacggaaaaugagcgugaucguccccggcaugaauaugguccacgagcggguaucuaucaggccucgcaaugagcacgagacgcucuuggcacguuggcaaaacaagaacacugagaguauuauagaacuucaaaauaagacaccaguauggaacgacgauacacagucuuacgugcugaauuuccauggcagagugacucaagcauccguuaagaacuuccagauuauucacgguaaugaucccgacuacauugugaugcaauuuggccgcguugcggaagauguguuuacuauggauuacaacuacccuuuaugcgcuuuacaagcguuugcuauugcauuaagcuccuucgauucuaagcuggcuugcgaguag

SEQ ID NO: 137369 - protein, 455 aa, Artificial Sequence
  derived and/or modified sequence
MTTMAAATLLRATPHFSGLAAGRTFLLQGLLRLLKAPALPLLCRGLAVEAKKTYVRDKPHVNVGTIGHVDHGKTTLTAAITKILAEGGGAKFKKYEEIDNAPEERARGITINAAHVEYSTAARHYAHTDCPGHADYVKNMITGTAPLDGCILVVAANDGPMPQTREHLLLARQIGVEHVVVYVNKADAVQDSEMVELVELEIRELLTEFGYKGEETPVIVGSALCALEGRDPELGLKSVQKLLDAVDTYIPVPARDLEKPFLLPVEAVYSVPGRGTVVTGTLERGILKKGDECELLGHSKNIRTVVTGIEMFHKSLERAEAGDNLGALVRGLKREDLRRGLVMVKPGSIKPHQKVEAQVYILSKEEGGRHKPFVSHFMPVMFSLTWDMACRIILPPEKELAMPGEDLKFNLILRQPMILEKGQRFTLRDGNRTIGTGLVTNTLAMTEEEKNIKWG

SEQ ID NO: 137370 - DNA, 1368 bp, Artificial Sequence
  derived and/or modified sequence
atgaccaccatggccgccgccaccctgctgagagccaccccccacttcagcggcctggccgccggcagaaccttcctgctgcagggcctgctgagactgctgaaggcccccgccctgcccctgctgtgcagaggcctggccgtggaggccaagaagacctacgtgagagacaagccccacgtgaacgtgggcaccatcggccacgtggaccacggcaagaccaccctgaccgccgccatcaccaagatcctggccgagggcggcggcgccaagttcaagaagtacgaggagatcgacaacgcccccgaggagagagccagaggcatcaccatcaacgccgcccacgtggagtacagcaccgccgccagacactacgcccacaccgactgccccggccacgccgactacgtgaagaacatgatcaccggcaccgcccccctggacggctgcatcctggtggtggccgccaacgacggccccatgccccagaccagagagcacctgctgctggccagacagatcggcgtggagcacgtggtggtgtacgtgaacaaggccgacgccgtgcaggacagcgagatggtggagctggtggagctggagatcagagagctgctgaccgagttcggctacaagggcgaggagacccccgtgatcgtgggcagcgccctgtgcgccctggagggcagagaccccgagctgggcctgaagagcgtgcagaagctgctggacgccgtggacacctacatccccgtgcccgccagagacctggagaagcccttcctgctgcccgtggaggccgtgtacagcgtgcccggcagaggcaccgtggtgaccggcaccctggagagaggcatcctgaagaagggcgacgagtgcgagctgctgggccacagcaagaacatcagaaccgtggtgaccggcatcgagatgttccacaagagcctggagagagccgaggccggcgacaacctgggcgccctggtgagaggcctgaagagagaggacctgagaagaggcctggtgatggtgaagcccggcagcatcaagccccaccagaaggtggaggcccaggtgtacatcctgagcaaggaggagggcggcagacacaagcccttcgtgagccacttcatgcccgtgatgttcagcctgacctgggacatggcctgcagaatcatcctgccccccgagaaggagctggccatgcccggcgaggacctgaagttcaacctgatcctgagacagcccatgatcctggagaagggccagagattcaccctgagagacggcaacagaaccatcggcaccggcctggtgaccaacaccctggccatgaccgaggaggagaagaacatcaagtggggctag

SEQ ID NO: 137371 - DNA, 1368 bp, Artificial Sequence
  derived and/or modified sequence
atgacaacaatggctgctgccacactgcttcgcgctactccgcacttttccggcctggccgctggccggacttttctgctccagggcctgctccgactgttgaaagccccagccctgccactgctgtgtcgggggttggcagtagaagcaaagaagacttatgttcgcgataaaccccatgtgaatgttgggaccattgggcatgtagaccatggcaagacaaccttgaccgctgcgatcaccaagattctcgccgagggaggtggagcaaaatttaagaagtacgaggagatcgacaacgcccccgaggaacgagcccgcggcatcaccataaatgccgcccacgtggagtacagcaccgctgctcggcattatgcccacaccgattgtccaggccatgccgattacgtgaagaacatgatcacaggaacggcccccctggatggttgtatcctggttgttgccgcgaatgacggccctatgccacagactagggaacacctgttgttggcacgccagatcggggtagaacatgtggtggtctacgtaaacaaggcggatgcagttcaggacagcgaaatggttgaactggtggagctcgagatcagagagctgctgaccgagttcggctataagggtgaagagacaccagtaattgtgggctctgcactgtgtgcacttgagggccgggaccctgaactgggtctcaagagtgttcagaaactcttggacgcggttgatacctacattccagttccagcaagggacctggagaagcccttcctgctcccggtagaagctgtttactctgttcccgggagaggaactgtagttaccggcacgctggaaagggggatactgaagaagggggacgaatgcgagctcctggggcactctaaaaacattcgcaccgttgtgacagggatcgaaatgttccataaaagtttggaacgggcggaggccggagataaccttggcgctcttgtgcgcgggctgaaaagggaggacctgcggcgaggactggtaatggtcaaacctggcagcataaagccccatcaaaaggttgaggcgcaggtgtatatcctctccaaagaggagggtgggcgccacaagcctttcgtctcccacttcatgccagtgatgttttctttgacttgggacatggcctgccgcatcatcctgccaccagagaaggagctggctatgcccggagaggacctcaagttcaatctgatattgcgtcagcctatgattctagagaagggtcaacggtttaccctccgtgacggtaacaggactatcggtaccggcttggtgaccaacactctggcaatgacagaggaagaaaaaaatatcaagtggggctag

SEQ ID NO: 137372 - DNA, 1368 bp, Artificial Sequence
  derived and/or modified sequence
atgaccaccatggccgccgccaccctgctgcgggccaccccccacttcagcggcctggccgccggccgcaccttcctgctgcagggcctgctgcggctgctgaaggccccagccctgcccctgctgtgccggggcctggccgtggaggccaagaagacctacgtgcgggacaagccccacgtgaatgtgggcaccatcggccacgtggaccacggcaagaccaccctgacagctgccatcaccaagatcctggccgagggcggcggggccaagttcaagaagtatgaggagattgacaatgcccctgaggagcgggcccggggcatcaccatcaatgctgcccacgtggagtacagcacagctgcccggcactacgcccacacagactgccccggccacgccgactatgtgaagaacatgatcaccggcacagcccccctggatggctgcatcctggtggtggccgccaatgatggccccatgccccagacccgggagcacctgctgctggcccggcagatcggcgtggagcacgtggtggtgtatgtgaacaaggcagatgctgtgcaggacagcgagatggtggagctggtggagctggagatccgggagctgctgacagaatttggctacaagggggaggagacccctgtgattgtgggcagcgccctgtgtgccctggagggccgggaccctgagctgggcctgaagtctgtgcagaagctgctggatgctgtggacacctacatccctgtgcctgcccgggacctggagaagcccttcctgctgcctgtggaggccgtgtacagcgtgcccggccggggcaccgtggtgacaggcaccctggagcggggcatcctgaagaagggagatgaatgtgagctgctgggccacagcaagaacatcagaacagtggtgactggaattgagatgttccacaagagcctggagagagctgaggccggggacaacctgggcgccctggtgcggggcctgaagcgggaggacctgcggcggggcctggtgatggtgaagccaggcagcatcaagccccaccagaaggtggaggcccaggtgtacatcctgagcaaggaggagggcggccgccacaagccctttgtgagccacttcatgcctgtgatgttcagcctgacctgggacatggcctgccgcatcatcctgcccccagagaaggagctggccatgcctggagaggacctgaagttcaacctgatcctgcggcagcccatgatcctggagaagggccagcgcttcaccctgagagatggcaacagaaccatcggcaccggcctggtgaccaacaccctggccatgacagaggaggagaagaacatcaagtggggctag

SEQ ID NO: 137373 - DNA, 1368 bp, Artificial Sequence
  derived and/or modified sequence
atgaccaccatggccgccgccaccctgctgcgggccaccccccacttctcgggacttgccgccggaagaacctttctcctgcagggcctgttacgcctactcaaggcccccgccctcccgctcctttgccgcggccttgcggtggaggccaagaagacatatgtgagagataagccccatgttaatgtcggaacaattgggcacgtggatcatggtaaaactacattgacggcagccatcactaagatcctggctgaggggggtggggccaagttcaagaaatacgaggagatcgacaacgcgcctgaggaacgtgcacggggaatcacgatcaacgctgcgcacgtggaatacagtacggccgctcggcactacgcgcatactgactgtccggggcatgccgactatgttaaaaacatgataacgggcaccgcccccttagacggttgcatcctggtcgtggccgctaatgatggcccaatgcctcaaactcgcgaacatctgcttttagccagacaaatcggagtcgagcacgtggtggtttacgttaacaaggccgatgctgtgcaggattccgagatggtcgagctcgtggagttagaaatccgggagctgttgaccgaattcggttataagggagaggagacacctgtgatagtgggctcagctctgtgtgcgcttgaggggagggaccctgaactagggctgaaatctgtccagaaattgcttgatgctgtcgatacctatatccctgtacccgcaagagacctagagaagccatttctgctgcccgttgaagctgtatattcagtgcccggcagaggcaccgtggttaccggaactctcgagcgcggtattctgaaaaagggtgatgagtgtgaactactggggcactcaaaaaacattcggacagttgtgaccgggatcgaaatgttccacaaatctctggaacgagctgaggccggcgataatttaggcgccttagtgagagggctgaagcgagaagacctcagacgcgggcttgttatggtgaagcccgggtccataaaacctcatcagaaggttgaggctcaggtctacatcctctccaaagaggaggggggaagacacaaaccatttgtgtctcattttatgccggtgatgttttctctaacttgggatatggcctgtcgcatcatcttaccacctgaaaaagagctggccatgcccggggaagacttgaaattcaacctgattctgcgccaaccaatgattctcgaaaaggggcagaggttcaccctgcgcgatggcaataggacaatcggtactgggctggtgacaaacaccctcgccatgaccgaagaggaaaagaacatcaagtggggatag

SEQ ID NO: 137374 - DNA, 1368 bp, Artificial Sequence
  derived and/or modified sequence
atgaccacaatggccgcagcaaccctgctaagggccaccccgcatttcagtggcctagccgctggcagaacttttctgctgcagggcctgttaaggttgcttaaagcacccgctctccccctactgtgtaggggcctggcggtggaggccaagaagacatatgtgagggacaaaccacatgtgaacgtgggaaccatcggccatgtggatcatgggaaaacaaccctgacagctgccataaccaagatccttgcggaaggcggtggtgccaagttcaaaaaatacgaggaaatcgataatgctcctgaggagagagcacggggtataaccattaacgcagcccacgtggagtacagcacagcagctcggcattatgcccacaccgattgcccaggtcacgcggactacgtaaagaatatgatcacgggaaccgcacccctcgatggatgcatccttgttgtggctgccaatgacggcccaatgccgcagactagggagcacctccttttggcaagacagataggcgtagagcacgtcgttgtatatgtcaataaagcagacgcggtccaggattcagagatggtggagttggtcgagctggagatccgtgagctcctgacggaattcggatacaagggtgaagagactcccgtgattgttgggtctgccctgtgtgctctggagggcagagaccccgagcttggcctcaagagcgttcaaaagctcctcgatgcagttgacacgtacatccctgtgcccgcaagggacttggagaaaccgttcctcctgcccgtggaggctgtttactcagttcccggacgcggaactgtagttacaggaacgctggagcggggaattctcaaaaagggcgacgaatgcgagctcttaggacacagtaagaacatcaggactgtggtgaccggcattgaaatgttccataagagtctagagcgagcagaggccggtgacaatcttggcgctctggtgagaggcctcaagcgagaggacctgagaagaggactggtcatggtgaagccaggttcaattaaacctcatcagaaggttgaggcccaggtttatattttgtctaaggaagaggggggacgccacaagccctttgtgagtcattttatgcccgtgatgttcagccttacctgggatatggcctgtaggattatcctgcctcccgaaaaggagttagctatgccaggcgaggatctgaaattcaacctcatcctccgacagccaatgatcctggaaaagggacagcgtttcacgctgcgggacggtaaccgtaccattggcaccggcttggtgactaacacactcgcgatgactgaggaagaaaagaacataaagtggggttag

SEQ ID NO: 137375 - DNA, 2071 bp, Artificial Sequence
  derived and/or modified sequence
agacactggcggctagaggggcccggacttgccctcccagctctaacttccgccggaagtgccttccagccgcaggcgcccttcttcttctgtgcgctcgggctcctggtcccggctccccggttaccggggcgcgagtatgaccacaatggcggccgccaccctgctgcgcgcgacgccccacttcagcggtctcgccgccggccggaccttcctgctgcagggtctgttgcggctgctgaaagccccggcattgcctctcttgtgccgcggcctggccgtggaggccaagaagacttacgtgcgcgacaagccacatgtgaatgtgggtaccatcggccatgtggaccacgggaagaccacgctgactgcagccatcacgaagattctagctgagggaggtggggctaagttcaagaagtacgaggagattgacaatgccccggaggagcgagctcggggtatcaccatcaatgcggctcatgtggagtatagcactgccgcccgccactacgcccacacagactgcccgggtcatgcagattatgttaagaatatgatcacaggcactgcacccctcgacggctgcatcctggtggtagcagccaatgacggccccatgccccagacccgagagcacttattactggccagacagattggggtggagcatgtggtggtgtatgtgaacaaggctgacgctgtccaggactctgagatggtggaactggtggaactggagatccgggagctgctcaccgagtttggctataaaggggaggagaccccagtcatcgtaggctctgctctctgtgcccttgagggtcgggaccctgagttaggcctgaagtctgtgcagaagctactggatgctgtggacacttacatcccagtgcccgcccgggacctggagaagcctttcctgctgcctgtggaggcggtgtactccgtccctggccgtggcaccgtggtgacaggtacactagagcgtggcattttaaagaagggagacgagtgtgagctcctaggacatagcaagaacatccgcactgtggtgacaggcattgagatgttccacaagagcctggagagggccgaggccggagataacctcggggccctggtccgaggcttgaagcgggaggacttgcggcggggcctggtcatggtcaagccaggttccatcaagccccaccagaaggtggaggcccaggtttacatcctcagcaaggaggaaggtggccgccacaagccctttgtgtcccacttcatgcctgtcatgttctccctgacttgggacatggcctgtcggattatcctgcccccagagaaggagcttgccatgcccggggaggacctgaagttcaacctaatcttgcggcagccaatgatcttagagaaaggccagcgtttcaccctgcgagatggcaaccggactattggcaccggtctagtcaccaacacgctggccatgactgaggaggagaagaatatcaaatggggttgagtgtgcagatctctgctcagcttcccttgcgtttaaggcctgccctagccagggctccctcctgcttccagtaccctctcatggcataggctgcaacccagcagagggcagctagatggacatttcccctgctcggaagggttggcctgcctggctggggaggtcagtaaactttgaatagtaagccagcctgtgtcctgtgtcctttgtgcaaattggagaggataggggaggacaaaaagggtgttgaaccccagacagatggggagcttgtgagatcccagagcagttttaacggataaatcaagtccagtgagcttagtgattgcctagacacagtaggatgccgttattcagcctcctgggagatagtgggaaagaatgttctatcgctctggagccagcatggcttcagctcaggtgccaaacccatcttgtttcctcggaatactaagtgaatgtctagcatccattcacattctgtgggaacagggactggacaggcatacctcagatgctgtaggtttgcttccagactaccacaataaagcaggtcacaaattt

SEQ ID NO: 137376 - protein, 542 aa, Artificial Sequence
  derived and/or modified sequence
MPLRDETLREVWASDSGHEEESLSPEAPRRPKQRPAPAQRLRKKRTEAPESPCPTGSKPRKPGAGRTGRPREEPSPDPAQARAPQTVYARFLRDPEAKKRDPRETFLVARAPDAEDEEEEEEEDEEDEEEEAEEKKEKILLPPKKPLREKSSADLKERRAKAQGPRGDLGSPDPPPKPLRVRNKEAPAGEGTKMRKTKKKGSGEADKDPSGSPASARKSPAAMFLVGEGSPDKKALKKKGTPKGARKEEEEEEEAATVIKKSNQKGKAKGKGKKKAKEERAPSPPVEVDEPREFVLRPAPQGRTVRCRLTRDKKGMDRGMYPSYFLHLDTEKKVFLLAGRKRKRSKTANYLISIDPTNLSRGGENFIGKLRSNLLGNRFTVFDNGQNPQRGYSTNVASLRQELAAVIYETNVLGFRGPRRMTVIIPGMSAENERVPIRPRNASDGLLVRWQNKTLESLIELHNKPPVWNDDSGSYTLNFQGRVTQASVKNFQIVHADDPDYIVLQFGRVAEDAFTLDYRYPLCALQAFAIALSSFDGKLACE

SEQ ID NO: 137377 - DNA, 2107 bp, Artificial Sequence
  derived and/or modified sequence
ggcaaaggcaccatgcctctgcgggatgaaaccctccgagaggtgtgggcctctgacagtgggcatgaagaagaaagcctgagcccggaggccccgcggcgccccaaacagcgacccgccccggcacagaggctaaggaagaagaggacggaggcccccgaatccccctgccccacgggatccaagccccggaagcccggagctgggcggacggggaggccgcgggaggagccttccccagacccagcccaggcccgggcgccgcagacggtctacgccaggttcctcagggaccccgaggccaagaagcgcgacccccgggaaacctttctggtagcccgtgccccagacgcggaggacgaggaggaggaggaagaggaggacgaggaggacgaggaagaggaggcagaggaaaagaaagagaaaatccttctgcctcccaagaagcccctgagagagaagagctccgcagacctgaaggagaggagggccaaggcccagggcccaaggggagacctgggaagccctgaccccccaccgaaacctctgcgtgttaggaataaggaagctccagcaggggaggggaccaagatgagaaagaccaagaagaaagggtctggggaggccgacaaggacccctcagggagcccagccagtgcgaggaagagcccagcagccatgtttctggttggggaaggcagtcctgacaagaaagccctgaagaagaaaggcactcccaaaggcgcgaggaaggaggaagaagaggaggaggaggcagctacggtgataaagaagagcaatcaaaagggcaaagccaaaggaaaaggcaaaaagaaagcgaaggaggagagggccccgtctccccccgtggaggtggacgaaccccgggagtttgtgctccggcctgccccccagggccgcacggtgcgctgccggctgacccgggacaaaaagggcatggatcgaggcatgtatccctcctacttcctgcacctggacacggagaagaaggtgttcctcttggctggcaggaaacgaaaacggagcaagacagccaattacctcatctccatcgaccctaccaatctgtcccgaggaggggagaatttcatcgggaagctgaggtccaacctcctggggaaccgcttcacggtctttgacaacgggcagaacccacagcgtgggtacagcactaatgtggcaagccttcggcaggagctggcagctgtgatctatgaaaccaacgtgctgggcttccgtggcccccggcgcatgaccgtcatcattcctggcatgagtgcggagaacgagagggtccccatccggccccgaaatgctagtgacggcctgctggtgcgctggcagaacaagacgctggagagcctcatagaactgcacaacaagccacctgtctggaacgatgacagtggctcctacaccctcaacttccaaggccgggtcacccaggcctcagtcaagaacttccagattgtccacgctgatgaccccgactatatcgtgctgcagttcggccgcgtggcggaggacgccttcaccctagactaccggtacccgctgtgcgccctgcaggccttcgccatcgccctctccagtttcgacgggaagctggcctgcgagtgaccccagcagcccctcagcgcccccagagcccgtcagcgtgggggaaaggattcagtggaggctggcagggtccctccagcaaagctcccgcggaaaactgctcctgtgtcggggctgacctctcactgcctctcggtgacctccgtcctctccccagcctggcacaggccgaggcaggaggagcccggacggcgggtaggacggagatgaagaacatctggagttggagccgcacatctggtctcggagctcgcctgcgccgctgtgcccccctcctccccgcgccccagtcacttcctgtccgggagcagtagtcattgttgttttaacctcccctctccccgggaccgcgctagggctccgaggagctggggcgggctaggaggagggggtaggtgatgggggacgagggccaggcacccacatccccaataaagccgcgtccttggccaaaaaaaaaaaaaaa

SEQ ID NO: 137378 - DNA, 1629 bp, Artificial Sequence
  derived and/or modified sequence
atgcccctgagagacgagaccctgagagaggtgtgggccagcgacagcggccacgaggaggagagcctgagccccgaggcccccagaagacccaagcagagacccgcccccgcccagagactgagaaagaagagaaccgaggcccccgagagcccctgccccaccggcagcaagcccagaaagcccggcgccggcagaaccggcagacccagagaggagcccagccccgaccccgcccaggccagagccccccagaccgtgtacgccagattcctgagagaccccgaggccaagaagagagaccccagagagaccttcctggtggccagagcccccgacgccgaggacgaggaggaggaggaggaggaggacgaggaggacgaggaggaggaggccgaggagaagaaggagaagatcctgctgccccccaagaagcccctgagagagaagagcagcgccgacctgaaggagagaagagccaaggcccagggccccagaggcgacctgggcagccccgaccccccccccaagcccctgagagtgagaaacaaggaggcccccgccggcgagggcaccaagatgagaaagaccaagaagaagggcagcggcgaggccgacaaggaccccagcggcagccccgccagcgccagaaagagccccgccgccatgttcctggtgggcgagggcagccccgacaagaaggccctgaagaagaagggcacccccaagggcgccagaaaggaggaggaggaggaggaggaggccgccaccgtgatcaagaagagcaaccagaagggcaaggccaagggcaagggcaagaagaaggccaaggaggagagagcccccagcccccccgtggaggtggacgagcccagagagttcgtgctgagacccgccccccagggcagaaccgtgagatgcagactgaccagagacaagaagggcatggacagaggcatgtaccccagctacttcctgcacctggacaccgagaagaaggtgttcctgctggccggcagaaagagaaagagaagcaagaccgccaactacctgatcagcatcgaccccaccaacctgagcagaggcggcgagaacttcatcggcaagctgagaagcaacctgctgggcaacagattcaccgtgttcgacaacggccagaacccccagagaggctacagcaccaacgtggccagcctgagacaggagctggccgccgtgatctacgagaccaacgtgctgggcttcagaggccccagaagaatgaccgtgatcatccccggcatgagcgccgagaacgagagagtgcccatcagacccagaaacgccagcgacggcctgctggtgagatggcagaacaagaccctggagagcctgatcgagctgcacaacaagccccccgtgtggaacgacgacagcggcagctacaccctgaacttccagggcagagtgacccaggccagcgtgaagaacttccagatcgtgcacgccgacgaccccgactacatcgtgctgcagttcggcagagtggccgaggacgccttcaccctggactacagataccccctgtgcgccctgcaggccttcgccatcgccctgagcagcttcgacggcaagctggcctgcgagtag

SEQ ID NO: 137379 - DNA, 1629 bp, Artificial Sequence
  derived and/or modified sequence
atgccactgcgggatgaaaccctgagggaggtgtgggcgtccgatagcggacatgaagaagaaagcttatcaccagaagcccccagacgccccaagcagaggcccgctccagcgcagcgcttgagaaaaaagcggacagaagcacccgagtccccctgtccaacaggcagcaaaccgagaaaacccggggcgggtagaacaggcaggccgcgagaggaaccctccccagatccggcccaagcccgtgccccacaaactgtctacgcaaggttcctcagggatccagaggccaaaaagagagaccccagggagacatttctggtggcccgggcacctgatgcggaggacgaggaggaggaagaggaggaggatgaggaggacgaggaagaggaggccgaggagaaaaaggaaaaaatactgctgccacctaagaaaccactgcgagagaagtcatcagccgatctgaaggagaggagggccaaagcccaaggacccagaggggatctaggctctcctgatcctccaccaaaaccacttcgcgtccgtaacaaagaggcgcctgccggggaagggacaaagatgagaaagacaaagaagaagggcagtggcgaagcagacaaggatcctagcggctcccccgcctccgctagaaaatcacctgctgccatgtttctggtcggcgaaggctctccagataagaaagctctgaaaaaaaagggaacccccaagggagcacgcaaagaggaagaagaagaggaggaagctgcgacagtcattaagaaatcgaaccagaaaggcaaagccaagggaaaaggcaaaaaaaaggctaaagaggagagagcacccagtcctcctgtggaggtcgacgagcccagagaatttgtcctgagacccgctccccagggtcgcaccgtccgctgtagactgactcgcgataaaaagggcatggaccgcggcatgtacccatcttacttcctgcacttggacactgaaaagaaagtatttctgcttgctggtcgtaagagaaaaaggtcaaaaactgcaaactatctgatctccatcgacccaacaaacctctctagggggggcgaaaacttcatcggaaagctgcgttcgaatcttctgggtaaccgcttcacagtatttgacaacgggcagaatcctcagaggggatactctaccaatgttgcgagcctgcggcaagagctcgctgccgttatttacgaaaccaacgttctggggttccggggtccaaggagaatgactgtgatcattccaggtatgtcggctgagaatgagagggtgccaatcagacctagaaacgcatccgacggactcttagttagatggcagaataaaacattggagtctcttattgagctgcataacaaaccccccgtatggaacgatgacagtggtagttataccctgaacttccaagggcgtgtcactcaggcctccgtgaagaactttcagatagtccatgccgacgaccctgactacattgtactgcagtttggtcgagtcgcagaagacgcctttacattggactacaggtacccgctctgtgccctccaggcgttcgcaattgccctgagctcatttgatgggaagttagcatgtgagtag

SEQ ID NO: 137380 - DNA, 1629 bp, Artificial Sequence
  derived and/or modified sequence
atgcccctgagagatgagaccctgcgggaggtgtgggccagtgacagcggccacgaggaggagagcctgagccctgaggccccccggcggcccaagcagaggcctgccccagcccagaggctgaggaagaagaggacagaggcccctgagagcccctgccccaccggcagcaagcccaggaagccaggggccggccgcacaggccggccccgggaggagcccagcccagaccctgcccaggcccgggccccccagacagtgtatgcccgcttcctgcgggaccctgaggccaagaagagggacccccgggagaccttcctggtggcccgggccccagatgctgaagatgaggaggaggaggaggaggaggatgaggaggatgaggaggaggaggccgaggagaagaaggagaagatcctgctgccccccaagaagcccctgcgggagaagagcagcgctgacctgaaggagcggcgggccaaggcccagggccccaggggggacctgggcagcccagaccccccacccaagcccctgcgggtgaggaacaaggaggccccagctggggagggcaccaagatgaggaagaccaagaagaagggcagcggggaggccgacaaggaccccagcggcagccctgccagcgccaggaagagccctgctgccatgttcctggtgggggagggcagcccagacaagaaggccctgaagaagaagggcacccccaagggggccaggaaggaggaggaggaggaggaggaggccgccaccgtcatcaagaagagcaaccagaagggcaaggccaagggcaagggcaagaagaaggccaaggaggagcgggcccccagcccccctgtggaggtggatgagccccgggagtttgtgctgcggcctgccccccagggccgcacagtgcgctgccgcctgacccgggacaagaagggcatggaccggggcatgtaccccagctacttcctgcacctggacacagagaagaaggtgttcctgctggccggcaggaagaggaagaggagcaagacagccaactacctgatcagcattgaccccaccaacctgagccggggcggggagaacttcatcggcaagctgcggagcaacctgctgggcaaccgcttcaccgtgtttgacaatggccagaacccccagaggggctacagcaccaacgtggccagcctgcggcaggagctggccgctgtgatctatgagaccaacgtgctgggcttccggggccccaggaggatgaccgtcatcatccctggcatgtctgcagaaaatgaaagagtgcccatccggcccagaaatgccagtgatggcctgctggtgcgctggcagaacaagaccctggagagcctgattgagctgcacaacaagccccctgtgtggaatgatgacagcggcagctacaccctgaacttccagggccgggtgacccaggcctctgtgaagaacttccagatcgtgcatgctgatgatcctgactacatcgtgctgcagtttggccgggtggctgaagatgccttcaccctggactaccgctaccccctgtgtgccctgcaggcctttgccatcgccctgagcagctttgatggcaagctggcctgtgagtag

SEQ ID NO: 137381 - DNA, 1629 bp, Artificial Sequence
  derived and/or modified sequence
atgcccctgcgggacgagaccctgcgggaggtgtgggccagcgactccggccacgaagaagaaagcctatctcctgaggccccccggcggcccaaacagcggcccgcccccgcacagaggctgcgaaagaagagaacagaagccccagagtcaccgtgtccaactggcagcaagccaaggaagccgggtgctggtcggactggaaggccccgcgaagaaccttcaccagatccggctcaggcacgggcgccccagacggtgtatgctcggtttctgcgggaccctgaggccaagaagcgtgaccccagagaaacctttcttgtggccagggccccggatgctgaggacgaagaggaggaagaggaagaagacgaagaagatgaggaggaggaagccgaggaaaaaaaagagaagattttattaccccccaaaaagcctctgcgcgagaagagttccgccgatctaaaagaacggagagccaaggcccaaggaccccgcggcgacctcggtagtcccgacccacctccaaagcctctccgggttcggaacaaggaagccccagctggagagggaactaagatgagaaaaacgaaaaaaaaaggatcgggtgaggctgacaaagatccatctggcagccccgcctctgctcggaaatcacctgccgcaatgtttctggttggggagggctcacccgacaagaaggccctaaaaaagaagggcacgcctaagggggcccggaaagaagaggaggaagaggaggaggccgctacggtgattaaaaagtccaatcagaaaggcaaggccaaaggtaaaggcaaaaagaaggctaaggaagagagggcaccctctccgcctgtcgaagtagacgagcctagagagttcgtcctacggcctgcaccccaggggagaaccgtaaggtgcagattgacccgcgataagaaaggcatggatcgcggaatgtatccatcctacttcctacatttggacactgaaaaaaaagtgtttcttttggcaggccggaaacgtaagaggagcaagaccgccaactatctgatctctatcgaccccacaaatctcagcagaggaggggagaacttcataggaaaactacgatctaatctgctcggcaacaggtttactgtgttcgacaatggccagaacccacagagaggctattctaccaatgtggctagcctccgccaggaactcgcagctgtcatctacgaaaccaatgttctagggtttcgtgggccccggcgtatgaccgtgattatccctggaatgtcagcagagaacgagcgtgtaccaattcgacccagaaacgcctccgatgggctccttgtgcgctggcagaacaagaccctggagtccctcatcgaactacataacaaaccccccgtatggaatgatgacagcggtagttatacccttaatttccaggggcgggtcacacaagcaagtgtcaaaaactttcagattgtgcatgccgatgaccctgactatatcgtgttgcaatttgggcgcgtcgccgaggatgcgtttacgctcgattatcggtatccactgtgtgcgcttcaggccttcgccatcgcattgagttcctttgacggcaaactcgcttgcgaatag

SEQ ID NO: 137382 - DNA, 1629 bp, Artificial Sequence
  derived and/or modified sequence
atgcccctgagggatgagaccttacgagaggtgtgggcctcagactctgggcacgaggaggagagcctcagtccagaagccccaagacgccctaagcagaggccagctcccgctcagaggctacggaagaaacgtaccgaggccccagagagtccctgtcccactggatctaagcctcgcaagcctggcgcaggcaggacaggacgacctcgcgaggagccttcccccgacccggcacaggctagagcgccacagacagtttacgcacgctttctaagggacccagaagctaagaagagagatcccagggaaaccttcctggtggcccgagccccagatgctgaggacgaggaagaggaggaagaagaagacgaagaagacgaagaggaggaggccgaagaaaagaaggagaagatcctgctacccccaaagaagcctttacgcgagaagtcctccgctgatctgaaggagagaagagccaaagcccagggccctcgtggggatctgggaagcccagaccctcctcctaagccgctgcgtgtcaggaataaggaagcccctgcgggagaagggacaaagatgcggaagacaaagaaaaagggaagcggcgaggccgacaaggatccctccgggtcacctgcatcggcaagaaagtcacccgctgccatgttcctggtcggagaggggagtcccgacaagaaagcacttaagaaaaaaggtacccctaagggggctcgtaaagaagaagaagaggaagaggaggcagcaacggttattaagaagagcaaccagaaaggaaaggccaaggggaagggcaaaaagaaggcgaaggaagagcgggcacccagcccacctgtagaggtggatgagcccagagagtttgtactgaggcctgcccctcagggcagaacagtccgctgtagactgacccgcgacaaaaagggcatggacaggggcatgtatccatcgtattttctccatctagacacagaaaagaaagtgtttctgctggctggcaggaagagaaagagatcaaaaaccgccaattacctcatcagtattgatccgactaacctgtctagaggaggggaaaatttcatcggcaagcttaggtcaaacctgctgggaaatcggtttaccgtgtttgataacgggcaaaaccctcagcgcggatacagcactaatgtggcctctctccgccaggaactggcagcggttatatatgagacaaatgtcttaggattcaggggccctcggaggatgacggtgataattcccggaatgtctgcagagaacgagcgggtccccataagacccagaaacgcctctgacggacttctggtaaggtggcagaacaaaaccctggagagcctcattgagttacacaacaagcccccagtgtggaatgacgacagtgggtcttacacactcaactttcagggtagggttactcaggcatctgtcaagaatttccaaatcgtacacgccgacgacccagactatatcgtgctacagttcggacgcgtagctgaggatgctttcaccctcgactacaggtatccactttgtgcgttacaggcctttgccattgccctgagcagctttgatgggaaactcgcctgcgagtag

SEQ ID NO: 137383 - DNA, 2162 bp, Artificial Sequence
  derived and/or modified sequence
gaagttgagccgagattagcaggagtcgggagggaggctcctagacctgcagagaaaggggtgcgataggcaaaggcaccatgcctctgcgggatgaaaccctccgagaggtgtgggcctctgacagtgggcatgaagaagaaagcctgagcccggaggccccgcggcgccccaaacagcgacccgccccggcacagaggctaaggaagaagaggacggaggcccccgaatccccctgccccacgggatccaagccccggaagcccggagctgggcggacggggaggccgcgggaggagccttccccagacccagcccaggcccgggcgccgcagacggtctacgccaggttcctcagggaccccgaggccaagaagcgcgacccccgggaaacctttctggtagcccgtgccccagacgcggaggacgaggaggaggaggaagaggaggacgaggaggacgaggaagaggaggcagaggaaaagaaagagaaaatccttctgcctcccaagaagcccctgagagagaagagctccgcagacctgaaggagaggagggccaaggcccagggcccaaggggagacctgggaagccctgaccccccaccgaaacctctgcgtgttaggaataaggaagctccagcaggggaggggaccaagatgagaaagaccaagaagaaagggtctggggaggccgacaaggacccctcagggagcccagccagtgcgaggaagagcccagcagccatgtttctggttggggaaggcagtcctgacaagaaagccctgaagaagaaaggcactcccaaaggcgcgaggaaggaggaagaagaggaggaggaggcagctacggtgataaagaagagcaatcaaaagggcaaagccaaaggaaaaggcaaaaagaaagcgaaggaggagagggccccgtctccccccgtggaggtggacgaaccccgggagtttgtgctccggcctgccccccagggccgcacggtgcgctgccggctgacccgggacaaaaagggcatggatcgaggcatgtatccctcctacttcctgcacctggacacggagaagaaggtgttcctcttggctggcaggaaacgaaaacggagcaagacagccaattacctcatctccatcgaccctaccaatctgtcccgaggaggggagaatttcatcgggaagctgaggtccaacctcctggggaaccgcttcacggtctttgacaacgggcagaacccacagcgtgggtacagcactaatgtggcaagccttcggcaggagctggcagctgtgatctatgaaaccaacgtgctgggcttccgtggcccccggcgcatgaccgtcatcattcctggcatgagtgcggagaacgagagggtccccatccggccccgaaatgctagtgacggcctgctggtgcgctggcagaacaagacgctggagagcctcatagaactgcacaacaagccacctgtctggaacgatgacagtggctcctacaccctcaacttccaaggccgggtcacccaggcctcagtcaagaacttccagattgtccacgctgatgaccccgactatatcgtgctgcagttcggccgcgtggcggaggacgccttcaccctagactaccggtacccgctgtgcgccctgcaggccttcgccatcgccctctccagtttcgacgggaagctggcctgcgagtgaccccagcagcccctcagcgcccccagagcccgtcagcgtgggggaaaggattcagtggaggctggcagggtccctccagcaaagctcccgcggaaaactgctcctgtgtcggggctgacctctcactgcctctcggtgacctccgtcctctccccagcctggcacaggccgaggcaggaggagcccggacggcgggtaggacggagatgaagaacatctggagttggagccgcacatctggtctcggagctcgcctgcgccgctgtgcccccctcctccccgcgccccagtcacttcctgtccgggagcagtagtcattgttgttttaacctcccctctccccgggaccgcgctagggctccgaggagctggggcgggctaggaggagggggtaggtgatgggggacgagggccaggcacccacatccccaataaagccgcgtccttggccaa

SEQ ID NO: 137384 - protein, 520 aa, Artificial Sequence
  derived and/or modified sequence
MSQDNDTLMRDILGHELAAMRLQKLEQQRRLFEKKQRQKRQELLMVQANPDASPWLWRSCLREERLLGDRGLGNPFLRKKVSEAHLPSGIHSALGTVSCGGDGRGERGLPTPRTEAVFRNLGLQSPFLSWLPDNSDAELEEVSVENGSVSPPPFKQSPRIRRKGWQAHQRPGTRAEGESDSQDMGDAHKSPNMGPNPGMDGDCVYENLAFQKEEDLEKKREASESTGTNSSAAHNEELSKALKGEGGTDSDHMRHEASLAIRSPCPGLEEDMEAYVLRPALPGTMMQCYLTRDKHGVDKGLFPLYYLYLETSDSLQRFLLAGRKRRRSKTSNYLISLDPTHLSRDGDNFVGKVRSNVFSTKFTIFDNGVNPDREHLTRNTARIRQELGAVCYEPNVLGYLGPRKMTVILPGTNSQNQRINVQPLNEQESLLSRYQRGDKQGLLLLHNKTPSWDKENGVYTLNFHGRVTRASVKNFQIVDPKHQEHLVLQFGRVGPDTFTMDFCFPFSPLQAFSICLSSFN

SEQ ID NO: 137385 - DNA, 1791 bp, Artificial Sequence
  derived and/or modified sequence
tttgttggaagtggagagtggagggtcagaagggagtggaccagttcaggtcccagagggaatcctccctccctctgagccgtctttcttctcctccctatttcgcagatatcccgagattaggtccccagcttccaaagagaggatcagaatgtctcaggataatgacacattgatgagagacatcctggggcatgagctcgctgctatgaggctgcagaagctggaacagcagcggcggctgtttgaaaagaagcagcgacagaagcgccaggagctcctcatggttcaggccaatcctgacgcttccccgtggctttggcgctcttgtctgcgggaggagcgccttttaggtgacagaggccttgggaaccctttcctccggaagaaagtgtcagaggcacatctgccctctggcatccacagtgccctgggcaccgtgagctgtggtggagacggcaggggcgagcgcggcctcccgacaccgcggacagaagcagtgttcaggaatctcggtctccagtcccctttcttatcctggctcccagacaattccgatgcagaattggaggaagtctccgtggagaatggttccgtctctcccccaccttttaaacagtctccgagaatccgacgcaagggttggcaagcccaccaacgacctgggacccgtgcagagggtgagagtgactcccaggatatgggagatgcacacaagtcacccaatatgggaccaaaccctggaatggatggtgactgtgtatatgaaaacttggccttccaaaaggaagaagacttggaaaagaagagagaggcctctgagtctacagggacgaactcctcagcagcacacaacgaagagttgtccaaggccctgaaaggcgagggtggcacggacagcgaccatatgaggcacgaagcctccttggcaatccgctccccctgccctgggctggaggaggacatggaagcctacgtgctgcggccagcgctcccgggcaccatgatgcagtgctacctcacccgtgacaagcacggcgtggacaagggcttgttccccctctactacctctacctggagacctctgacagcctgcagcgcttcctcctggctgggcgaaagagaagaaggagcaaaacttctaattacctcatctccctggatcctacacacctatctcgggacggggacaatttcgtgggcaaagtcagatccaatgtcttcagcaccaagttcaccatctttgacaatggggtgaatcctgaccgggagcatttaaccaggaatactgcccggatcagacaggagctgggggctgtgtgttatgagcccaacgtcttaggatacctggggcctcggaaaatgactgtgattctcccaggaaccaacagccagaaccagcgaatcaatgtccagccactaaatgaacaggagtcgctactgagtcgttaccaacgtggggacaaacaagggttgcttttgttgcacaacaaaaccccgtcgtgggacaaggagaacggtgtctacacgctcaatttccatggtcgagtcactcgggcttcggtgaagaacttccaaatcgtggatcccaaacaccaagaacatctggtgctccagttcggccgagtgggcccagacacattcaccatggacttctgctttccatttagcccgctccaggccttcagcatctgcttgtccagtttcaattagaagctggctgttgaataactcaataaaataccatacccttgccagcaaaaaaaaaaaaaaaaaaaaaaaaaaaaaaa

SEQ ID NO: 137386 - DNA, 1563 bp, Artificial Sequence
  derived and/or modified sequence
atgagccaggacaacgacaccctgatgagagacatcctgggccacgagctggccgccatgagactgcagaagctggagcagcagagaagactgttcgagaagaagcagagacagaagagacaggagctgctgatggtgcaggccaaccccgacgccagcccctggctgtggagaagctgcctgagagaggagagactgctgggcgacagaggcctgggcaaccccttcctgagaaagaaggtgagcgaggcccacctgcccagcggcatccacagcgccctgggcaccgtgagctgcggcggcgacggcagaggcgagagaggcctgcccacccccagaaccgaggccgtgttcagaaacctgggcctgcagagccccttcctgagctggctgcccgacaacagcgacgccgagctggaggaggtgagcgtggagaacggcagcgtgagccccccccccttcaagcagagccccagaatcagaagaaagggctggcaggcccaccagagacccggcaccagagccgagggcgagagcgacagccaggacatgggcgacgcccacaagagccccaacatgggccccaaccccggcatggacggcgactgcgtgtacgagaacctggccttccagaaggaggaggacctggagaagaagagagaggccagcgagagcaccggcaccaacagcagcgccgcccacaacgaggagctgagcaaggccctgaagggcgagggcggcaccgacagcgaccacatgagacacgaggccagcctggccatcagaagcccctgccccggcctggaggaggacatggaggcctacgtgctgagacccgccctgcccggcaccatgatgcagtgctacctgaccagagacaagcacggcgtggacaagggcctgttccccctgtactacctgtacctggagaccagcgacagcctgcagagattcctgctggccggcagaaagagaagaagaagcaagaccagcaactacctgatcagcctggaccccacccacctgagcagagacggcgacaacttcgtgggcaaggtgagaagcaacgtgttcagcaccaagttcaccatcttcgacaacggcgtgaaccccgacagagagcacctgaccagaaacaccgccagaatcagacaggagctgggcgccgtgtgctacgagcccaacgtgctgggctacctgggccccagaaagatgaccgtgatcctgcccggcaccaacagccagaaccagagaatcaacgtgcagcccctgaacgagcaggagagcctgctgagcagataccagagaggcgacaagcagggcctgctgctgctgcacaacaagacccccagctgggacaaggagaacggcgtgtacaccctgaacttccacggcagagtgaccagagccagcgtgaagaacttccagatcgtggaccccaagcaccaggagcacctggtgctgcagttcggcagagtgggccccgacaccttcaccatggacttctgcttccccttcagccccctgcaggccttcagcatctgcctgagcagcttcaactag

SEQ ID NO: 137387 - DNA, 1563 bp, Artificial Sequence
  derived and/or modified sequence
atgtctcaggataatgacaccctgatgcgtgacatattgggtcatgaactggctgccatgagattacagaaattggagcagcagagacgcttgtttgagaagaaacaaaggcagaagcggcaagaactcctgatggtacaagctaaccccgacgcttccccttggctatggcgatcgtgccttcgcgaggaacgccttctaggtgaccggggcttggggaatcctttccttagaaagaaggttagcgaagcccacctgccttctggaattcattctgccctgggcacagtgtcctgtggcggtgatggccgcggggaaagaggcctcccaacccctcgcactgaggccgtgtttcggaatctggggctgcaaagcccttttctctcttggctccccgataacagcgatgctgaactcgaggaagtatcagtagagaacggttccgtctcgcctcccccatttaagcagtccccaagaatccggcgtaagggctggcaagctcaccaaagacctgggactcgtgccgaaggggagtcagactcacaggacatgggcgatgcccacaagtccccgaacatgggtcctaacccaggtatggacggggactgtgtgtatgaaaacctggcttttcagaaggaagaggatctcgaaaaaaagcgtgaggctagcgagtcaacaggcactaactcctctgccgctcataacgaagaactgtctaaggctctcaaaggggaaggcggtaccgatagtgatcatatgcgccatgaagcctctctggctattcggagcccatgtcccgggctggaagaagacatggaagcatacgtgctccggcctgctctgcctggtacaatgatgcagtgctatttgactagagacaagcatggcgtggataagggtctcttccctctgtactacctgtatctggagaccagcgatagtctgcagaggtttttgctggccgggcgaaagagaagacggagcaaaacctcaaattaccttatctccctggacccaacacacctgtcccgcgatggcgataattttgtgggtaaggtgcggtccaacgtattcagcaccaagtttactattttcgacaatggggtgaaccctgaccgcgagcacctaactagaaacacagcacgcattaggcaggaattgggtgctgtgtgctatgaaccaaacgtgctggggtacctgggcccccgcaaaatgaccgtgatcctgccaggaacaaattcccagaaccagcgaatcaacgtgcagccgctgaatgaacaggagtctctgcttagtcgataccaacgtggagataaacagggacttctcttattgcataacaagactccttcctgggataaagagaacggagtctatactttaaacttccacggcagagtcacaagagcttccgttaagaactttcagattgtagatccaaagcatcaggaacatttagttctgcagttcggacgggttggtccagatacattcaccatggatttttgctttcctttctcccccctccaggccttctctatctgtctgtcgtccttcaactag

SEQ ID NO: 137388 - DNA, 1563 bp, Artificial Sequence
  derived and/or modified sequence
atgagccaggacaatgacaccctgatgagggacatcctgggccacgagctggccgccatgaggctgcagaagctggagcagcagaggcggctgtttgagaagaagcagaggcagaagaggcaggagctgctgatggtgcaggccaacccagatgccagcccctggctgtggaggagctgcctgcgggaggagcggctgctgggggaccggggcctgggcaaccccttcctgaggaagaaggtgtctgaggcccacctgcccagcggcatccacagcgccctgggcaccgtgtcctgtggaggagatggccgcggggagcggggcctgcccacccccaggacagaggccgtgttcaggaacctgggcctgcagagccccttcctgtcctggctgcctgacaacagtgatgctgagctggaggaggtgtctgtggagaatggatctgtgtccccaccacccttcaagcagagcccccgcatccggaggaagggctggcaggcccaccagaggcctggcaccagggctgagggggagagtgacagccaggacatgggagatgcccacaagagccccaacatgggccccaaccctggcatggatggagactgtgtgtatgagaacctggccttccagaaggaggaggacctggagaagaagcgggaggccagcgagagcacaggcaccaacagcagcgctgcccacaatgaggagctgagcaaggccctgaagggggagggcggcacagacagcgaccacatgagacatgaggccagcctggccatccgcagcccctgccccggcctggaggaggacatggaggcctacgtgctgcggcctgccctgcccggcaccatgatgcagtgctacctgacccgggacaagcatggagtggacaagggcctcttccccctgtactacctgtacctggagaccagtgacagcctgcagcgcttcctgctggccggcaggaagagaagaagaagcaagaccagcaactacctgatcagcctggaccccacccacctgagcagagatggagacaactttgtgggcaaggtgcgcagcaatgtgttcagcaccaagttcaccatctttgacaatggagtgaacccagaccgggagcacctgaccaggaacacagcccgcatccggcaggagctgggcgctgtgtgctatgagcccaacgtgctgggctacctgggccccaggaagatgaccgtcatcctgcccggcaccaacagccagaaccagaggatcaacgtgcagcccctgaatgagcaggagagcctgctgagccgctaccagagaggagacaagcagggcctgctgctgctgcacaacaagacccccagctgggacaaggaaaatggagtgtacaccctgaacttccacggccgggtgacccgggcctctgtgaagaacttccagatcgtggaccccaagcaccaggagcacctggtgctgcagtttggccgggtgggccctgacaccttcaccatggacttctgcttccccttcagccccctgcaggccttcagcatctgcctgagcagcttcaactag

SEQ ID NO: 137389 - DNA, 1563 bp, Artificial Sequence
  derived and/or modified sequence
atgagccaggacaacgacaccctgatgcgggacatcctgggccacgaactggctgccatgcggctccagaaacttgagcaacagcgccgactcttcgaaaaaaagcagcgccagaagaggcaggaactgctcatggtgcaggctaaccccgacgcatccccttggctgtggcgctcctgtctgcgggaggagaggctcctgggggacaggggcctgggaaacccttttcttcgcaaaaaggtgtcagaggcccacctgccgagcgggatccattccgctctggggaccgtgagctgtggtggcgatggccgaggagaacgtggactccccacacccagaacagaagccgtcttccggaatttgggacttcagagcccatttctgagttggctgccagacaactcagacgcagaactggaggaggtgagcgtcgagaatggctccgttagtcctcccccgttcaaacaaagtccaaggatccggcgcaagggctggcaggcacatcagaggcctggcacccgcgctgaaggggagagcgattcccaggatatgggcgacgcccacaaaagccctaacatgggtccgaaccctggcatggacggggattgtgtgtatgagaacttagccttccagaaggaagaagacctagaaaagaaaagagaggctagcgaatccaccggaacaaatagttccgctgcacataacgaggagctgtcgaaggccctcaagggagaaggtggtacagactctgatcacatgagacacgaagctagcctcgccatccggtccccctgcccaggactcgaggaggacatggaggcctatgtcttgcgccctgcgttaccaggaaccatgatgcagtgctacctcactagggataagcatggtgtagacaaggggctgtttccactctattatctgtatctggagaccagcgactccctgcagaggttcttactcgcagggagaaagcgccggaggtctaagacctctaattatctaatctccctggatcctacacatctgtctcgcgatggggacaattttgtcggaaaggtaaggtcgaacgttttttcaactaaatttacaatattcgacaacggggtcaatcctgaccgcgagcacctgactcgcaacaccgcgcgaattaggcaggaactgggcgcagtatgttacgagcccaacgtactgggatatctgggtcctcggaagatgaccgtgatccttccaggtactaactcacagaaccagagaattaatgtccagccccttaatgagcaagagtcactgctgtcccgttaccagcgcggggacaagcaaggactgctccttttacacaataaaactccatcttgggacaaggaaaacggtgtttatacactcaactttcatggacgcgtgaccagagcatcagtgaagaacttccagatcgttgaccccaagcatcaggagcatcttgtcctgcaattcgggcgggtaggaccagacacatttaccatggacttttgtttccccttctccccattgcaagctttctctatctgtctctccagctttaattag

SEQ ID NO: 137390 - DNA, 1563 bp, Artificial Sequence
  derived and/or modified sequence
atgagtcaagacaatgataccctgatgcgcgacatccttggtcacgagctcgcagcaatgcggttacaaaaattagaacagcagcgacgcttgtttgaaaagaagcagcgccagaaacgacaggaactgctgatggtgcaggctaacccagatgcaagcccatggctgtggagatcatgcttaagagaagaacgcctgcttggtgacaggggactcggtaatccattcttgaggaaaaaggtgtctgaggctcacttaccatcggggatccatagcgcactggggaccgtgtcttgtggtggagacggaaggggagaacgcggtctgcctaccccccgaacagaagcggtcttcagaaatctgggccttcagagtcctttcttgagctggcttcctgataacagcgatgcagagctggaggaggtctctgtggaaaatgggtcagtgagcccaccgccattcaaacagtcaccacggatccgaagaaaaggctggcaggcgcatcaacgtcccggtacacgtgcggaaggcgagagcgattcccaggatatgggtgacgcacataagtcgcccaatatgggtccaaaccccggaatggacggggattgcgtttatgagaatctcgcctttcaaaaggaagaagatcttgaaaaaaagagggaagctagcgaatccacaggaactaactctagtgccgctcacaatgaagagctgtctaaggcacttaaaggcgaggggggaaccgactcagaccacatgaggcatgaggcctccctggccatcagatctccatgccctggcctggaggaggacatggaggcatacgtgttgcggccagcattgccaggaaccatgatgcagtgctacctgacaagggacaaacatggggtagataaaggcctctttccgctctattatctttacctggagacttccgattccctgcagaggttcttactcgcaggtaggaagcgtcgcagatccaagacctccaattatctgatctcactcgaccccacgcacctctcccgggatggcgacaactttgtgggcaaagtccgctcaaatgtgttttctacaaagttcaccatcttcgacaatggagttaatcccgaccgcgaacacttaactcgcaataccgcccgaatcagacaggaattgggagccgtctgctatgagccaaatgtcctgggctatcttggccctcggaaaatgaccgtcatcctgcccggtactaactctcagaatcagcgcattaacgtccagcctctgaacgaacaggagagcttgctcagcaggtatcagcgcggagacaagcagggcctccttctcctccacaataaaacacccagttgggacaaggagaacggcgtgtatactcttaatttccatggacgcgtgaccagggcaagtgtcaagaattttcagatcgtagatcctaagcatcaagaacatctcgtcctgcagttcgggagagtgggtccagacacttttactatggacttctgcttccccttttctcccctgcaagcattttccatttgcctgtcttcctttaactag

SEQ ID NO: 137391 - DNA, 1754 bp, Artificial Sequence
  derived and/or modified sequence
ggaagtggagagtggagggtcagaagggagtggaccagttcaggtcccagagggaatcctccctccctctgagccgtctttcttctcctccctatttcgcagatatcccgagattaggtccccagcttccaaagagaggatcagaatgtctcaggataatgacacattgatgagagacatcctggggcatgagctcgctgctatgaggctgcagaagctggaacagcagcggcggctgtttgaaaagaagcagcgacagaagcgccaggagctcctcatggttcaggccaatcctgacgcttccccgtggctttggcgctcttgtctgcgggaggagcgccttttaggtgacagaggccttgggaaccctttcctccggaagaaagtgtcagaggcacatctgccctctggcatccacagtgccctgggcaccgtgagctgtggtggagacggcaggggcgagcgcggcctcccgacaccgcggacagaagcagtgttcaggaatctcggtctccagtcccctttcttatcctggctcccagacaattccgatgcagaattggaggaagtctccgtggagaatggttccgtctctcccccaccttttaaacagtctccgagaatccgacgcaagggttggcaagcccaccaacgacctgggacccgtgcagagggtgagagtgactcccaggatatgggagatgcacacaagtcacccaatatgggaccaaaccctggaatggatggtgactgtgtatatgaaaacttggccttccaaaaggaagaagacttggaaaagaagagagaggcctctgagtctacagggacgaactcctcagcagcacacaacgaagagttgtccaaggccctgaaaggcgagggtggcacggacagcgaccatatgaggcacgaagcctccttggcaatccgctccccctgccctgggctggaggaggacatggaagcctacgtgctgcggccagcgctcccgggcaccatgatgcagtgctacctcacccgtgacaagcacggcgtggacaagggcttgttccccctctactacctctacctggagacctctgacagcctgcagcgcttcctcctggctgggcgaaagagaagaaggagcaaaacttctaattacctcatctccctggatcctacacacctatctcgggacggggacaatttcgtgggcaaagtcagatccaatgtcttcagcaccaagttcaccatctttgacaatggggtgaatcctgaccgggagcatttaaccaggaatactgcccggatcagacaggagctgggggctgtgtgttatgagcccaacgtcttaggatacctggggcctcggaaaatgactgtgattctcccaggaaccaacagccagaaccagcgaatcaatgtccagccactaaatgaacaggagtcgctactgagtcgttaccaacgtggggacaaacaagggttgcttttgttgcacaacaaaaccccgtcgtgggacaaggagaacggtgtctacacgctcaatttccatggtcgagtcactcgggcttcggtgaagaacttccaaatcgtggatcccaaacaccaagaacatctggtgctccagttcggccgagtgggcccagacacattcaccatggacttctgctttccatttagcccgctccaggccttcagcatctgcttgtccagtttcaattagaagctggctgttgaataactcaataaaataccatacccttgccagc

SEQ ID NO: 137392 - protein, 442 aa, Artificial Sequence
  derived and/or modified sequence
MEASRCRLSPSGDSVFHEEMMKMRQAKLDYQRLLLEKRQRKKRLEPFMVQPNPEARLRRAKPRASDEQTPLVNCHTPHSNVILHGIDGPAAVLKPDEVHAPSVSSSVVEEDAENTVDTASKPGLQERLQKHDISESVNFDEETDGISQSACLERPNSASSQNSTDTGTSGSATAAQPADNLLGDIDDLEDFVYSPAPQGVTVRCRIIRDKRGMDRGLFPTYYMYLEKEENQKIFLLAARKRKKSKTANYLISIDPVDLSREGESYVGKLRSNLMGTKFTVYDRGICPMKGRGLVGAAHTRQELAAISYETNVLGFKGPRKMSVIIPGMTLNHKQIPYQPQNNHDSLLSRWQNRTMENLVELHNKAPVWNSDTQSYVLNFRGRVTQASVKNFQIVHKNDPDYIVMQFGRVADDVFTLDYNYPLCAVQAFGIGLSSFDSKLACE

SEQ ID NO: 137393 - protein, 170 aa, Artificial Sequence
  derived and/or modified sequence
MMKMRQAKLDYQRLLLEKRQRKKRLEPFMVQPNPEARLRRAKPRASDEQTPLVNCHTPHSNVILHGIDGPAAVLKPDEVHAPSVSSSVVEEDAENTVDTASKPGLQERLQKHDISESVNFDEETDGISQSACLERPNSASSQNSTFSSFCQKTEDTGYRHFRFCYCRPTS

SEQ ID NO: 137394 - protein, 266 aa, Artificial Sequence
  derived and/or modified sequence
MLKTPWILLPSQDFRSVSKSMDTGTSGSATAAQPADNLLGDIDDLEDFVYSPAPQGVTVRCRIIRDKRGMDRGLFPTYYMYLEKEENQKIFLLAARKRKKSKTANYLISIDPVDLSREGESYVGKLRSNLMGTKFTVYDRGICPMKGRGLVGAAHTRQELAAISYNHDSLLSRWQNRTMENLVELHNKAPVWNSDTQSYVLNFRGRVTQASVKNFQIVHKNDPDYIVMQFGRVADDVFTLDYNYPLCAVQAFGIGLSSFDSKLACE

SEQ ID NO: 137395 - DNA, 3106 bp, Artificial Sequence
  derived and/or modified sequence
acgcggcggcgtgccagcctagccactctagcgacggcggggaagagtgtgtacgtggtgggggcttcctcggtggcgggcatggaggcttcgcgctgccggctcagtcccagcggcgacagtgtcttccatgaagaaatgatgaagatgcgacaggctaagctggattatcagaggctactacttgagaagaggcaaaggaaaaagcgccttgagccatttatggtgcagcccaatccagaagccaggctacgtcgggcaaagccaagggccagtgatgagcagactcccttggtgaactgtcatactccccacagcaatgtcatcttacatggtattgatggtccagctgctgtcctgaaaccagacgaagttcatgctccatcagtaagctcctctgttgtggaagaagatgctgaaaacaccgtggatactgcttccaagccaggacttcaggagcgtctccaaaagcatgatatctctgaaagtgtgaacttcgatgaggagactgatggaatatcccagtcagcatgtttagaaagacccaattctgcatcaagccagaattcaaccgatacaggcacttccggttctgctactgccgcccaaccagctgataacctcctgggagacatagacgacctggaggactttgtgtatagtcctgcccctcaaggtgtcacagtaagatgtcggataatccgggataaaaggggaatggatcggggtctcttccccacctactatatgtacttggaaaaagaagaaaatcagaagatatttcttcttgcagctagaaagcggaaaaagagcaaaacagccaactaccttatctccattgatccagttgatttatctcgtgaaggagaaagttatgtcggcaagcttagatccaacctcatggggaccaagtttacagtttatgaccgtggcatctgccccatgaagggccggggtttggtaggagcggcccacacccggcaggagctggctgccatctcctatgaaacaaacgtacttggatttaaaggtcctaggaaaatgtctgtgatcattcctggaatgacactgaatcataagcagatcccctatcagccacaaaacaaccatgacagtttgctctcaaggtggcagaacagaactatggaaaatctggttgagctgcacaacaaggcccccgtctggaacagtgacactcagtcctatgtcctcaacttccgtggccgggtcactcaggcgtctgtgaagaacttccagatagtccacaaaaatgaccctgattatatagtcatgcagtttggacgtgtggcagatgacgtgttcacactggattacaactacccactttgtgcagtacaggcctttggcatcggtctttctagctttgacagtaagctggcgtgtgaatgagagaacagtcaggcagggagcccttctccccacagagctttcaggagcagacagtggcctccccttcccctccctgccccaggacttaaagagcaatagtttgccccttttggaatgatctctgaatatataaaacacacacacaaagagcaatagtttgccccttttggaacgacccctgaatatataaaacacacacacgaagagcaatagtttgccccttttggaacgacccctgaatatataaaacacacacgaagagcaatagtttgccccttttggaacgacccctgaatatataaaacacacacacgaagagcaatagtttgccccttttggaacgacccctgaatatataaaacacacacacaccccgcgcactctcactccttttccaggtttcatagacttggtgagggatcacagcttagcatgggtgagagatgatttaaagcacagggagattcttgtcacattggggtctccaaagctagaatgggatttcatgtgcttggaaacttgcagtagaatcagggactgacatcgcagttcctctcctctcttcattccctcacagcagattggccggcaccaatcttagtcaagagtggctgtgatcacatttgtgatcaattatgtgagaattttatataattgtcttcatttcaattaaggctgaaagcataaactctagaggtgactcagtcaggactgacagtaatgtgataattgccttcattttcaacccaggagtgcctctcacagctatatgactacggatccattagtgaggagcgacacacacacctgtaggcatcctgtgcaaacactttgtcattatcaagagagatggcagtattgaccatttagtttagttaaaaaaaaaaaaaaaaaggtggcaggagaggctttggggaggatcagccagcagacatgagcactgctggcccgtgtggcagagctgtggactttcttctcggctccctcaaccctggctcaggcacagaaggtgttttgctacgtttttttgattattacacccctccacgtattatgtgactcttacaccagttcacccttcccagaatgtatccaaaccttgagaatgcaggagctctgtgagctccaccgtcagcaccattcagctgcatcccttgtgcacagaactgtttgccagcgttgggtgggacacccgtggcggctgctccctcagacctcccttctgtggactgacctctcacctccgcctgttgttcctgcaccacatcagataagcatgtgaaggagggccaactggcagctgcgggacccttggcttgtcccccaccgacaagtcccacctgctgggtgaggacgagactgtttccatctcaggcatgtatcccaccaagtgcctccctcacagccatgcccagaagcctcacacctcgtcaccaccaccaccccccaccccatcctgaggcactgcctggcagataaccctggttggccacagaagctattaatacacgacagcatgtggggaaggacttatggtgggccaggtggacctcatcctgcttcttcctccctctggtttaaagagatatataaactaatttcacataatttgtgtgtgcaggtgattggtttttacataagtcctatttataccttttatatgttacagaaataaaagttaatttatataaaaatg

SEQ ID NO: 137396 - DNA, 513 bp, Artificial Sequence
  derived and/or modified sequence
atgatgaagatgagacaggccaagctggactaccagagactgctgctggagaagagacagagaaagaagagactggagcccttcatggtgcagcccaaccccgaggccagactgagaagagccaagcccagagccagcgacgagcagacccccctggtgaactgccacaccccccacagcaacgtgatcctgcacggcatcgacggccccgccgccgtgctgaagcccgacgaggtgcacgcccccagcgtgagcagcagcgtggtggaggaggacgccgagaacaccgtggacaccgccagcaagcccggcctgcaggagagactgcagaagcacgacatcagcgagagcgtgaacttcgacgaggagaccgacggcatcagccagagcgcctgcctggagagacccaacagcgccagcagccagaacagcaccttcagcagcttctgccagaagaccgaggacaccggctacagacacttcagattctgctactgcagacccaccagctag

SEQ ID NO: 137397 - DNA, 801 bp, Artificial Sequence
  derived and/or modified sequence
atgctgaagaccccctggatcctgctgcccagccaggacttcagaagcgtgagcaagagcatggacaccggcaccagcggcagcgccaccgccgcccagcccgccgacaacctgctgggcgacatcgacgacctggaggacttcgtgtacagccccgccccccagggcgtgaccgtgagatgcagaatcatcagagacaagagaggcatggacagaggcctgttccccacctactacatgtacctggagaaggaggagaaccagaagatcttcctgctggccgccagaaagagaaagaagagcaagaccgccaactacctgatcagcatcgaccccgtggacctgagcagagagggcgagagctacgtgggcaagctgagaagcaacctgatgggcaccaagttcaccgtgtacgacagaggcatctgccccatgaagggcagaggcctggtgggcgccgcccacaccagacaggagctggccgccatcagctacaaccacgacagcctgctgagcagatggcagaacagaaccatggagaacctggtggagctgcacaacaaggcccccgtgtggaacagcgacacccagagctacgtgctgaacttcagaggcagagtgacccaggccagcgtgaagaacttccagatcgtgcacaagaacgaccccgactacatcgtgatgcagttcggcagagtggccgacgacgtgttcaccctggactacaactaccccctgtgcgccgtgcaggccttcggcatcggcctgagcagcttcgacagcaagctggcctgcgagtag

SEQ ID NO: 137398 - DNA, 1329 bp, Artificial Sequence
  derived and/or modified sequence
atggaggcttcacggtgtaggctgtccccttcaggtgatagcgtgtttcatgaagagatgatgaaaatgcgccaagccaagttggactaccagcggcttcttctcgagaagagacaacggaagaaacgtctggaaccctttatggtgcagcccaacccagaagctaggctccgccgagccaaaccacgtgccagcgacgagcagaccccccttgtcaactgccatactccacatagcaacgtgattctccacggaattgacggaccagccgcagtgcttaagcctgatgaggtgcatgccccgagcgtgagtagcagtgtggtggaagaagatgcagaaaacacagttgacaccgcctcaaagccaggccttcaggagaggcttcaaaagcacgatattagcgagtcagtcaactttgatgaagagaccgacgggatttcacagagtgcttgcctggagcggcccaacagcgcgagcagccagaacagcaccgacacagggacatcaggcagcgcgacagctgcacaacctgccgacaatctcctcggggacattgacgacctcgaagatttcgtctactcacctgcccctcagggggtgactgtgcgctgcaggatcatacgcgataagagaggaatggacagaggactattccccacatactatatgtaccttgagaaagaggaaaaccagaagatttttctgctcgcggcaagaaaaagaaaaaaatcaaagaccgccaattacttgatctccatagatcccgtggacctgagccgcgagggcgagtcatatgtcgggaagctcaggagcaatcttatgggaacaaaatttactgtatacgacaggggaatctgccccatgaaaggacggggcttggtgggtgctgcccatacccgacaggagctcgccgccatttcctacgaaacaaacgtattaggtttcaaggggcctaggaaaatgtccgtgatcattcccggaatgacgctcaaccataagcaaatcccttaccagccacagaataaccatgacagcctgttgagtcgctggcagaatagaacaatggagaacctggttgagcttcacaacaaggcccccgtctggaattcggacactcagagctatgtgctgaactttaggggacgggtaacgcaggccagcgtgaaaaatttccaaatcgtacataaaaatgaccctgactacatcgttatgcagttcggccgggtggcagacgacgtgtttaccctagactacaactaccccctttgcgccgttcaagcgttcggcataggactcagcagttttgatagcaaactcgcctgcgagtag

SEQ ID NO: 137399 - DNA, 1329 bp, Artificial Sequence
  derived and/or modified sequence
atggaagcctctagatgcaggctcagtccgagcggggattccgtatttcacgaggagatgatgaaaatgcgacaggccaaacttgactaccagcgactcttacttgaaaaacgacagcgcaagaagaggctcgaacccttcatggtgcagcccaatccagaagcacggctccgacgtgcgaagccaagggccagcgacgaacagacacctctcgtcaattgccacacacctcattctaatgtcattctccacggcatagacgggcccgccgctgtattgaaacccgatgaggtgcacgcccctagtgtatcatctagcgtcgtggaggaagatgcagagaacacggtggataccgcctcgaagccagggctgcaggaaaggctccagaagcatgacatcagcgaatcagtcaattttgatgaggagactgacgggatcagccagtcagcttgcctggagaggcccaatagcgccagtagccagaacagtaccgacaccggtacctccgggtcggctacggcggcccaacccgctgacaacttattgggagatatcgacgacctagaagatttcgtttactccccagcacctcagggggtgacagtgcgctgtaggattatccgcgataagaggggcatggacagggggctcttccctacgtattatatgtatctcgaaaaagaggaaaatcaaaagatctttctcctcgccgcacgcaagaggaaaaaaagtaaaaccgccaattacctaattagtattgacccagtggacctttctcgagagggagagagttacgtaggaaagttacggagcaacctgatggggactaagtttaccgtatacgataggggcatatgccccatgaaaggaaggggcttagtgggggcagcccatacccgtcaggagctagctgctatctcatacgaaaccaatgtcttggggttcaagggcccaagaaagatgtctgtaattattcccggtatgacccttaaccacaaacagattccgtaccaacctcaaaataatcatgacagtcttctatcccggtggcaaaatagaaccatggagaatctcgtggaacttcataataaggctcctgtgtggaattcagacacccagtcttacgtgctgaatttcagggggcgggttacacaggcctctgttaagaactttcagatagtgcacaagaacgaccccgactatattgtcatgcagttcgggcgcgtggccgatgacgtcttcacactggactacaattatcccctgtgcgccgtacaggcattcggcataggtctatcttccttcgacagcaagctggcttgtgagtag

SEQ ID NO: 137400 - DNA, 513 bp, Artificial Sequence
  derived and/or modified sequence
atgatgaagatgcgacaagcaaaacttgactatcaacggctgttgctcgagaagagacagcggaagaaaagacttgagccattcatggtccagcccaatcccgaagcccgcctgcgaagagccaagccaagggcctcggatgagcagacacctttggtcaattgccacacccctcatagtaatgtcatcctgcatggtatcgacggccccgcagcagtcctgaagcccgacgaggtccatgcgcctagcgtgtcgtcttcagtggtggaagaggacgctgaaaacactgtggataccgcatccaagccaggtctgcaggaaagactccaaaaacacgacatttcagaatcagtgaattttgatgaagagaccgacggcatatctcagtcggcatgtcttgaacggcctaacagcgccagtagccaaaacagcactttttcatctttctgtcagaagactgaggataccggctatcgacattttcgcttctgctattgcagacccacttcctag

SEQ ID NO: 137401 - DNA, 801 bp, Artificial Sequence
  derived and/or modified sequence
atgcttaagactccttggatcctcctgccctctcaagattttcggtctgtctctaaatccatggataccgggacttcaggatcggcgacggctgctcaacccgccgacaatctgctgggcgacatagacgatttagaagacttcgtttactcacctgccccccaaggagtgaccgtcagatgccgtatcatcagagacaaaagaggaatggataggggtctgttcccaacctattatatgtatcttgagaaagaagaaaatcagaaaattttccttttagcagcacgtaagcggaagaaaagcaaaactgcaaattaccttatcagtattgaccctgtggacttgagtagagaaggggaaagttatgtgggcaagctgagatccaatctgatgggtacaaagttcacagtgtatgacagaggcatttgccccatgaagggtcgggggctggttggcgcggcgcatacccgtcaggagcttgccgctatatcttataatcatgactctctactgtctcgctggcagaaccgaactatggaaaacctggtggaattacataataaggcccccgtatggaatagcgacacacaatcttatgtgctgaattttcggggcagggtgactcaggctagcgtgaaaaatttccagatcgtgcacaaaaacgatcccgactatattgtgatgcaattcggaagagtggccgatgacgtttttactctcgactacaactaccctctttgcgccgtgcaggccttcggaatcgggttgtcctctttcgatagcaagctggcctgcgaatag

SEQ ID NO: 137402 - DNA, 1329 bp, Artificial Sequence
  derived and/or modified sequence
atggaggccagccgctgccgcctgagccccagcggggacagcgtcttccacgaggagatgatgaagatgaggcaggccaagctggactaccagaggctgctgctggagaagaggcagaggaagaagaggctggagcccttcatggtgcagcccaaccctgaggcccggctgcggcgggccaagccccgggccagtgatgagcagacccccctggtgaactgccacaccccccacagcaatgtcatcctgcacggcattgatggccctgctgctgtgctgaagccagatgaggtgcacgcccccagcgtgagcagctctgtggtggaggaggatgctgaaaatacagtggacacagccagcaagccaggcctgcaggagcggctgcagaagcatgacatcagcgagagcgtgaactttgatgaggagacagatggcatcagccagagcgcctgcctggagcggcccaacagcgccagcagccagaacagcacagacaccggcaccagcggcagcgccacagctgcccagcctgctgacaacctgctgggggacattgatgacctggaggactttgtgtacagccctgccccccagggcgtgacagtgcgctgccgcatcatccgggacaagaggggcatggaccggggcctcttccccacctactacatgtacctggagaaggaggagaaccagaagatcttcctgctggccgccaggaagaggaagaagagcaagacagccaactacctgatcagcattgatcctgtggacctgagccgggagggggagagctatgtgggcaagctgcggagcaacctgatgggcaccaagttcaccgtgtatgaccggggcatctgccccatgaagggccggggcctggtgggcgccgcccacacccggcaggagctggccgccatctcctatgagaccaacgtgctgggcttcaagggccccaggaagatgtctgtcatcatccctggcatgaccctgaaccacaagcagatcccctaccagccccagaacaaccacgacagcctgctgagccgctggcagaacagaaccatggagaacctggtggagctgcacaacaaggcccctgtgtggaacagcgacacccagagctatgtgctgaacttccggggccgggtgacccaggcctctgtgaagaacttccagatcgtgcacaagaatgaccctgactacatcgtgatgcagtttggccgggtggctgatgatgtgttcaccctggactacaactaccccctgtgtgctgtgcaggccttcggcatcggcctgagcagctttgacagcaagctggcctgtgagtag

SEQ ID NO: 137403 - DNA, 513 bp, Artificial Sequence
  derived and/or modified sequence
atgatgaagatgaggcaggccaagctggactaccagaggctgctgctggagaagaggcagaggaagaagaggctggagcccttcatggtgcagcccaaccctgaggcccggctgcggcgggccaagccccgggccagtgatgagcagacccccctggtgaactgccacaccccccacagcaatgtcatcctgcatggaattgatggccctgctgctgtgctgaagccagatgaggtgcacgcccccagcgtgagcagctctgtggtggaggaggatgctgagaacacagtggacacagccagcaagccaggcctgcaggagcggctgcagaagcatgacatcagcgagagcgtgaactttgatgaggagacagatggcatcagccagagcgcctgcctggagcggcccaacagcgccagcagccagaacagcaccttcagcagcttctgccagaagacagaggacaccggctaccgccacttccgcttctgctactgccggcccaccagctag

SEQ ID NO: 137404 - DNA, 801 bp, Artificial Sequence
  derived and/or modified sequence
atgctgaagaccccctggatcctgctgcccagccaggacttccgctctgtgtccaagtccatggacaccggcaccagcggcagcgccacagctgcccagcctgctgacaacctgctgggggacattgatgacctggaggactttgtgtacagccctgccccccagggcgtgacagtgcgctgccgcatcatccgggacaagaggggcatggaccggggcctcttccccacctactacatgtacctggagaaggaggagaaccagaagatcttcctgctggccgccaggaagaggaagaagagcaagacagccaactacctgatcagcattgatcctgtggacctgagccgggagggggagagctatgtgggcaagctgcggagcaacctgatgggcaccaagttcaccgtgtatgaccggggcatctgccccatgaagggccggggcctggtgggcgccgcccacacccggcaggagctggccgccatctcctacaaccacgacagcctgctgagccgctggcagaacagaaccatggagaacctggtggagctgcacaacaaggcccctgtgtggaacagcgacacccagagctatgtgctgaacttccggggccgggtgacccaggcctctgtgaagaacttccagatcgtgcacaagaatgaccctgactacatcgtgatgcagtttggccgggtggctgatgatgtgttcaccctggactacaactaccccctgtgtgctgtgcaggccttcggcatcggcctgagcagctttgacagcaagctggcctgtgagtag

SEQ ID NO: 137405 - DNA, 1329 bp, Artificial Sequence
  derived and/or modified sequence
atggaggccagccggtgccggctgagccccagcggcgacagcgtgtttcacgaggagatgatgaaaatgcgtcaggcaaagctggactaccaacgcctactcctggagaagcgccagcgcaaaaagcgtctcgagcctttcatggtccagcctaatccagaggccaggcttcgccgggctaaaccaagagcttctgacgagcagacacctttggtgaattgtcatactcctcatagcaatgtgatactacatggcattgatgggcctgccgccgttttgaaacccgatgaggttcatgctcccagcgtaagcagctcagtagttgaggaggatgccgagaacactgttgatacggcgtcaaagcccggcttgcaggagcggctacagaaacacgacatctcagaatccgtgaattttgacgaagaaaccgacggaatctctcagagtgcctgcctcgagagaccaaatagtgcttccagtcagaactcaaccgatacgggtactagcggctctgctaccgctgcccagcccgcagacaaccttttgggggacattgacgacttagaggactttgtctattcccctgctccccagggggtgaccgtccggtgtagaatcatccgggataagagagggatggatcggggtctgttcccaacttactatatgtaccttgaaaaagaagaaaaccagaagatctttttactggcagcacggaaaaggaagaagtctaagaccgctaactatctcattagcatcgacccagttgatttgagcagggagggtgagagttatgttggaaagttgcgtagcaatcttatggggaccaaatttacggtgtacgaccgaggaatctgccctatgaaagggcgtggactggtaggtgcggcccataccagacaagagttggccgcaatctcatatgagactaacgtccttggcttcaagggcccacgcaagatgtctgtcattatcccgggtatgacgctcaatcacaagcagatcccatatcagccacagaacaaccacgatagccttctgtcccggtggcagaatcggacaatggaaaatctggttgaacttcacaacaaggctcctgtatggaattcagacacccaatcctatgtgcttaactttaggggccgcgtgacccaggccagcgttaagaacttccagattgttcataagaacgacccagactacatcgtgatgcagttcggcagagtcgctgatgacgtttttacgctggattacaactaccccctgtgtgccgttcaggcttttggcattggacttagttcgttcgattccaagctggcctgcgagtag

SEQ ID NO: 137406 - DNA, 1329 bp, Artificial Sequence
  derived and/or modified sequence
atggaggccagccggtgccggctgagccccagcggcgacagcgtgttccacgaagaaatgatgaagatgaggcaggccaaattggactatcagcgcctgctattggagaaacgccaaaggaaaaaacgtttggaaccatttatggtacagcccaatcctgaggctcggttgcggcgggccaagcctcgggctagtgatgagcagactccgctggttaattgccatacaccccactcaaatgtcattttacatggcatcgacggccctgctgcggtgctgaaaccagatgaggtacatgcaccctcagtaagtagctccgtagtggaagaagatgccgagaacacagttgacactgcaagtaagcccggactgcaggaacgccttcagaaacacgatatttcagagtctgtgaatttcgacgaggaaacagatggcatcagccaatcggcttgcctggagagacctaactccgcctctagtcaaaacagtacagacactggtacaagcggatccgcaacggccgcacagcctgccgataacttgttgggggatatcgacgatttggaggatttcgtatattctcccgccccccagggagtgacagtgcggtgccggattatcagagataagagaggcatggatcgaggcctgtttccaacctattatatgtatctggaaaaagaagaaaaccaaaagattttcctcctggcagcccgcaagaggaaaaaatccaagaccgcaaactacctgatcagcattgatccagtcgacctgagcagggagggggagagttatgtaggcaagttacggagtaacttaatgggaacaaaatttaccgtgtatgacaggggcatctgtcctatgaaaggcagagggttagtgggagcagcccatacccgccaggagcttgctgcaataagttacgagaccaatgtgttgggattcaagggaccaaggaagatgagtgtcatcattcctgggatgaccctcaaccacaaacagatcccctaccagccacagaacaatcatgacagcttgctttctagatggcaaaatagaaccatggagaacttggtcgaactgcacaataaagcacccgtctggaacagcgatacacaatcctacgtccttaacttccgaggaagagtaactcaggctagtgtcaagaatttccagatagtgcacaagaacgatcctgactacatcgtgatgcagttcgggcgggttgcggacgacgtgttcactctcgactacaattacccactgtgtgctgtgcaggccttcggaatcggtctatctagcttcgactccaaactggcttgcgagtag

SEQ ID NO: 137407 - DNA, 513 bp, Artificial Sequence
  derived and/or modified sequence
atgatgaagatgcggcaggccaagctggactaccagcggctgctgttggagaaaaggcagcgcaagaagagacttgagccctttatggtgcaacccaatccggaggccaggctgcgtagagctaaaccacgcgcatcagacgaacagacacccttagtcaactgtcatacaccccacagtaatgtgatcctccatggcattgatggaccagcggcagtcctgaaacccgacgaggtgcacgctccgtcggtgtccagctctgtggtggaagaggacgcagagaacactgtcgatacagccagcaaacctgggctgcaggaaagattgcagaaacacgatatttccgaatctgtgaactttgatgaagagacggatggaatttctcagtctgcttgcctcgagcgcccaaattccgcttcatcacaaaattccacgttctcgtcattttgtcagaaaaccgaagacacagggtatcgccacttccggttttgttattgcagacccacttcttag

SEQ ID NO: 137408 - DNA, 801 bp, Artificial Sequence
  derived and/or modified sequence
atgctgaagaccccctggatcctgctgcccagccaggacttccggtccgtttctaagagcatggatacaggcacatccgggagtgccaccgccgctcagcccgctgataacctccttggagatattgatgatctggaggacttcgtatatagccccgcacctcaaggcgtgaccgtcaggtgccgcatcattcgagacaagagggggatggatcgcgggttgttcccgacctactacatgtatcttgagaaggaggagaatcagaaaatttttctgctggcagcgcgcaagagaaaaaagtctaagaccgcaaattacctaatctcaatcgatccagttgacctgtcccgcgaaggagagtcctacgtgggcaaactccggtctaatctcatgggcactaaatttacagtatatgatagaggaatctgcccaatgaaggggagaggcttggttggcgctgcccatacacggcaggaactggctgcgatcagctataatcacgatagcctcctctctagatggcagaaccgcacaatggaaaacctggtggaactgcataataaggctcccgtttggaattctgatacccaatcctacgtcctgaacttccgggggcgcgtcacacaggccagcgtcaaaaatttccaaatcgttcacaagaatgatcccgactacatagtgatgcagtttggacgcgtcgccgatgatgttttcactctggactacaattaccctctctgtgcagtgcaggcctttgggatcgggctctcttcctttgacagcaagctggcctgtgagtag

SEQ ID NO: 137409 - DNA, 1329 bp, Artificial Sequence
  derived and/or modified sequence
atggaggcatccagatgtaggttatccccatctggcgactcagtttttcatgaagaaatgatgaagatgcggcaagcaaagctggactatcagcgcttgttgctggagaagcgccaacgcaagaagcggctggagccctttatggtccagccaaatcccgaggcacggttgaggcgcgcaaagcccagagcctccgatgagcaaacccctctagtgaattgtcacacacctcactccaacgtgatcctgcacggcattgatggacccgcagcggtgctgaagcccgatgaggtacacgctccctcagtgtcatctagtgtcgtggaggaggacgcagaaaacactgtggatactgctagtaagcctggcctgcaggaaaggctgcaaaaacatgatattagcgagagcgtaaatttcgacgaggagacagatggtatctctcagtccgcatgcctggagcggccaaattcagcttcaagccagaacagtactgatacaggcaccagcggtagcgctactgctgcccaacccgcagataatcttttaggggatatagatgacctagaagattttgtttattcgcccgcaccacaaggagttactgtccggtgccggatcatccgagataagagaggaatggacagagggctattccccacctactatatgtacctggagaaagaggagaatcagaagatcttcctgctggcagcgcgaaaaagaaagaaaagtaagactgctaattacttgatcagcatcgacccagtggacctgagcagggagggagaatcctatgtgggtaagctcaggagcaacttgatggggaccaaatttacagtttacgaccggggaatctgccctatgaagggaagaggactggtgggtgcagctcatacccgacaggagttagccgctatttcgtacgagactaacgtgttgggatttaaagggccacgaaagatgtctgttatcattcctggcatgaccctcaaccataagcaaatcccgtaccagccccagaataaccacgacagtctgctcagccgctggcagaacagaactatggagaatcttgtggagctacacaataaggcccctgtctggaattccgatacccagagctacgtgctgaacttccggggacgagttacccaggcaagtgtgaaaaatttccagattgtccataagaatgatcccgactatatcgtcatgcaatttggcagagtggctgacgacgtgttcaccctcgattacaactatcccttgtgcgcagtgcaggcatttggcatcggtctcagctcttttgactctaaattggcatgtgaatag

SEQ ID NO: 137410 - DNA, 1329 bp, Artificial Sequence
  derived and/or modified sequence
atggaggcctcacgttgccgtttgagtccatctggtgacagcgtctttcatgaggaaatgatgaagatgagacaagctaagctcgactaccaaaggctgctgcttgagaagagacaaaggaagaagcgccttgaaccattcatggtgcagccgaatcctgaagctcgcctgcgccgagcgaagccacgggcatctgacgagcaaacaccattggttaattgccataccccacactctaacgttattctccacggaatagacggcccagccgcagtgctgaagcctgatgaggtgcacgctcctagtgtcagcagcagcgtggtcgaagaggacgcagagaataccgtcgacactgcaagtaagcctggcctgcaggaacgtttgcagaagcacgatatttcagagagtgttaatttcgacgaggagaccgatggcattagtcagagcgcttgtctggagagacccaactctgcctctagccagaatagcacggacacaggaacaagcggaagcgccacagctgcccaacctgccgacaacctgctgggggatattgatgacctggaggacttcgtgtacagccctgcaccccagggtgtcaccgttagatgtcggataatccgcgacaaacgcggaatggaccgaggtctgttcccgacatactacatgtatctcgaaaaggaggagaaccagaaaatttttttattggctgccagaaaacgcaaaaaatccaagactgccaattatctgatctcaatcgatcctgtggacctgagtagggagggggaatcatacgtaggaaagctaagatctaatctcatgggcactaagtttaccgtgtatgataggggcatttgccctatgaaaggtagaggactggtgggggcagcccacactagacaggagctggcggcaatctcatacgaaactaacgtcctcggattcaaaggccctcgaaaaatgtccgtgataattccaggaatgaccctgaaccataaacagattccatatcaaccgcaaaacaaccacgattctctcttatctcgctggcagaaccggacgatggagaatctggttgagctccacaacaaggctccagtgtggaattccgatacccaatcttacgtgttgaacttcagaggccgtgtcacccaggcctctgtgaagaactttcaaatcgttcacaagaatgaccctgactatattgtgatgcagtttggtcgggtggcagacgatgtattcaccttagattacaattaccctctgtgtgccgttcaggctttcggaatcggcctgagttccttcgattccaaattggcttgcgagtag

SEQ ID NO: 137411 - DNA, 513 bp, Artificial Sequence
  derived and/or modified sequence
atgatgaaaatgagacaggcaaaactggattatcaacgcctgctgctcgaaaagaggcaacgtaagaagagactggaaccattcatggtgcagcccaaccccgaagccagattgagacgagctaaacctcgagcttccgacgagcaaaccccattggtgaattgccataccccccatagcaatgtcatccttcacggaatagatggaccagccgcagttctcaaaccagacgaggtccatgcaccatccgtgtcctctagcgtagtggaagaggatgctgaaaataccgtcgatacggcgtccaagccaggtctccaagagcggctgcagaaacatgacatcagtgaaagcgtcaactttgacgaggagactgatggtatttcccagtcggcctgtctcgagcgccctaacagtgccagctctcaaaatagcacctttagctcattctgtcagaaaacagaagatactggttatcgccattttagattttgctattgcagacccacatcgtag

SEQ ID NO: 137412 - DNA, 801 bp, Artificial Sequence
  derived and/or modified sequence
atgctgaagaccccatggatacttctgcccagtcaggactttcgtagtgtgagtaaaagtatggacaccggaacaagtggctccgccaccgccgcacaaccggcagataatctgttgggggacatcgacgacctggaggactttgtctattcccccgctccacagggagtgacggtgcggtgccggattatccgggacaagagagggatggatcggggattatttccaacatactacatgtacctggaaaaggaagaaaaccagaaaatttttttgctggctgctcgcaaacggaaaaagagtaaaaccgcgaattaccttatatcaatcgatccggtggacctgtctagagagggggagtcatacgttggcaagctgaggtccaacctgatgggtactaaatttacagtttatgatcgtgggatttgtcccatgaaaggcaggggcctggttggtgcggctcatacccgccaggagctggcggctatctcctataaccacgactctctgctctctcgctggcaaaacaggaccatggagaatctggtggaactccataataaggccccagtctggaactctgatacccagtcttacgtgctcaattttagaggtcgcgtgacccaggcctccgtgaagaatttccaaatagtgcacaagaacgatcccgactatatcgtcatgcagttcgggagagtcgccgatgatgtgtttacactggattacaactaccctctgtgtgctgtccaagcgttcggcatcggcctgtcaagcttcgactcaaaactggcttgtgaatag

SEQ ID NO: 137413 - DNA, 2175 bp, Artificial Sequence
  derived and/or modified sequence
acgcggcggcgtgccagcctagccactctagcgacggcggggaagagtgtgtacgtggtgggggcttcctcggtggcgggcatggaggcttcgcgctgccggctcagtcccagcggcgacagtgtcttccatgaagaaatgatgaagatgcgacaggctaagctggattatcagaggctactacttgagaagaggcaaaggaaaaagcgccttgagccatttatggtgcagcccaatccagaagccaggctacgtcgggcaaagccaagggccagtgatgagcagactcccttggtgaactgtcatactccccacagcaatgtcatcttacatggtattgatggtccagctgctgtcctgaaaccagacgaagttcatgctccatcagtaagctcctctgttgtggaagaagatgctgaaaacaccgtggatactgcttccaagccaggacttcaggagcgtctccaaaagcatgatatctctgaaagtgtgaacttcgatgaggagactgatggaatatcccagtcagcatgtttagaaagacccaattctgcatcaagccagaattcaaccgatacaggcacttccggttctgctactgccgcccaaccagctgataacctcctgggagacatagacgacctggaggactttgtgtatagtcctgcccctcaaggtgtcacagtaagatgtcggataatccgggataaaaggggaatggatcggggtctcttccccacctactatatgtacttggaaaaagaagaaaatcagaagatatttcttcttgcagctagaaagcggaaaaagagcaaaacagccaactaccttatctccattgatccagttgatttatctcgtgaaggagaaagttatgtcggcaagcttagatccaacctcatggggaccaagtttacagtttatgaccgtggcatctgccccatgaagggccggggtttggtaggagcggcccacacccggcaggagctggctgccatctcctatgaaacaaacgtacttggatttaaaggtcctaggaaaatgtctgtgatcattcctggaatgacactgaatcataagcagatcccctatcagccacaaaacaaccatgacagtttgctctcaaggtggcagaacagaactatggaaaatctggttgagctgcacaacaaggcccccgtctggaacagtgacactcagtcctatgtcctcaacttccgtggccgggtcactcaggcgtctgtgaagaacttccagatagtccacaaaaatgaccctgattatatagtcatgcagtttggacgtgtggcagatgacgtgttcacactggattacaactacccactttgtgcagtacaggcctttggcatcggtctttctagctttgacagtaagctggcgtgtgaatgagagaacagtcaggcagggagcccttctccccacagagctttcaggagcagacagtggcctccccttcccctccctgccccaggacttaaagagcaatagtttgccccttttggaatgatctctgaatatataaaacacacacacaaagagcaatagtttgccccttttggaacgacccctgaatatataaaacacacacacgaagagcaatagtttgccccttttggaacgacccctgaatatataaaacacacacacaccccgcgcactctcactccttttccaggtttcatagacttggtgagggatcacagcttagcatgggtgagagatgatttaaagcacagggagattcttgtcacattggggtctccaaagctagaatgggatttcatgtgcttggaaacttgcagtagaatcagggactgacatcgcagttcctctcctctcttcattccctcacagcagattggccggcaccaatcttagtcaagagtggctgtgatcacatttgtgatcaattatgtgagaattttatataattgtcttcatttcaattaaggctgaaagcataaactctagaggtgactcagtcaggactgacagtaatgtgataattgccttcattttcaacccaggagtgcctctcacagctatatgactacggatccattagtgaggagcgacacacacacctgtaggcatcctgtgcaaacactttgtcattatcaagagagatggcagtattgaccatttagtttagtt

SEQ ID NO: 137414 - DNA, 3076 bp, Artificial Sequence
  derived and/or modified sequence
gcgacggcggggaagagtgtgtacgtggtgggggcttcctcggtggcgggcatggaggcttcgcgctgccggctcagtcccagcggcgacagtgtcttccatgaagaaatgatgaagatgcgacaggctaagctggattatcagaggctactacttgagaagaggcaaaggaaaaagcgccttgagccatttatggtgcagcccaatccagaagccaggctacgtcgggcaaagccaagggccagtgatgagcagactcccttggtgaactgtcatactccccacagcaatgtcatcttacatggtattgatggtccagctgctgtcctgaaaccagacgaagttcatgctccatcagtaagctcctctgttgtggaagaagatgctgaaaacaccgtggatactgcttccaagccaggacttcaggagcgtctccaaaagcatgatatctctgaaagtgtgaacttcgatgaggagactgatggaatatcccagtcagcatgtttagaaagacccaattctgcatcaagccagaattcaaccgatacaggcacttccggttctgctactgccgcccaaccagctgataacctcctgggagacatagacgacctggaggactttgtgtatagtcctgcccctcaaggtgtcacagtaagatgtcggataatccgggataaaaggggaatggatcggggtctcttccccacctactatatgtacttggaaaaagaagaaaatcagaagatatttcttcttgcagctagaaagcggaaaaagagcaaaacagccaactaccttatctccattgatccagttgatttatctcgtgaaggagaaagttatgtcggcaagcttagatccaacctcatggggaccaagtttacagtttatgaccgtggcatctgccccatgaagggccggggtttggtaggagcggcccacacccggcaggagctggctgccatctcctatgaaacaaacgtacttggatttaaaggtcctaggaaaatgtctgtgatcattcctggaatgacactgaatcataagcagatcccctatcagccacaaaacaaccatgacagtttgctctcaaggtggcagaacagaactatggaaaatctggttgagctgcacaacaaggcccccgtctggaacagtgacactcagtcctatgtcctcaacttccgtggccgggtcactcaggcgtctgtgaagaacttccagatagtccacaaaaatgaccctgattatatagtcatgcagtttggacgtgtggcagatgacgtgttcacactggattacaactacccactttgtgcagtacaggcctttggcatcggtctttctagctttgacagtaagctggcgtgtgaatgagagaacagtcaggcagggagcccttctccccacagagctttcaggagcagacagtggcctccccttcccctccctgccccaggacttaaagagcaatagtttgccccttttggaatgatctctgaatatataaaacacacacacaaagagcaatagtttgccccttttggaacgacccctgaatatataaaacacacacacgaagagcaatagtttgccccttttggaacgacccctgaatatataaaacacacacgaagagcaatagtttgccccttttggaacgacccctgaatatataaaacacacacacgaagagcaatagtttgccccttttggaacgacccctgaatatataaaacacacacacaccccgcgcactctcactccttttccaggtttcatagacttggtgagggatcacagcttagcatgggtgagagatgatttaaagcacagggagattcttgtcacattggggtctccaaagctagaatgggatttcatgtgcttggaaacttgcagtagaatcagggactgacatcgcagttcctctcctctcttcattccctcacagcagattggccggcaccaatcttagtcaagagtggctgtgatcacatttgtgatcaattatgtgagaattttatataattgtcttcatttcaattaaggctgaaagcataaactctagaggtgactcagtcaggactgacagtaatgtgataattgccttcattttcaacccaggagtgcctctcacagctatatgactacggatccattagtgaggagcgacacacacacctgtaggcatcctgtgcaaacactttgtcattatcaagagagatggcagtattgaccatttagtttagttaaaaaaaaaaaaaaaaaggtggcaggagaggctttggggaggatcagccagcagacatgagcactgctggcccgtgtggcagagctgtggactttcttctcggctccctcaaccctggctcaggcacagaaggtgttttgctacgtttttttgattattacacccctccacgtattatgtgactcttacaccagttcacccttcccagaatgtatccaaaccttgagaatgcaggagctctgtgagctccaccgtcagcaccattcagctgcatcccttgtgcacagaactgtttgccagcgttgggtgggacacccgtggcggctgctccctcagacctcccttctgtggactgacctctcacctccgcctgttgttcctgcaccacatcagataagcatgtgaaggagggccaactggcagctgcgggacccttggcttgtcccccaccgacaagtcccacctgctgggtgaggacgagactgtttccatctcaggcatgtatcccaccaagtgcctccctcacagccatgcccagaagcctcacacctcgtcaccaccaccaccccccaccccatcctgaggcactgcctggcagataaccctggttggccacagaagctattaatacacgacagcatgtggggaaggacttatggtgggccaggtggacctcatcctgcttcttcctccctctggtttaaagagatatataaactaatttcacataatttgtgtgtgcaggtgattggtttttacataagtcctatttataccttttatatgttacagaaataaaagttaatttatataaaaatg

SEQ ID NO: 137415 - DNA, 1373 bp, Artificial Sequence
  derived and/or modified sequence
actctagcgacggcggggaagagtgtgtacgtggtgggggcttcctcggtggcgggcatggaggcttcgcgctgccggctcagtcccagcggcgacagtgtcttccatgaagaaatgatgaagatgcgacaggctaagctggattatcaggtattgatggtccagctgctgtcctgaaaccagacgaagttcatgctccatcagtaagctcctctgttgtggaagaagatgctgaaaacaccgtggatactgcttccaagccaggacttcaggagcgtctccaaaagcatggatacaggcacttccggttctgctactgccgcccaaccagctgataacctcctgggagacatagacgacctggaggactttgtgtatagtcctgcccctcaaggtgtcacagtaagatgtcggataatccgggataaaaggggaatggatcggggtctcttccccacctactatatgtacttggaaaaagaagaaaatcagaagatatttcttcttgcagctagaaagcggaaaaagagcaaaacagccaactaccttatctccattgatccagttgatttatctcgtgaaggagaaagttatgtcggcaagcttagatccaacctcatggggaccaagtttacagtttatgaccgtggcatctgccccatgaagggccggggtttggtaggagcggcccacacccggcaggagctggctgccatctcctataaccatgacagtttgctctcaaggtggcagaacagaactatggaaaatctggttgagctgcacaacaaggcccccgtctggaacagtgacactcagtcctatgtcctcaacttccgtggccgggtcactcaggcgtctgtgaagaacttccagatagtccacaaaaatgaccctgattatatagtcatgcagtttggacgtgtggcagatgacgtgttcacactggattacaactacccactttgtgcagtacaggcctttggcatcggtctttctagctttgacagtaagctggcgtgtgaatgagagaacagtcaggcagggagcccttctccccacagagctttcaggagcagacagtggcctccccttcccctccctgccccaggacttaaagagcaatagtttgccccttttggaatgatctctgaatatataaaacacacacacaaagagcaatagtttgccccttttggaacgacccctgaatatataaaacacacacacgaagagcaatagtttgccccttttggaacgacccctgaatatataaaacacacacgaagagcaatagtttgccccttttggaacgacccctgaatatataaaacacacacacgaagagcaatagtttgccccttttggaacga

SEQ ID NO: 137416 - DNA, 1329 bp, Artificial Sequence
  derived and/or modified sequence
atggaggccagcagatgcagactgagccccagcggcgacagcgtgttccacgaggagatgatgaagatgagacaggccaagctggactaccagagactgctgctggagaagagacagagaaagaagagactggagcccttcatggtgcagcccaaccccgaggccagactgagaagagccaagcccagagccagcgacgagcagacccccctggtgaactgccacaccccccacagcaacgtgatcctgcacggcatcgacggccccgccgccgtgctgaagcccgacgaggtgcacgcccccagcgtgagcagcagcgtggtggaggaggacgccgagaacaccgtggacaccgccagcaagcccggcctgcaggagagactgcagaagcacgacatcagcgagagcgtgaacttcgacgaggagaccgacggcatcagccagagcgcctgcctggagagacccaacagcgccagcagccagaacagcaccgacaccggcaccagcggcagcgccaccgccgcccagcccgccgacaacctgctgggcgacatcgacgacctggaggacttcgtgtacagccccgccccccagggcgtgaccgtgagatgcagaatcatcagagacaagagaggcatggacagaggcctgttccccacctactacatgtacctggagaaggaggagaaccagaagatcttcctgctggccgccagaaagagaaagaagagcaagaccgccaactacctgatcagcatcgaccccgtggacctgagcagagagggcgagagctacgtgggcaagctgagaagcaacctgatgggcaccaagttcaccgtgtacgacagaggcatctgccccatgaagggcagaggcctggtgggcgccgcccacaccagacaggagctggccgccatcagctacgagaccaacgtgctgggcttcaagggccccagaaagatgagcgtgatcatccccggcatgaccctgaaccacaagcagatcccctaccagccccagaacaaccacgacagcctgctgagcagatggcagaacagaaccatggagaacctggtggagctgcacaacaaggcccccgtgtggaacagcgacacccagagctacgtgctgaacttcagaggcagagtgacccaggccagcgtgaagaacttccagatcgtgcacaagaacgaccccgactacatcgtgatgcagttcggcagagtggccgacgacgtgttcaccctggactacaactaccccctgtgcgccgtgcaggccttcggcatcggcctgagcagcttcgacagcaagctggcctgcgagtag

SEQ ID NO: 137417 - protein, 1017 aa, Artificial Sequence
  derived and/or modified sequence
MKLLKPTWVNHNGKPIFSVDIHPDGTKFATGGQGQDSGKVVIWNMSPVLQEDDEKDENIPKMLCQMDNHLACVNCVRWSNSGMYLASGGDDKLIMVWKRATYIGPSTVFGSSGKLANVEQWRCVSILRNHSGDVMDVAWSPHDAWLASCSVDNTVVIWNAVKFPEILATLRGHSGLVKGLTWDPVGKYIASQADDRSLKVWRTLDWQLETSITKPFDECGGTTHVLRLSWSPDGHYLVSAHAMNNSGPTAQIIEREGWKTNMDFVGHRKAVTVVKFNPKIFKKKQKNGSSAKPSCPYCCCAVGSKDRSLSVWLTCLKRPLVVIHELFDKSIMDISWTLNGLGILVCSMDGSVAFLDFSQDELGDPLSEEEKSRIHQSTYGKSLAIMTEAQLSTAVIENPEMLKYQRRQQQQQLDQKSAATREMGSATSVAGVVNGESLEDIRKNLLKKQVETRTADGRRRITPLCIAQLDTGDFSTAFFNSIPLSGSLAGTMLSSHSSPQLLPLDSSTPNSFGASKPCTEPVVAASARPAGDSVNKDSMNATSTPAALSPSVLTTPSKIEPMKAFDSRFTERSKATPGAPALTSMTPTAVERLKEQNLVKELRPRDLLESSSDSDEKVPLAKASSLSKRKLELEVETVEKKKKGRPRKDSRLMPVSLSVQSPAALTAEKEAMCLSAPALALKLPIPSPQRAFTLQVSSDPSMYIEVENEVTVVGGVKLSRLKCNREGKEWETVLTSRILTAAGSCDVVCVACEKRMLSVFSTCGRRLLSPILLPSPISTLHCTGSYVMALTAAATLSVWDVHRQVVVVKEESLHSILAGSDMTVSQILLTQHGIPVMNLSDGKAYCFNPSLSTWNLVSDKQDSLAQCADFRSSLPSQDAMLCSGPLAIIQGRTSNSGRQAARLFSVPHVVQQETTLAYLENQVAAALTLQSSHEYRHWLLVYARYLVNEGFEYRLREICKDLLGPVHYSTGSQWESTVVGLRKRELLKELLPVIGQNLRFQRLFTECQEQLDILRDK

SEQ ID NO: 137418 - protein, 810 aa, Artificial Sequence
  derived and/or modified sequence
MKLLKPTWVNHNGKPIFSVDIHPDGTKFATGGQGQDSGKVVIWNMSPVLQEDDEKDENIPKMLCQMDNHLACVNCVRWSNSGMYLASGGDDKLIMVWKRATYIGPSTVFGSSGKLANVEQWRCVSILRNHSGDVMDVAWSPHDAWLASCSVDNTVVIWNAVKFPEILATLRGHSGLVKGLTWDPVGKYIASQADDRSLKVWRTLDWQLETSITKPFDECGGTTHVLRLSWSPDGHYLVSAHAMNNSGPTAQIIEREGWKTNMDFVGHRKAVTVVKFNPKIFKKKQKNGSSAKPSCPYCCCAVGSKDRSLSVWLTCLKRPLVVIHELFDKSIMDISWTLNGLGILVCSMDGSVAFLDFSQDELGDPLSEEEKSRIHQSTYGKSLAIMTEAQLSTAVIENPEMLKYQRRQQQQQLDQKSAATREMGSATSVAGVVNGESLEDIRKNLLKKQVETRTADGRRRITPLCIAQLDTGDFSTAFFNSIPLSGSLAGTMLSSHSSPQLLPLDSSTPNSFGASKPCTEPVVAASARPAGDSVNKDSMNATSTPAALSPSVLTTPSKIEPMKAFDSRFTERSKATPGAPALTSMTPTAVERDVHRQVVVVKEESLHSILAGSDMTVSQILLTQHGIPVMNLSDGKAYCFNPSLSTWNLVSDKQDSLAQCADFRSSLPSQDAMLCSGPLAIIQGRTSNSGRQAARLFSVPHVVQQETTLAYLENQVAAALTLQSSHEYRHWLLVYARYLVNEGFEYRLREICKDLLGPVHYSTGSQWESTVVGLRKRELLKELLPVIGQNLRFQRLFTECQEQLDILRDK

SEQ ID NO: 137419 - protein, 604 aa, Artificial Sequence
  derived and/or modified sequence
MLSSHSSPQLLPLDSSTPNSFGASKPCTEPVVAASARPAGDSVNKDSMNATSTPAALSPSVLTTPSKIEPMKAFDSRFTERSKATPGAPALTSMTPTAVERLKEQNLVKELRPRDLLESSSDSDEKVPLAKASSLSKRKLELEVETVEKKKKGRPRKDSRLMPVSLSVQSPAALTAEKEAMCLSAPALALKLPIPSPQRAFTLQVSSDPSMYIEVENEVTVVGGVKLSRLKCNREGKEWETVLTSRILTAAGSCDVVCVACEKRMLSVFSTCGRRLLSPILLPSPISTLHCTGSYVMALTAAATLSVWDVHRQVVVVKEESLHSILAGSDMTVSQILLTQHGIPVMNLSDGKAYCFNPSLSTWNLVSDKQDSLAQCADFRSSLPSQDAMLCSGPLAIIQGRTSNSGRQAARLFSVPHVVQQETTLAYLENQVAAALTLQSSHEYRHWLLVYARYLVNEGSAEEGAAEGAATSHRAEPPIPAPLHRVSGTARHPEGQVACPSLPWLQQGQGHTLAADDMQDRLSPDQAVGGGDTGRRCAVLHQRQPSSLGRCALCPGSDIASGGGSSSLPPSPRCGARAGALPRCPGASKAVPGLPSPARPQGGH

SEQ ID NO: 137420 - protein, 973 aa, Artificial Sequence [sequence omitted]

SEQ ID NO: 137421 - protein, 806 aa, Artificial Sequence
  derived and/or modified sequence
MSPVLQEDDEKDENIPKMLCQMDNHLACVNCVRWSNSGMYLASGGDDKLIMVWKRATYIGPSTVFGSSGKLANVEQWRCVSILRNHSGDVMDVAWSPHDAWLASCSVDNTVVIWNAVKFPEILATLRGHSGLVKGLTWDPVGKYIASQADDRSLKVWRTLDWQLETSITKPFDECGGTTHVLRLSWSPDGHYLVSAHAMNNSGPTAQIIEREGWKTNMDFVGHRKAVTVVKFNPKIFKKKQKNGSSAKPSCPYCCCAVGSKDRSLSVWLTCLKRPLVVIHELFDKSIMDISWTLNGLGILVCSMDGSVAFLDFSQDELGDPLSEEEKSRIHQSTYGKSLAIMTEAQLSTAVIENPEMLKYQRRQQQQQLDQKSAATREMGSATSVAGVVNGESLEDIRKNLLKKQVETRTADGRRRITPLCIAQLDTGDFSTAFFNSIPLSGSLAGTMLSSHSSPQLLPLDSSTPNSFGASKPCTEPVVAASARPAGDSVNKDSMNATSTPAALSPSVLTTPSKIEPMKAFDSRFTERSKATPGAPALTSMTPTAVERLKEQNLVKELRPRDLLESSSDSDEKVPLAKASSLSKRKLELEVETVEKKKKGRPRKDSRLMPVSLSVQSPAALTAEKEAMCLSAPALALKLPIPSPQRAFTLQVSSDPSMYIEVENEVTVVGGVKLSRLKCNREGKEWETVLTSRILTAAGSCDVVCVACEKRMLSVFSTCGRRLLSPILLPSPISTLHCTGSYVMALTAAATLSVWDVHRQVVVVKEESLHSILAGTWFLTSRTHWLSVQTLGAACHPRTPCCAQDR

SEQ ID NO: 137422 - DNA, 3054 bp, Artificial Sequence
  derived and/or modified sequence
atgaaactgctgaagcccacatgggtcaatcacaacggcaaacccatcttctctgtggacatccatccagacggcaccaaatttgcgacggggggacagggtcaggatagcggcaaggttgttatctggaacatgtccccggtcttgcaggaagacgatgagaaggatgaaaacatcccaaagatgctgtgccagatggataatcatctagcctgtgtgaattgcgtgaggtggagcaactccggcatgtatctggcttcaggtggggacgacaaattgatcatggtctggaaacgagctacatatatcggcccttcaacagttttcggaagcagcggcaaactggccaatgtggaacaatggcggtgcgtgtccattctgagaaaccactctggagacgtgatggatgtggcctggtcgccccatgatgcctggctggcatcctgttcggttgataacacggtcgtgatttggaacgcagtgaaatttcctgagatcctcgcaactctgcgtggacattcgggcctggtgaaggggctgacctgggatccagtgggcaaatacatcgccagccaggccgatgacagatcactgaaagtgtggagaaccctggattggcagctggaaactagcatcaccaagccgttcgacgagtgtggcggaaccacccatgttctacgcctttcgtggtcccccgacggacactatctagtcagtgctcatgccatgaataatagcggacctaccgctcagatcatcgaacgcgaaggctggaagacgaacatggacttcgtcggccaccggaaggcagtaacagtagtcaagtttaacccgaaaattttcaaaaagaaacagaagaacggctccagcgccaaaccaagctgcccatactgctgttgcgctgttggatcaaaggacagatctctgagcgtgtggctcacctgcctgaagaggcctttggtggtaattcatgagcttttcgataagtcgataatggacatctcttggacactgaatgggttgggcatcctggtatgctccatggacgggtccgtcgcattcctcgacttttcacaggatgagttaggagatcccctgagtgaagaagagaagtctaggatccatcaatccacttacggcaagagcttagccattatgaccgaagcacagttgtctacagctgtaatagagaatccggagatgcttaagtatcagaggcgccagcagcagcaacaactggaccagaagtccgccgccacgagagaaatgggttcggctacatccgtcgccggtgtggtcaacggtgaatcactggaggatattaggaaaaacctgcttaagaagcaagtagagacccgtacggcagacggccgtcgccgaatcacaccgctgtgcatcgctcagttggacacgggcgatttctctaccgcttttttcaactcaatacccttgtcagggtccttggctggaaccatgctttccagtcatagttccccgcagctccttcctctggatagttctacacccaactcctttggtgcgagcaagccctgtaccgagcctgtggtggccgcttctgcacgcccggcaggtgatagcgttaacaaggactctatgaacgctacgagtaccccagcagcactttcaccttcggtgctcactaccccctctaagatcgagccaatgaaagccttcgactcccggtttactgaacgatctaaggccacgccgggtgccccagcattgacaagtatgacacccactgcagtagagcgattgaaagagcaaaacttagtaaaggagcttagaccgcgcgacttactggagagctcttccgatagcgacgagaaagtgcccctcgccaaggctagttctctttccaagaggaaactcgaattggaggtagagaccgtggagaagaagaaaaagggtcgccctcgcaaagattccaggctgatgccagtgtccctctctgtgcagagtccggctgcattgacggcggagaaggaagcaatgtgtttgtcagctcccgcactggctctgaagctgcctattcccagtccccagagggccttcacccttcaggtgtctagtgacccatccatgtacatcgaagtcgagaatgaagtcaccgtggtcggtggcgtaaaattatcacgacttaaatgtaaccgtgaggggaaggagtgggaaaccgtcctaacaagcaggattcttacggccgccggttcctgcgacgttgtatgcgtcgcatgtgaaaagcgaatgctgtcggtgttcagtacctgcggccgccggctattgtcaccaatcctgctgccttctccaatttccactctccactgcaccgggagctatgtaatggccctgaccgccgccgccactttgagcgtttgggacgtccacaggcaagtggttgttgttaaagaggagtccctgcactccatcctggctgggagcgatatgacagtgagtcagattctactcacccagcacgggatacctgtgatgaacctctctgacggtaaagcgtactgtttcaacccgtctctatccacttggaacctagtgtccgataaacaggactccttagcccaatgcgcagattttagatcaagcttgccaagccaagatgctatgctttgtagtggccctctcgcaatcattcagggcagaaccagtaattccggacgtcaggccgcccgcctgttcagcgtgccgcacgttgttcagcaggaaacaacgctggcttaccttgaaaatcaggtggccgccgccctcacccttcaatcctcccacgaataccgtcactggttgctggtctacgctagatacctggtcaatgagggattcgaataccgcctgagggagatctgtaaagatctgcttggtcctgtgcattattctaccggtagtcagtgggagtccacagtagtgggacttagaaagcgagagctgctcaaggagctgctgccagtgatcggccagaaccttagatttcagcgcctttttaccgaatgtcaggagcagctagacattcttcgagacaagtag

SEQ ID NO: 137423 - DNA, 2433 bp, Artificial Sequence
  derived and/or modified sequence
atgaagcttctgaagcccacgtgggtgaatcataatgggaaaccaatcttctccgtagatatacacccagacggaaccaagtttgctacaggcggccagggtcaagactcaggtaaagtcgtcatttggaacatgtcccctgttttgcaggaagatgacgagaaagatgagaacattcccaaaatgctttgtcagatggataaccacctcgcatgcgtgaactgcgtgaggtggagtaattccggcatgtacctggcttctgggggcgacgacaaactcatcatggtgtggaagcgcgcgacttacatcgggccctctacagtcttcggatccagcggcaagctggcaaacgtcgaacagtggcggtgcgtctctatccttcgcaatcactctggcgatgttatggatgtcgcctggtcacctcacgacgcatggctcgcgagctgcagcgtcgacaacacggttgttatctggaatgccgtaaaattcccagagattctggccacacttcgcggacattccgggttggtcaaaggtctgacatgggatcctgtcgggaagtacatcgcaagtcaggcagacgaccgttccttgaaggtatggcggaccctagactggcaactagaaacgagcatcactaagccattcgatgaatgcggggggactacccatgtgcttaggttgagttggtcccccgatggccactatttggtgagcgcgcacgctatgaacaactccggaccaacagcgcaaattattgagcgggagggatggaagaccaacatggattttgtcgggcaccgaaaagccgtgactgtggtgaagtttaatcccaagatctttaagaagaagcagaaaaacggctcttcggcaaagccatcctgtccctattgctgttgtgccgtgggaagcaaagatcggagcctttctgtatggctgacctgcctcaaacgccctcttgttgtaattcacgaacttttcgataaatccattatggatatctcctggaccctgaatggcttgggtatactggtatgtagcatggatgggagtgtggcattcctggactttagccaagatgagctgggagatcctctgtcagaggaagagaagtcgcgcattcaccaatccacctatggtaaatcgctcgccatcatgacggaggcccagttaagtaccgccgtgatcgagaatcccgaaatgctcaagtaccagcgcaggcagcagcaacaacaactggaccaaaaaagcgccgccacaagggaaatggggagcgccaccagcgtggccggagtagtcaacggtgagtcgctggaagatatccggaagaacttattgaaaaaacaagtggaaacacgtaccgctgacggccggcgcaggatcaccccactctgtattgcacagctggacactggcgacttcagtaccgccttttttaattccattccattgagcggctccttggctgggaccatgctgtcctctcatagctctcctcagctcttaccactcgactcaagcaccccaaactcatttggcgcctccaagccctgcacagaacccgttgtggctgcttccgcgagacctgccggtgactcggtgaacaaagattcaatgaatgccacctcaacacccgcagcactgagccccagcgtactgaccaccccatctaaaatagagcctatgaaagctttcgactcccgatttaccgaacgttccaaggccactccgggtgctccagcgctgacatcaatgactccgaccgccgtggagcgcgatgtgcaccggcaggtcgtggtagtcaaggaagagtctctgcacagcattctcgccggttcagatatgaccgtgtcacagattctgttgacccagcacggtattcccgttatgaacctttctgacggcaaggcctattgctttaatccttcccttagcacctggaacctcgtgtccgataaacaggactccctggcccaatgtgctgattttagaagcagtctgccttcccaggacgcgatgttgtgcagcgggccccttgccatcattcagggccgcacgagtaactcaggacgacaagcagcccgattattttcagtgcctcacgtggttcagcaggagactacacttgcttacctggagaaccaggttgctgccgcgctcacccttcagagctcccacgaatatcgtcattggctgctagtgtacgcacgatatctggtaaacgagggatttgagtaccgtctgcgtgagatttgtaaggacctgctgggtccggtccattattctacaggcagccaatgggagtccacagtcgttggattacgcaagagagaactcctgaaagagcttcttccagtgatcggtcaaaacctgcggttccagcggctgttcacggaatgccaggagcagctggacatccttcgcgataaatag

SEQ ID NO: 137424 - DNA, 1815 bp, Artificial Sequence
  derived and/or modified sequence
atgctttccagccacagttcccctcagttgctacctctagattcatccacccctaattccttcggtgcctcaaaaccatgtactgagcccgtggtggccgcctcagcccgcccggcgggcgacagcgtcaacaaggattccatgaatgctaccagcactcccgcagccctctccccttccgtgcttacgacccccagcaagattgaacccatgaaagcttttgacagcagattcactgaacggtccaaggctaccccaggcgcgcccgccctgacctcaatgacacctactgccgtcgagcgcctgaaggaacagaacctggtgaaggagctccgacccagagacctgctggagtctagtagtgatagtgacgagaaggtgcctctggccaaagctagctccctctctaaacgaaagttagaattggaagtcgaaacagtggagaaaaagaaaaaaggtaggccccggaaggactcccgcttaatgcctgtgagcctctctgttcagagtccagccgcattgacagcagagaaagaggctatgtgcttgtccgcaccggccctcgcactgaaactccctatcccaagcccacaaagggcattcaccctacaagtcagttccgaccctagcatgtatatcgaggtggagaacgaagttaccgtggtcggaggagtcaaactctccagactgaaatgcaacagggaaggcaaggagtgggagaccgttctcactagtcggatcctcacggcagcaggcagttgcgacgtcgtgtgcgtcgcctgcgagaaaagaatgttatctgtgttcagcacatgcgggcgccgtctcctgtcacccatcctactgccaagccccatcagcacgctgcactgtacgggttcctacgtgatggccctgaccgccgcagctaccctaagcgtttgggacgtccatcggcaagttgtggtggtgaaagaggagtcactgcacagtatacttgccgggtctgacatgaccgtatctcagattctcctgacccagcacggcattcctgtgatgaatctgagtgacggaaaggcttattgttttaacccatcattgtccacatggaatctggtctccgacaagcaggactccctcgcacagtgcgcggacttccgtagttctctgcctagccaagacgcaatgctctgctccgggccacttgccattattcagggccggacaagtaacagcggaaggcaggcagctaggctgttttctgtgccccacgtcgtccagcaagagactacactggcctacttggaaaatcaggtggccgctgctctgacactgcagtcatcacatgagtatcgtcactggctcttggtttacgctcgctatctggtgaacgaaggctctgccgaggagggcgccgcagaaggcgctgccacaagtcatagagccgagcctcctatccccgccccactacacagagtaagcggtaccgcccgacatcccgaagggcaggtggcttgtccaagcttaccatggcttcagcaaggacaagggcatactcttgccgcggatgacatgcaagaccggctgagccccgaccaagctgtaggcggcggagatacgggtcgccgctgcgctgtgctgcaccagagacagccatcatccctgggtaggtgcgctttatgccctggaagcgatatcgcgtccggtggcgggtctagtagtctccctcccagccctagatgtggtgctagggcaggcgcattacctaggtgcccaggagcatctaaggccgtgccggggctcccttcacccgccaggccccaaggcggacactag

SEQ ID NO: 137425 - DNA, 2922 bp, Artificial Sequence
  derived and/or modified sequence
atgtccccggttttgcaagaagatgacgagaaggatgagaatatccctaagatgctgtgccagatggacaatcatctggcctgcgtaaactgcgtaaggtggtccaattcaggcatgtatctcgcatccggcggcgacgacaagctgattatggtgtggaaacgggctacgtacatcggcccatcaaccgtgttcggcagcagcggcaagctcgcaaacgtggaacagtggcggtgcgtgagcattctgcgcaaccactctggggatgttatggatgtagcctggtctccccatgatgcctggttggcgagctgttctgtggataacactgttgtcatctggaatgccgtgaagtttcctgagatcttggctaccctgagaggccactcaggactagtgaagggtttaacttgggatcctgtcgggaagtacattgcttctcaggccgacgatcgatcccttaaagtttggagaacactcgattggcagctggaaacaagtatcactaaacccttcgacgagtgtgggggaacgactcacgttttaagactaagctggagtcccgacggccattatctggtgtctgctcacgccatgaacaatagcggacctacagcccaaattatcgagcgagagggatggaagacgaatatggatttcgtcggccatagaaaagccgtgaccgtggtcaagtttaaccctaagattttcaagaagaaacagaaaaatggctcaagtgctaagccttcctgtccctactgctgctgcgcggttgggtctaaggaccgatccctgagcgtgtggctgacttgtctgaagagaccgctcgtggtgatccatgagcttttcgataagtcgatcatggacatctcgtggacactgaacggcctggggattctggtatgttccatggatggcagcgtggcctttctggatttttctcaggatgaacttggagatccacttagtgaagaggaaaagtccagaatccaccagagcacctatgggaagtctctcgccattatgactgaagcccagctcagtactgctgtcatcgagaatccagagatgctgaaataccaacgtcgacagcagcagcaacaacttgaccaaaagtccgccgcaacacgcgagatgggtagcgccaccagtgtcgcaggagtagtcaatggggagtccctggaagatatccggaaaaacctccttaagaaacaggttgaaactcgtactgccgacgggcgaagacggataactccactgtgcatagctcagctggatacaggagatttctccaccgccttctttaatagtatccccctgagcggttcacttgccgggaccatgctgtcctcccactcatccccacagctcttgcctctggacagcagcacccccaactcattcggagcaagcaagccctgcactgagccggtggtggccgcctcggcccgtcctgccggagactcggtgaacaaggactcaatgaacgctacttcaactcccgcagcgctcagccccagcgtgcttactaccccctccaagattgaacccatgaaagccttcgattctcggttcacagagcggtcaaaagccacccccggagcccctgcactgacctccatgacccctacggcagtagaaaggttgaaagagcagaatcttgtgaaggagctccgccctagagatctgctggagagcagcagcgattccgatgagaaggtgccactggccaaggccagttctctgtctaagaggaaactcgagttagaagtcgaaacagtggagaagaagaagaagggaaggcctaggaaggactccaggctgatgccagtctctctgtccgttcagtcaccagctgctctcaccgccgagaaggaagcaatgtgtttgtccgccccagccctcgccttgaagctccccatcccttccccacagagggcttttactttgcaagtgtcctcagatccttccatgtacatagaggttgaaaacgaagtgactgtggtcggaggggtcaaactctcgcggttaaagtgtaacagggaggggaaggagtgggaaactgtattaacctctcggatcttgacggcagccggcagttgtgatgtggtctgtgtcgcttgcgaaaagcggatgttatccgtgttcagcacatgcggcaggaggctgttgagtccaatcctgctgccctccccaatatcaaccctgcactgcacaggaagctatgtcatggcccttacagctgcagctactttgtctgtctgggacgtgcacaggcaggtcgtcgtcgtcaaggaagagtcgctacacagtattctggccggaagcgacatgactgttagccagattcttctcactcagcacggcattcccgtgatgaacctgtcagacggtaaagcttattgttttaacccttcactgagtacctggaatttagtatctgacaagcaggacagcctggcccaatgtgccgatttcagatccagcctgcctagtcaagacgctatgttgtgtagtgggccgctcgctattatacaaggacgcacgtccaattctgggcgccaggcagcgcgcctcttcagtgtgccccacgtggtgcaacaagaaaccacgcttgcctatttggaaaaccaggtagccgccgctcttacactacagtcctcccacgagtatcggcactggctgctcgtgtacgccaggtatctcgttaatgagggcttcgagtaccgactgcgggaaatttgtaaagacctactaggacccgttcactatagtaccggatctcagtgggagtctacagtggtggggctccggaagagagaactactgaaagagctgctcccagtaattggacagaacctgcggtttcaaagactcttcaccgaatgccaggagcagttggatatccttcgggacaagtag

SEQ ID NO: 137426 - DNA, 2421 bp, Artificial Sequence
  derived and/or modified sequence
atgtctccggtgctccaggaggacgacgagaaagacgaaaatattccaaagatgctctgccaaatggacaaccatttggcctgtgtgaattgtgttcgatggtccaattctgggatgtatcttgcaagtggcggggatgacaaactcatcatggtgtggaagcgggctacatacatcggtcctagcacagtgttcgggagcagtggcaaattggccaatgtagaacaatggagatgcgtctccattctacgtaatcacagcggggacgtaatggacgtggcctggtccccacacgacgcttggcttgccagctgcagtgtcgataacaccgtagtcatttggaatgcggtgaaatttccggaaatcttagcaacccttcgtggacacagcggactcgtgaaaggattaacatgggaccctgtcggaaaatacatagccagtcaagccgacgaccgtagtctcaaggtgtggagaactctggactggcaactagaaactagcataacgaaaccctttgatgagtgtggcggaaccacacatgtgctgagactgtcttggtcccctgacggacactacttagtaagtgcgcacgctatgaacaacagcgggccaacggcccaaatcattgaacgcgaaggctggaagaccaacatggatttcgttggtcacaggaaggccgttaccgttgttaagtttaaccccaagatcttcaaaaaaaaacagaaaaatggaagtagtgccaagccttcgtgcccatattgctgttgcgcggtaggtagcaaagaccgatctctgtctgtctggctgacttgcttgaagcggcctctggtagtgattcacgaactattcgataagtccattatggatatctcatggaccttgaatgggctcggcatcctggtctgcagtatggacggttcagtggcattcctcgacttctctcaagacgaactcggcgaccccctaagcgaagaggaaaagtctaggattcatcagagtacatacggcaagtctctggcgattatgaccgaggcgcagttgagtaccgctgtcatagagaacccagagatgctgaaatatcagaggcgacagcagcagcagcaattagaccagaaaagcgccgcgacgcgtgagatgggtagtgctacatccgtggctggcgtggttaacggtgagagcctggaggatatcaggaagaacctgctgaaaaaacaagtggagacgaggactgccgacggccgtcgtcgcatcacaccactctgtatcgcgcagttagatacaggcgatttctccacggccttcttcaattcaattcccctgagcggttccttggccggcaccatgctgagttcacactcaagcccccagctactgcccctggactcttcgacaccaaattctttcggcgcgtccaaaccgtgtactgagcccgtggtcgcggcttcagctcggcccgcgggagactcagtgaataaggactccatgaacgccacatcaacacctgcggccctgagtcccagtgtgctgaccaccccttctaaaatagagccaatgaaagctttcgacagccgcttcactgaacgctcaaaagcaacgcccggagcgcctgcactcacgtccatgacacccaccgccgtggagcggctgaaagagcaaaacctggtaaaggaacttaggcccagggatctgctggagagtagttccgatagcgacgaaaaggtgccactagccaaagcctcttctctttccaaacgcaagctggagctggaggtagaaaccgtggaaaaaaagaagaaaggccggcccaggaaggatagccggctgatgccagtctccctctccgtccagtctcctgctgcactgacagcagaaaaagaggccatgtgcctctctgcaccagcgctggctcttaagctgcccattccctcacctcagcgagccttcacattacaggtctcgtccgatccatctatgtatatcgaggtcgagaatgaggtgacagtggttgggggcgtgaagctgtctcgcctaaagtgcaaccgggaaggcaaagagtgggagacagtgttgacctcgagaatcctaacagccgccggctcttgcgacgtggtctgtgttgcgtgtgaaaagagaatgctaagtgtcttcagtacttgtggcagacgcctgctatcgcctattctgctccccagcccaatttcaaccctgcactgcacgggcagctacgtgatggcactgacagccgccgctactctttccgtgtgggatgtccacagacaagtggtggtcgtcaaggaggaatcactccattcaatcctggccgggacttggttcctgacttctcgaactcattggctgagcgttcaaaccttgggagccgcttgtcatcctcgcaccccgtgttgcgcccaagataggtag

SEQ ID NO: 137427 - DNA, 4053 bp, Artificial Sequence
  derived and/or modified sequence
gttgcccgggagccgcctgaggaggagcggcgcaggggatgcggctgtggtggcggcggcggcggccgagcgcgggtggcggctgtggcggcggaggggggcgcgggccggcgatggcgcggcggccctgagggcgcggggcgggcggcggccggagggcgggtggcgcgggaggaagcggcggcggtggctccatggcccgggcgcgctgagggacccggcgctcgcctcagcccggcggcggcggcggccgaacaatgaagctcctgaagccgacctgggtcaaccacaatggcaagccgattttttcagttgatattcaccctgacgggaccaagttcgcaactggaggacaagggcaggattctgggaaggttgtgatctggaatatgtctccagtcctccaggaggatgacgagaaggatgaaaatattcccaagatgctttgccagatggacaatcacttagcatgtgtgaactgtgtgcggtggtcaaacagtgggatgtatttagcttctgggggagatgacaaactgattatggtgtggaagcgggctacgtacatcggccccagcaccgtgttcggctccagtggtaagcttgccaatgtggagcagtggcggtgtgtctctatcctccggaatcattcaggcgatgtgatggatgtagcatggtctccccacgatgcctggctagcctcatgcagcgtggataacactgtcgtcatctggaatgctgtaaagttcccagaaattctagctactctgagaggtcattctggcttggtcaaagggttgacatgggaccctgttggtaaatacatagcttctcaagctgatgaccgcagcctaaaggtgtggaggacgctggactggcagttggagaccagcatcaccaagccttttgatgagtgtggaggaacgacccatgtgttgcggctcagctggtcacctgatgggcattacctggtgtctgcccatgccatgaacaactcaggccccactgcccagatcatcgaacgggagggatggaagaccaacatggactttgttgggcaccggaaagctgtgactgtcgtgaaattcaacccaaaaatcttcaaaaagaagcagaagaatgggagttctgcgaagcctagctgcccgtactgctgctgtgctgttggcagcaaggaccgctcgctttctgtctggctcacatgtctgaaacggccgctggtggtcatccatgaactgtttgacaaatccatcatggatatttcctggactctgaatgggctgggcatcttggtatgctctatggacggctctgtggcattcctcgacttctcccaggatgagcttggcgatcccctgagcgaggaggagaagagccgcattcaccagtccacctatggcaagagcctagccatcatgaccgaggcccagctctccacagccgtcattgagaaccctgagatgctcaagtaccagcgaaggcagcagcagcagcagctggaccagaagagtgctgcgaccagggagatgggctcagccacctcagtcgcaggcgttgtcaacggggagagtcttgaagatatcaggaagaatcttttgaagaaacaagttgagactcggacagcagatggccggagaagaatcacgcctctctgcatagcacagctggacactggggacttctccacggcattctttaacagcatccccctctcgggctccctggcgggcaccatgctctcttctcatagcagtccacagctactgccactggactccagtacccctaactccttcggcgcctcgaagccttgcacagagcctgtggtggctgccagtgccagacctgcaggcgattctgtcaataaagacagtatgaatgctacctctactcctgctgcattgtcaccttctgtgttaacgaccccgtccaagatcgaacccatgaaagcgtttgactcccggttcacagagcggtccaaagccacaccaggtgctcctgccctgaccagcatgactccgacagctgtggaaaggttaaaagagcagaaccttgtgaaagagctgaggccccgagacctcctggagagcagcagtgacagcgatgagaaagtccctttggctaaggcttcctcactgtccaagcgaaaacttgagcttgaggtagagacagtagagaagaagaagaaagggcggcctcggaaggactctcgtctcatgcctgtgtctctgtctgtccagtctccagctgccctaaccgcagagaaggaggccatgtgtctgtctgcaccagcacttgcactgaagctgccaattccaagcccccagagagcattcaccctccaggtcagctccgatccttccatgtacattgaggtggagaatgaagtgacagtggtggggggcgtgaagctgagccgcctgaagtgcaaccgggaagggaaggagtgggagacggtactcaccagccggatcctcactgctgcgggcagctgtgacgtggtgtgtgtcgcctgtgaaaaaaggatgctgtcagtgttctccacctgtggtcgccgtctcctctctcccatcctcctgccatccccgatctctactttgcattgcacaggctcctacgtcatggcgctcaccgctgcagccacactctctgtctgggatgttcacagacaggtggttgtggtgaaagaagagtctctacactccatcctggcaggaagtgatatgacggtatcacagatcttgctgacgcagcatggaatcccagtaatgaacctgtccgatgggaaggcgtactgctttaatccgtcactttccacatggaacctggtttctgacaagcaggactcactggctcagtgtgcagactttaggagcagcctgccatcccaggacgccatgctgtgctcaggaccgttagccataatccagggccgcacctccaactcgggaaggcaggctgcccggctcttctccgtgcctcatgtggtgcagcaagagaccaccctggcctacctagagaaccaggtggcagcagcactcaccctgcagtccagccacgagtaccgccattggctcctcgtctacgcacggtacctcgtaaacgaagggtttgaataccgacttcgagaaatatgcaaggacttactgggtccggttcactactccactggaagccagtgggagtcaacagtagtgggtctgcggaagagggagctgctgaaggagctgctaccagtcatcgggcagaacctccgattccagcgcctcttcaccgagtgtcaggaacagctcgacatcctgagggacaagtagcctgccccagcctgccctggctgcagcaagggcagggccacactctcgccgctgatgacatgcaggaccgcctctcacctgaccaggctgtagggggaggagacactggcaggagatgtgctgtcctgcaccagcgccagcccagctccctgggcagatgtgccctgtgtcctgggtctgacattgcctcaggagggggaagctcatccctccctccaagcccccgatgcggagctagggctggagctctgcccaggtgccctggggccagcaaggcagtcccaggcctgccgtctccagcacggccccaaggtggacactagcccctgctgctgcaggcaccatgctgcttcagcagtgacgattgagccatttgtgagagagaatccggaagcgttaggtattacagcagactgacctaagacctatgtaaaaggaaagctgttccaacacacggactatttttgtactagaatttgctaacttgtaatattgaatttcctttggccgataatcaggatttccctataagtcacttggacattggtcacttgtaggaaatttaaactctaattatgacagctacactgaaaaataattgtactgaaattaacttgtctatcttcatttggttttaatttttaaatgtttgtaaaaagagactgttttgggggaatggggcaaaggggtgggcgatttcttttgtaagtgtaaaataaatgaacacgcattgaataccaaa

SEQ ID NO: 137428 - DNA, 3395 bp, Artificial Sequence
  derived and/or modified sequence
gatgcggctgtggtggcggcggcggcggccgagcgcgggtggcggctgtggcggcggaggggggcgcgggccggcgatggcgcggcggccctgagggcgcggggcgggcggcggccggagggcgggtggcgcgggaggaagcggcggcggtggctccatggcccgggcgcgctgagggacccggcgctcgcctcagcccggcggcggcggcggccgaacaatgaagctcctgaagccgacctgggtcaaccacaatggcaagccgattttttcagttgatattcaccctgacgggaccaagttcgcaactggaggacaagggcaggattctgggaaggttgtgatctggaatatgtctccagtcctccaggaggatgacgagaaggatgaaaatattcccaagatgctttgccagatggacaatcacttagcatgtgtgaactgtgtgcggtggtcaaacagtgggatgtatttagcttctgggggagatgacaaactgattatggtgtggaagcgggctacgtacatcggccccagcaccgtgttcggctccagtggtaagcttgccaatgtggagcagtggcggtgtgtctctatcctccggaatcattcaggcgatgtgatggatgtagcatggtctccccacgatgcctggctagcctcatgcagcgtggataacactgtcgtcatctggaatgctgtaaagttcccagaaattctagctactctgagaggtcattctggcttggtcaaagggttgacatgggaccctgttggtaaatacatagcttctcaagctgatgaccgcagcctaaaggtgtggaggacgctggactggcagttggagaccagcatcaccaagccttttgatgagtgtggaggaacgacccatgtgttgcggctcagctggtcacctgatgggcattacctggtgtctgcccatgccatgaacaactcaggccccactgcccagatcatcgaacgggagggatggaagaccaacatggactttgttgggcaccggaaagctgtgactgtcgtgaaattcaacccaaaaatcttcaaaaagaagcagaagaatgggagttctgcgaagcctagctgcccgtactgctgctgtgctgttggcagcaaggaccgctcgctttctgtctggctcacatgtctgaaacggccgctggtggtcatccatgaactgtttgacaaatccatcatggatatttcctggactctgaatgggctgggcatcttggtatgctctatggacggctctgtggcattcctcgacttctcccaggatgagcttggcgatcccctgagcgaggaggagaagagccgcattcaccagtccacctatggcaagagcctagccatcatgaccgaggcccagctctccacagccgtcattgagaaccctgagatgctcaagtaccagcgaaggcagcagcagcagcagctggaccagaagagtgctgcgaccagggagatgggctcagccacctcagtcgcaggcgttgtcaacggggagagtcttgaagatatcaggaagaatcttttgaagaaacaagttgagactcggacagcagatggccggagaagaatcacgcctctctgcatagcacagctggacactggggacttctccacggcattctttaacagcatccccctctcgggctccctggcgggcaccatgctctcttctcatagcagtccacagctactgccactggactccagtacccctaactccttcggcgcctcgaagccttgcacagagcctgtggtggctgccagtgccagacctgcaggcgattctgtcaataaagacagtatgaatgctacctctactcctgctgcattgtcaccttctgtgttaacgaccccgtccaagatcgaacccatgaaagcgtttgactcccggttcacagagcggtccaaagccacaccaggtgctcctgccctgaccagcatgactccgacagctgtggaaagggatgttcacagacaggtggttgtggtgaaagaagagtctctacactccatcctggcaggaagtgatatgacggtatcacagatcttgctgacgcagcatggaatcccagtaatgaacctgtccgatgggaaggcgtactgctttaatccgtcactttccacatggaacctggtttctgacaagcaggactcactggctcagtgtgcagactttaggagcagcctgccatcccaggacgccatgctgtgctcaggaccgttagccataatccagggccgcacctccaactcgggaaggcaggctgcccggctcttctccgtgcctcatgtggtgcagcaagagaccaccctggcctacctagagaaccaggtggcagcagcactcaccctgcagtccagccacgagtaccgccattggctcctcgtctacgcacggtacctcgtaaacgaagggtttgaataccgacttcgagaaatatgcaaggacttactgggtccggttcactactccactggaagccagtgggagtcaacagtagtgggtctgcggaagagggagctgctgaaggagctgctaccagtcatcgggcagaacctccgattccagcgcctcttcaccgagtgtcaggaacagctcgacatcctgagggacaagtagcctgccccagcctgccctggctgcagcaagggcagggccacactctcgccgctgatgacatgcaggaccgcctctcacctgaccaggctgtagggggaggagacactggcaggagatgtgctgtcctgcaccagcgccagcccagctccctgggcagatgtgccctgtgtcctgggtctgacattgcctcaggagggggaagctcatccctccctccaagcccccgatgcggagctagggctggagctctgcccaggtgccctggggccagcaaggcagtcccaggcctgccgtctccagcacggccccaaggtggacactagcccctgctgctgcaggcaccatgctgcttcagcagtgacgattgagccatttgtgagagagaatccggaagcgttaggtattacagcagactgacctaagacctatgtaaaaggaaagctgttccaacacacggactatttttgtactagaatttgctaacttgtaatattgaatttcctttggccgataatcaggatttccctataagtcacttggacattggtcacttgtaggaaatttaaactctaattatgacagctacactgaaaaataattgtactgaaattaacttgtctatcttcatttggttttaatttttaaatgtttgtaaaaagagactgttttgggggaatggggcaaaggggtgggcgatttcttttgtaagtgtaaaataaatgaacacgcattgaataccaaa

SEQ ID NO: 137429 - DNA, 3734 bp, Artificial Sequence
  derived and/or modified sequence
gcagtgcagccggagcggccgagggggcgtccctctgctcctccgagtccaaatgttcatgtctaggcaaacggccccgatcttctaataaacgcgtccgccccagcctcccccaccagggttggctcgtcccccgcattcgttcgagtccgaagcccggatcgcattccggcgccggcgcggagcccggcgctcgcaagatgcccaatagcgcgctgagggacccggcgctcgcctcagcccggcggcggcggcggccgaacaatgaagctcctgaagccgacctgggtcaaccacaatggcaagccgattttttcagttgatattcaccctgacgggaccaagttcgcaactggaggacaagggcaggattctgggaaggttgtgatctggaatatgtctccagtcctccaggaggatgacgagaaggatgaaaatattcccaagatgctttgccagatggacaatcacttagcatgtgtgaactgtgtgcggtggtcaaacagtgggatgtatttagcttctgggggagatgacaaactgattatggtgtggaagcgggctacgtacatcggccccagcaccgtgttcggctccagtggtaagcttgccaatgtggagcagtggcggtgtgtctctatcctccggaatcattcaggcgaacttcccacgttctgctgtttgtcctgctgaacagaatcagtaccttcatcagcggatcactaagtcccactgcaccaggcgctgaggttagagaaataactaagactgcgcccttcacccctgatggcaggataggcaaggttggcaccatcgtcacagcggaccctcatcgatgccttgatgtgatggatgtagcatggtctccccacgatgcctggctagcctcatgcagcgtggataacactgtcgtcatctggaatgctgtaaagttcccagaaattctagctactctgagaggtcattctggcttggtcaaagggttgacatgggaccctgttggtaaatacatagcttctcaagctgatgaccgcagcctaaaggtgtggaggacgctggactggcagttggagaccagcatcaccaagccttttgatgagtgtggaggaacgacccatgtgttgcggctcagctggtcacctgatgggcattacctggtgtctgcccatgccatgaacaactcaggccccactgcccagatcatcgaacgggagggatggaagaccaacatggactttgttgggcaccggaaagctgtgactgtcgtgaaattcaacccaaaaatcttcaaaaagaagcagaagaatgggagttctgcgaagcctagctgcccgtactgctgctgtgctgttggcagcaaggaccgctcgctttctgtctggctcacatgtctgaaacggccgctggtggtcatccatgaactgtttgacaaatccatcatggatatttcctggactctgaatgggctgggcatcttggtatgctctatggacggctctgtggcattcctcgacttctcccaggatgagcttggcgatcccctgagcgaggaggagaagagccgcattcaccagtccacctatggcaagagcctagccatcatgaccgaggcccagctctccacagccgtcattgagaaccctgagatgctcaagtaccagcgaaggcagcagcagcagcagctggaccagaagagtgctgcgaccagggagatgggctcagccacctcagtcgcaggcgttgtcaacggggagagtcttgaagatatcaggaagaatcttttgaagaaacaagttgagactcggacagcagatggccggagaagaatcacgcctctctgcatagcacagctggacactggggacttctccacggcattctttaacagcatccccctctcgggctccctggcgggcaccatgctctcttctcatagcagtccacagctactgccactggactccagtacccctaactccttcggcgcctcgaagccttgcacagagcctgtggtggctgccagtgccagacctgcaggcgattctgtcaataaagacagtatgaatgctacctctactcctgctgcattgtcaccttctgtgttaacgaccccgtccaagatcgaacccatgaaagcgtttgactcccggttcacagagcggtccaaagccacaccaggtgctcctgccctgaccagcatgactccgacagctgtggaaaggttaaaagagcagaaccttgtgaaagagctgaggccccgagacctcctggagagcagcagtgacagcgatgagaaagtccctttggctaaggcttcctcactgtccaagcgaaaacttgagcttgaggtagagacagtagagaagaagaagaaagggcggcctcggaaggactctcgtctcatgcctgtgtctctgtctgtccagtctccagctgccctaaccgcagagaaggaggccatgtgtctgtctgcaccagcacttgcactgaagctgccaattccaagcccccagagagcattcaccctccaggtcagctccgatccttccatgtacattgaggtggagaatgaagtgacagtggtggggggcgtgaagctgagccgcctgaagtgcaaccgggaagggaaggagtgggagacggtactcaccagccggatcctcactgctgcgggcagctgtgacgtggtgtgtgtcgcctgtgaaaaaaggatgctgtcagtgttctccacctgtggtcgccgtctcctctctcccatcctcctgccatccccgatctctactttgcattgcacaggctcctacgtcatggcgctcaccgctgcagccacactctctgtctgggatgttcacagacaggtggttgtggtgaaagaagagtctctacactccatcctggcaggaagtgatatgacggtatcacagatcttgctgacgcagcatggaatcccagtaatgaacctgtccgatgggaaggcgtactgctttaatccgtcactttccacatggaacctggtttctgacaagcaggactcactggctcagtgtgcagactttaggagcagcctgccatcccaggacgccatgctgtgctcaggaccgttagccataatccagggccgcacctccaactcgggaaggcaggctgcccggctcttctccgtgcctcatgtggtgcagcaagagaccaccctggcctacctagagaaccaggtggcagcagcactcaccctgcagtccagccacgagtaccgccattggctcctcgtctacgcacggtacctcgtaaacgaagggtctgcggaagagggagctgctgaaggagctgctaccagtcatcgggcagaacctccgattccagcgcctcttcaccgagtgtcaggaacagctcgacatcctgagggacaagtagcctgccccagcctgccctggctgcagcaagggcagggccacactctcgccgctgatgacatgcaggaccgcctctcacctgaccaggctgtagggggaggagacactggcaggagatgtgctgtcctgcaccagcgccagcccagctccctgggcagatgtgccctgtgtcctgggtctgacattgcctcaggagggggaagctcatccctccctccaagcccccgatgcggagctagggctggagctctgcccaggtgccctggggccagcaaggcagtcccaggcctgccgtctccagcacggccccaaggtggacactag

SEQ ID NO: 137430 - DNA, 3436 bp, Artificial Sequence
  derived and/or modified sequence
cggtcgcccagacatggcggacggcagcggctggcaggcaagccgattttttcagttgatattcaccctgacgggaccaagttcgcaactggaggacaagggcaggattctgggaaggttgtgatctggaatatgtctccagtcctccaggaggatgacgagaaggatgaaaatattcccaagatgctttgccagatggacaatcacttagcatgtgtgaactgtgtgcggtggtcaaacagtgggatgtatttagcttctgggggagatgacaaactgattatggtgtggaagcgggctacgtacatcggccccagcaccgtgttcggctccagtggtaagcttgccaatgtggagcagtggcggtgtgtctctatcctccggaatcattcaggcgatgtgatggatgtagcatggtctccccacgatgcctggctagcctcatgcagcgtggataacactgtcgtcatctggaatgctgtaaagttcccagaaattctagctactctgagaggtcattctggcttggtcaaagggttgacatgggaccctgttggtaaatacatagcttctcaagctgatgaccgcagcctaaaggtgtggaggacgctggactggcagttggagaccagcatcaccaagccttttgatgagtgtggaggaacgacccatgtgttgcggctcagctggtcacctgatgggcattacctggtgtctgcccatgccatgaacaactcaggccccactgcccagatcatcgaacgggagggatggaagaccaacatggactttgttgggcaccggaaagctgtgactgtcgtgaaattcaacccaaaaatcttcaaaaagaagcagaagaatgggagttctgcgaagcctagctgcccgtactgctgctgtgctgttggcagcaaggaccgctcgctttctgtctggctcacatgtctgaaacggccgctggtggtcatccatgaactgtttgacaaatccatcatggatatttcctggactctgaatgggctgggcatcttggtatgctctatggacggctctgtggcattcctcgacttctcccaggatgagcttggcgatcccctgagcgaggaggagaagagccgcattcaccagtccacctatggcaagagcctagccatcatgaccgaggcccagctctccacagccgtcattgagaaccctgagatgctcaagtaccagcgaaggcagcagcagcagcagctggaccagaagagtgctgcgaccagggagatgggctcagccacctcagtcgcaggcgttgtcaacggggagagtcttgaagatatcaggaagaatcttttgaagaaacaagttgagactcggacagcagatggccggagaagaatcacgcctctctgcatagcacagctggacactggggacttctccacggcattctttaacagcatccccctctcgggctccctggcgggcaccatgctctcttctcatagcagtccacagctactgccactggactccagtacccctaactccttcggcgcctcgaagccttgcacagagcctgtggtggctgccagtgccagacctgcaggcgattctgtcaataaagacagtatgaatgctacctctactcctgctgcattgtcaccttctgtgttaacgaccccgtccaagatcgaacccatgaaagcgtttgactcccggttcacagagcggtccaaagccacaccaggtgctcctgccctgaccagcatgactccgacagctgtggaaaggttaaaagagcagaaccttgtgaaagagctgaggccccgagacctcctggagagcagcagtgacagcgatgagaaagtccctttggctaaggcttcctcactgtccaagcgaaaacttgagcttgaggtagagacagtagagaagaagaagaaagggcggcctcggaaggactctcgtctcatgcctgtgtctctgtctgtccagtctccagctgccctaaccgcagagaaggaggccatgtgtctgtctgcaccagcacttgcactgaagctgccaattccaagcccccagagagcattcaccctccaggtcagctccgatccttccatgtacattgaggtggagaatgaagtgacagtggtggggggcgtgaagctgagccgcctgaagtgcaaccgggaagggaaggagtgggagacggtactcaccagccggatcctcactgctgcgggcagctgtgacgtggtgtgtgtcgcctgtgaaaaaaggatgctgtcagtgttctccacctgtggtcgccgtctcctctctcccatcctcctgccatccccgatctctactttgcattgcacaggctcctacgtcatggcgctcaccgctgcagccacactctctgtctgggatgttcacagacaggtggttgtggtgaaagaagagtctctacactccatcctggcaggaagtgatatgacggtatcacagatcttgctgacgcagcatggaatcccagtaatgaacctgtccgatgggaaggcgtactgctttaatccgtcactttccacatggaacctggtttctgacaagcaggactcactggctcagtgtgcagactttaggagcagcctgccatcccaggacgccatgctgtgctcaggaccgttagccataatccagggccgcacctccaactcgggaaggcaggctgcccggctcttctccgtgcctcatgtggtgcagcaagagaccaccctggcctacctagagaaccaggtggcagcagcactcaccctgcagtccagccacgagtaccgccattggctcctcgtctacgcacggtacctcgtaaacgaagggtttgaataccgacttcgagaaatatgcaaggacttactgggtccggttcactactccactggaagccagtgggagtcaacagtagtgggtctgcggaagagggagctgctgaaggagctgctaccagtcatcgggcagaacctccgattccagcgcctcttcaccgagtgtcaggaacagctcgacatcctgagggacaagtagcctgccccagcctgccctggctgcagcaagggcagggccacactctcgccgctgatgacatgcaggaccgcctctcacctgaccaggctgtagggggaggagacactggcaggagatgtgctgtcctgcaccagcgccagcccagctccctgggcagatgtgccctgtgtcctgggtctgacattgcctcaggagggggaagctcatccctccctccaagcccccgatgcggagctagggctggagctctgcccaggtgccctggggccagcaaggcagtcccaggcctgccgtctccagcacggccccaaggtggacactagcccctgctgctgcaggcaccatgctgcttcagcagtgacgattgagccatttgtgagag

SEQ ID NO: 137431 - DNA, 2979 bp, Artificial Sequence
  derived and/or modified sequence
gacatggcggacggcagcggctggcagccgccgcgcccctgcgaggcctaccgcgccgagtggaagctctgccgcagcgccaggcacttcctacaccactactacgtccacggcgagcggccggcctgcgaacagtggcagcgcgacctggccagctgccgcgactgggaggagcgccggaacgccgaggcccaggcaagccgattttttcagttgatattcaccctgacgggaccaagttcgcaactggaggacaagggcaggattctgggaaggttgtgatctggaatatgtctccagtcctccaggaggatgacgagaaggatgaaaatattcccaagatgctttgccagatggacaatcacttagcatgtgtgaactgtgtgcggtggtcaaacagtgggatgtatttagcttctgggggagatgacaaactgattatggtgtggaagcgggctacgtacatcggccccagcaccgtgttcggctccagtggtaagcttgccaatgtggagcagtggcggtgtgtctctatcctccggaatcattcaggcgatgtgatggatgtagcatggtctccccacgatgcctggctagcctcatgcagcgtggataacactgtcgtcatctggaatgctgtaaagttcccagaaattctagctactctgagaggtcattctggcttggtcaaagggttgacatgggaccctgttggtaaatacatagcttctcaagctgatgaccgcagcctaaaggtgtggaggacgctggactggcagttggagaccagcatcaccaagccttttgatgagtgtggaggaacgacccatgtgttgcggctcagctggtcacctgatgggcattacctggtgtctgcccatgccatgaacaactcaggccccactgcccagatcatcgaacgggagggatggaagaccaacatggactttgttgggcaccggaaagctgtgactgtcgtgaaattcaacccaaaaatcttcaaaaagaagcagaagaatgggagttctgcgaagcctagctgcccgtactgctgctgtgctgttggcagcaaggaccgctcgctttctgtctggctcacatgtctgaaacggccgctggtggtcatccatgaactgtttgacaaatccatcatggatatttcctggactctgaatgggctgggcatcttggtatgctctatggacggctctgtggcattcctcgacttctcccaggatgagcttggcgatcccctgagcgaggaggagaagagccgcattcaccagtccacctatggcaagagcctagccatcatgaccgaggcccagctctccacagccgtcattgagaaccctgagatgctcaagtaccagcgaaggcagcagcagcagcagctggaccagaagagtgctgcgaccagggagatgggctcagccacctcagtcgcaggcgttgtcaacggggagagtcttgaagatatcaggaagaatcttttgaagaaacaagttgagactcggacagcagatggccggagaagaatcacgcctctctgcatagcacagctggacactggggacttctccacggcattctttaacagcatccccctctcgggctccctggcgggcaccatgctctcttctcatagcagtccacagctactgccactggactccagtacccctaactccttcggcgcctcgaagccttgcacagagcctgtggtggctgccagtgccagacctgcaggcgattctgtcaataaagacagtatgaatgctacctctactcctgctgcattgtcaccttctgtgttaacgaccccgtccaagatcgaacccatgaaagcgtttgactcccggttcacagagcggtccaaagccacaccaggtgctcctgccctgaccagcatgactccgacagctgtggaaaggttaaaagagcagaaccttgtgaaagagctgaggccccgagacctcctggagagcagcagtgacagcgatgagaaagtccctttggctaaggcttcctcactgtccaagcgaaaacttgagcttgaggtagagacagtagagaagaagaagaaagggcggcctcggaaggactctcgtctcatgcctgtgtctctgtctgtccagtctccagctgccctaaccgcagagaaggaggccatgtgtctgtctgcaccagcacttgcactgaagctgccaattccaagcccccagagagcattcaccctccaggtcagctccgatccttccatgtacattgaggtggagaatgaagtgacagtggtggggggcgtgaagctgagccgcctgaagtgcaaccgggaagggaaggagtgggagacggtactcaccagccggatcctcactgctgcgggcagctgtgacgtggtgtgtgtcgcctgtgaaaaaaggatgctgtcagtgttctccacctgtggtcgccgtctcctctctcccatcctcctgccatccccgatctctactttgcattgcacaggctcctacgtcatggcgctcaccgctgcagccacactctctgtctgggatgttcacagacaggtggttgtggtgaaagaagagtctctacactccatcctggcaggaacctggtttctgacaagcaggactcactggctcagtgtgcagactttaggagcagcctgccatcccaggacgccatgctgtgctcaggaccgttagccataatccagggccgcacctccaactcgggaaggcaggctgcccggctcttctccgtgcctcatgtggtgcagcaagagaccaccctggcctacctagagaaccaggtggcagcagcactcaccctgcagtccagccacgagtaccgccattggctcctcgtctacgcacggtacctcgtaaacgaagggtttgaataccgacttcgagaaatatgcaaggacttactgggtccggttcactactccactggaagccagtgggagtc

SEQ ID NO: 137432 - DNA, 3054 bp, Artificial Sequence
  derived and/or modified sequence
atgaagctgctgaagcccacctgggtgaaccacaacgggaagcccatcttctctgtggacatccacccagatggcaccaagtttgccaccggcggccagggccaggacagcggcaaggtggtgatctggaacatgagccctgtgctgcaggaggatgatgagaaggatgagaacatccccaagatgctgtgccagatggacaaccacctggcctgtgtgaactgtgtgcgctggagcaacagcggcatgtacctggccagcggaggagatgacaagctgatcatggtgtggaagagggccacctacatcggccccagcacagtgtttggcagcagcggcaagctggccaacgtggagcagtggaggtgtgtgtccatcctgaggaaccacagcggagatgtgatggatgtggcctggagcccccatgatgcctggctggccagctgcagcgtggacaacacagtggtgatctggaatgctgtgaagtttcctgagatcctggccaccctgcggggccacagcggcctggtgaagggcctgacctgggaccctgtgggcaagtacatcgccagccaggctgatgacaggagcctgaaggtgtggaggaccctggactggcagctggagaccagcatcaccaagccctttgatgaatgtggcggcaccacccacgtgctgcggctgtcctggagcccagatggccactacctggtgtctgcccacgccatgaacaacagcggccccacagcccagatcatcgagcgggagggctggaagaccaacatggactttgtgggccacaggaaggctgtgacagtggtgaagttcaaccccaagatcttcaagaagaagcagaagaatggcagcagcgccaagcccagctgcccctactgctgctgtgctgtgggcagcaaggacaggagcctgtctgtgtggctgacctgcctgaagaggcccctggtggtgatccacgagctgtttgacaagagcatcatggacatctcctggaccctgaatggcctgggcatcctggtgtgcagcatggatggctctgtggccttcctggacttcagccaggatgagctgggggaccccctgtctgaggaggagaagagccgcatccaccagagcacctacggcaagagcctggccatcatgacagaggcccagctgagcacagctgtgattgaaaatcctgagatgctgaagtaccagaggcggcagcagcagcagcagctggaccagaagtctgctgccacccgggagatgggcagcgccacctctgtggccggcgtggtgaatggagagagcctggaggacatcaggaagaacctgctgaagaagcaggtggagaccaggacagcagatggaagaagacgcatcacccccctgtgcatcgcccagctggacacaggagacttcagcacagccttcttcaacagcatccccctgagcggcagcctggccggcaccatgctgagcagccacagcagcccccagctgctgcccctggacagcagcacccccaacagctttggagccagcaagccctgcacagagcctgtggtggccgccagcgcccggcctgctggggacagcgtgaacaaggacagcatgaatgccaccagcaccccagctgccctgagccccagcgtgctgaccacccccagcaagattgagcccatgaaggcctttgacagccgcttcacagagaggagcaaggccacccctggggccccagccctgacctccatgacccccacagctgtggagcggctgaaggagcagaacctggtgaaggagctgcggccccgggacctgctggagagcagcagtgacagtgatgagaaggtgcccctggccaaggccagcagcctgagcaagaggaagctggagctggaggtggagaccgtggagaagaagaagaagggccggcccaggaaggacagccggctgatgcctgtgtccctgtctgtgcagagccctgctgccctgacagctgagaaggaggccatgtgcctgagcgccccagccctggccctgaagctgcccatccccagcccccagagggccttcaccctgcaggtgtccagtgaccccagcatgtacatcgaggtggagaatgaggtgacagtggtgggcggcgtgaagctgagccggctgaagtgcaaccgggagggcaaggagtgggagaccgtgctgaccagccgcatcctgacagctgctggcagctgtgatgtggtgtgtgtggcctgtgagaagaggatgctgagcgtcttcagcacctgtggccgccgcctgctgagccccatcctgctgcccagccccatcagcaccctgcactgcaccggcagctatgtgatggccctgacagctgctgccaccctgtctgtgtgggatgtgcaccggcaggtggtggtggtgaaggaggagagcctgcacagcatcctggccggcagtgacatgacagtgtcccagatcctgctgacccagcacggcatccctgtgatgaacctgagtgatggcaaggcctactgcttcaaccccagcctgagcacctggaacctggtgtctgacaagcaggacagcctggcccagtgtgccgacttccgcagcagcctgcccagccaggatgccatgctgtgcagcggccccctggccatcatccagggccgcaccagcaacagcggccggcaggccgcccggctcttctctgtgccccacgtggtgcagcaggagaccaccctggcctacctggagaaccaggtggccgccgccctgaccctgcagagcagccatgagtaccgccactggctgctggtgtatgcccgctacctggtgaatgaaggatttgagtaccgcctgcgggagatctgcaaggacctgctgggccctgtgcactacagcacaggcagccagtgggagagcacagtggtgggcctgaggaagcgggagctgctgaaggagctgctgcccgtcatcggccagaacctgcgcttccagaggctcttcacagagtgccaggagcagctggacatcctgcgggacaagtag

SEQ ID NO: 137433 - DNA, 2433 bp, Artificial Sequence
  derived and/or modified sequence
atgaagctgctgaagcccacctgggtgaaccacaacgggaagcccatcttctctgtggacatccacccagatggcaccaagtttgccaccggcggccagggccaggacagcggcaaggtggtgatctggaacatgagccctgtgctgcaggaggatgatgagaaggatgagaacatccccaagatgctgtgccagatggacaaccacctggcctgtgtgaactgtgtgcgctggagcaacagcggcatgtacctggccagcggaggagatgacaagctgatcatggtgtggaagagggccacctacatcggccccagcacagtgtttggcagcagcggcaagctggccaacgtggagcagtggaggtgtgtgtccatcctgaggaaccacagcggagatgtgatggatgtggcctggagcccccatgatgcctggctggccagctgcagcgtggacaacacagtggtgatctggaatgctgtgaagtttcctgagatcctggccaccctgcggggccacagcggcctggtgaagggcctgacctgggaccctgtgggcaagtacatcgccagccaggctgatgacaggagcctgaaggtgtggaggaccctggactggcagctggagaccagcatcaccaagccctttgatgaatgtggcggcaccacccacgtgctgcggctgtcctggagcccagatggccactacctggtgtctgcccacgccatgaacaacagcggccccacagcccagatcatcgagcgggagggctggaagaccaacatggactttgtgggccacaggaaggctgtgacagtggtgaagttcaaccccaagatcttcaagaagaagcagaagaatggcagcagcgccaagcccagctgcccctactgctgctgtgctgtgggcagcaaggacaggagcctgtctgtgtggctgacctgcctgaagaggcccctggtggtgatccacgagctgtttgacaagagcatcatggacatctcctggaccctgaatggcctgggcatcctggtgtgcagcatggatggctctgtggccttcctggacttcagccaggatgagctgggggaccccctgtctgaggaggagaagagccgcatccaccagagcacctacggcaagagcctggccatcatgacagaggcccagctgagcacagctgtgattgaaaatcctgagatgctgaagtaccagaggcggcagcagcagcagcagctggaccagaagtctgctgccacccgggagatgggcagcgccacctctgtggccggcgtggtgaatggagagagcctggaggacatcaggaagaacctgctgaagaagcaggtggagaccaggacagcagatggaagaagacgcatcacccccctgtgcatcgcccagctggacacaggagacttcagcacagccttcttcaacagcatccccctgagcggcagcctggccggcaccatgctgagcagccacagcagcccccagctgctgcccctggacagcagcacccccaacagctttggagccagcaagccctgcacagagcctgtggtggccgccagcgcccggcctgctggggacagcgtgaacaaggacagcatgaatgccaccagcaccccagctgccctgagccccagcgtgctgaccacccccagcaagattgagcccatgaaggcctttgacagccgcttcacagagaggagcaaggccacccctggggccccagccctgacctccatgacccccacagctgtggagagagatgtgcaccggcaggtggtggtggtgaaggaggagagcctgcacagcatcctggccggcagtgacatgacagtgtcccagatcctgctgacccagcacggcatccctgtgatgaacctgagtgatggcaaggcctactgcttcaaccccagcctgagcacctggaacctggtgtctgacaagcaggacagcctggcccagtgtgccgacttccgcagcagcctgcccagccaggatgccatgctgtgcagcggccccctggccatcatccagggccgcaccagcaacagcggccggcaggccgcccggctcttctctgtgccccacgtggtgcagcaggagaccaccctggcctacctggagaaccaggtggccgccgccctgaccctgcagagcagccatgagtaccgccactggctgctggtgtatgcccgctacctggtgaatgaaggatttgagtaccgcctgcgggagatctgcaaggacctgctgggccctgtgcactacagcacaggcagccagtgggagagcacagtggtgggcctgaggaagcgggagctgctgaaggagctgctgcctgtgattggccagaacctgcgcttccagaggctcttcacagagtgccaggagcagctggacatcctgcgggacaagtag

SEQ ID NO: 137434 - DNA, 1815 bp, Artificial Sequence
  derived and/or modified sequence
atgctgagcagccacagcagcccccagctgctgcccctggacagcagcacccccaacagctttggagccagcaagccctgcacagagcctgtggtggccgccagcgcccggcctgctggggacagcgtgaacaaggacagcatgaatgccaccagcaccccagctgccctgagccccagcgtgctgaccacccccagcaagattgagcccatgaaggcctttgacagccgcttcacagagaggagcaaggccacccctggggccccagccctgacctccatgacccccacagctgtggagcggctgaaggagcagaacctggtgaaggagctgcggccccgggacctgctggagagcagcagtgacagtgatgagaaggtgcccctggccaaggccagcagcctgagcaagaggaagctggagctggaggtggagaccgtggagaagaagaagaagggccggcccaggaaggacagccggctgatgcctgtgtccctgtctgtgcagagccctgctgccctgacagctgagaaggaggccatgtgcctgagcgccccagccctggccctgaagctgcccatccccagcccccagagggccttcaccctgcaggtgtccagtgaccccagcatgtacatcgaggtggagaatgaggtgacagtggtgggcggcgtgaagctgagccggctgaagtgcaaccgggagggcaaggagtgggagaccgtgctgaccagccgcatcctgacagctgctggcagctgtgatgtggtgtgtgtggcctgtgagaagaggatgctgtctgtgttcagcacctgtggccggcggctgctgagccccatcctgctgcccagccccatcagcaccctgcactgcaccggcagctatgtgatggccctgacagctgctgccaccctgtctgtgtgggatgtgcaccggcaggtggtggtggtgaaggaggagagcctgcacagcatcctggccggcagtgacatgacagtgtcccagatcctgctgacccagcacggcatccctgtgatgaacctgagtgatggcaaggcctactgcttcaaccccagcctgagcacctggaacctggtgtctgacaagcaggacagcctggcccagtgtgccgacttccgcagcagcctgcccagccaggatgccatgctgtgcagcggccccctggccatcatccagggccgcaccagcaacagcggccggcaggccgcccggctcttctctgtgccccacgtggtgcagcaggagaccaccctggcctacctggagaaccaggtggccgccgccctgaccctgcagagcagccatgagtaccgccactggctgctggtgtatgcccgctacctggtgaatgaaggcagcgctgaggagggcgctgctgagggcgccgccaccagccacagagctgagccccccatcccagcccccctgcaccgggtgtctggaacagcccggcaccctgagggccaggtggcctgccccagcctgccctggctgcagcagggccagggccacaccctggccgcagatgacatgcaggaccggctgagcccagaccaggccgtgggcggcggggacacaggaagaagatgtgctgtgctgcaccagaggcagcccagcagcctgggccgctgtgccctgtgccccggcagtgacatcgccagcggcggcggcagcagcagcctgccccccagcccccgctgtggggcccgggccggggccctgccccgctgccctggggccagcaaggctgtgcccggcctgcccagccctgcccggccccagggcggccactag

SEQ ID NO: 137435 - DNA, 2922 bp, Artificial Sequence
  derived and/or modified sequence
atgagccctgtgctgcaggaggatgatgagaaggatgagaacatccccaagatgctgtgccagatggacaaccacctggcctgtgtgaactgtgtgcgctggagcaacagcggcatgtacctggccagcggaggagatgacaagctgatcatggtgtggaagagggccacctacatcggccccagcacagtgtttggcagcagcggcaagctggccaacgtggagcagtggaggtgtgtgtccatcctgaggaaccacagcggagatgtgatggatgtggcctggagcccccatgatgcctggctggccagctgcagcgtggacaacacagtggtgatctggaatgctgtgaagtttcctgagatcctggccaccctgcggggccacagcggcctggtgaagggcctgacctgggaccctgtgggcaagtacatcgccagccaggctgatgacaggagcctgaaggtgtggaggaccctggactggcagctggagaccagcatcaccaagccctttgatgaatgtggcggcaccacccacgtgctgcggctgtcctggagcccagatggccactacctggtgtctgcccacgccatgaacaacagcggccccacagcccagatcatcgagcgggagggctggaagaccaacatggactttgtgggccacaggaaggctgtgacagtggtgaagttcaaccccaagatcttcaagaagaagcagaagaatggcagcagcgccaagcccagctgcccctactgctgctgtgctgtgggcagcaaggacaggagcctgtctgtgtggctgacctgcctgaagaggcccctggtggtgatccacgagctgtttgacaagagcatcatggacatctcctggaccctgaatggcctgggcatcctggtgtgcagcatggatggctctgtggccttcctggacttcagccaggatgagctgggggaccccctgtctgaggaggagaagagccgcatccaccagagcacctacggcaagagcctggccatcatgacagaggcccagctgagcacagctgtgattgaaaatcctgagatgctgaagtaccagaggcggcagcagcagcagcagctggaccagaagtctgctgccacccgggagatgggcagcgccacctctgtggccggcgtggtgaatggagagagcctggaggacatcaggaagaacctgctgaagaagcaggtggagaccaggacagcagatggaagaagacgcatcacccccctgtgcatcgcccagctggacacaggagacttcagcacagccttcttcaacagcatccccctgagcggcagcctggccggcaccatgctgagcagccacagcagcccccagctgctgcccctggacagcagcacccccaacagctttggagccagcaagccctgcacagagcctgtggtggccgccagcgcccggcctgctggggacagcgtgaacaaggacagcatgaatgccaccagcaccccagctgccctgagccccagcgtgctgaccacccccagcaagattgagcccatgaaggcctttgacagccgcttcacagagaggagcaaggccacccctggggccccagccctgacctccatgacccccacagctgtggagcggctgaaggagcagaacctggtgaaggagctgcggccccgggacctgctggagagcagcagtgacagtgatgagaaggtgcccctggccaaggccagcagcctgagcaagaggaagctggagctggaggtggagaccgtggagaagaagaagaagggccggcccaggaaggacagccggctgatgcctgtgtccctgtctgtgcagagccctgctgccctgacagctgagaaggaggccatgtgcctgagcgccccagccctggccctgaagctgcccatccccagcccccagagggccttcaccctgcaggtgtccagtgaccccagcatgtacatcgaggtggagaatgaggtgacagtggtgggcggcgtgaagctgagccggctgaagtgcaaccgggagggcaaggagtgggagaccgtgctgaccagccgcatcctgacagctgctggcagctgtgatgtggtgtgtgtggcctgtgagaagaggatgctgagcgtcttcagcacctgtggccgccgcctgctgagccccatcctgctgcccagccccatcagcaccctgcactgcaccggcagctatgtgatggccctgacagctgctgccaccctgtctgtgtgggatgtgcaccggcaggtggtggtggtgaaggaggagagcctgcacagcatcctggccggcagtgacatgacagtgtcccagatcctgctgacccagcacggcatccctgtgatgaacctgagtgatggcaaggcctactgcttcaaccccagcctgagcacctggaacctggtgtctgacaagcaggacagcctggcccagtgtgccgacttccgcagcagcctgcccagccaggatgccatgctgtgcagcggccccctggccatcatccagggccgcaccagcaacagcggccggcaggccgcccggctcttctctgtgccccacgtggtgcagcaggagaccaccctggcctacctggagaaccaggtggccgccgccctgaccctgcagagcagccatgagtaccgccactggctgctggtgtatgcccgctacctggtgaatgaaggatttgagtaccgcctgcgggagatctgcaaggacctgctgggccctgtgcactacagcacaggcagccagtgggagagcacagtggtgggcctgaggaagcgggagctgctgaaggagctgctgcccgtcatcggccagaacctgcgcttccagaggctcttcacagagtgccaggagcagctggacatcctgcgggacaagtag

SEQ ID NO: 137436 - DNA, 2421 bp, Artificial Sequence
  derived and/or modified sequence
atgagccctgtgctgcaggaggatgatgagaaggatgagaacatccccaagatgctgtgccagatggacaaccacctggcctgtgtgaactgtgtgcgctggagcaacagcggcatgtacctggccagcggaggagatgacaagctgatcatggtgtggaagagggccacctacatcggccccagcacagtgtttggcagcagcggcaagctggccaacgtggagcagtggaggtgtgtgtccatcctgaggaaccacagcggagatgtgatggatgtggcctggagcccccatgatgcctggctggccagctgcagcgtggacaacacagtggtgatctggaatgctgtgaagtttcctgagatcctggccaccctgcggggccacagcggcctggtgaagggcctgacctgggaccctgtgggcaagtacatcgccagccaggctgatgacaggagcctgaaggtgtggaggaccctggactggcagctggagaccagcatcaccaagccctttgatgaatgtggcggcaccacccacgtgctgcggctgtcctggagcccagatggccactacctggtgtctgcccacgccatgaacaacagcggccccacagcccagatcatcgagcgggagggctggaagaccaacatggactttgtgggccacaggaaggctgtgacagtggtgaagttcaaccccaagatcttcaagaagaagcagaagaatggcagcagcgccaagcccagctgcccctactgctgctgtgctgtgggcagcaaggacaggagcctgtctgtgtggctgacctgcctgaagaggcccctggtggtgatccacgagctgtttgacaagagcatcatggacatctcctggaccctgaatggcctgggcatcctggtgtgcagcatggatggctctgtggccttcctggacttcagccaggatgagctgggggaccccctgtctgaggaggagaagagccgcatccaccagagcacctacggcaagagcctggccatcatgacagaggcccagctgagcacagctgtgattgaaaatcctgagatgctgaagtaccagaggcggcagcagcagcagcagctggaccagaagtctgctgccacccgggagatgggcagcgccacctctgtggccggcgtggtgaatggagagagcctggaggacatcaggaagaacctgctgaagaagcaggtggagaccaggacagcagatggaagaagacgcatcacccccctgtgcatcgcccagctggacacaggagacttcagcacagccttcttcaacagcatccccctgagcggcagcctggccggcaccatgctgagcagccacagcagcccccagctgctgcccctggacagcagcacccccaacagctttggagccagcaagccctgcacagagcctgtggtggccgccagcgcccggcctgctggggacagcgtgaacaaggacagcatgaatgccaccagcaccccagctgccctgagccccagcgtgctgaccacccccagcaagattgagcccatgaaggcctttgacagccgcttcacagagaggagcaaggccacccctggggccccagccctgacctccatgacccccacagctgtggagcggctgaaggagcagaacctggtgaaggagctgcggccccgggacctgctggagagcagcagtgacagtgatgagaaggtgcccctggccaaggccagcagcctgagcaagaggaagctggagctggaggtggagaccgtggagaagaagaagaagggccggcccaggaaggacagccggctgatgcctgtgtccctgtctgtgcagagccctgctgccctgacagctgagaaggaggccatgtgcctgagcgccccagccctggccctgaagctgcccatccccagcccccagagggccttcaccctgcaggtgtccagtgaccccagcatgtacatcgaggtggagaatgaggtgacagtggtgggcggcgtgaagctgagccggctgaagtgcaaccgggagggcaaggagtgggagaccgtgctgaccagccgcatcctgacagctgctggcagctgtgatgtggtgtgtgtggcctgtgagaagaggatgctgagcgtcttcagcacctgtggccgccgcctgctgagccccatcctgctgcccagccccatcagcaccctgcactgcaccggcagctatgtgatggccctgacagctgctgccaccctgtctgtgtgggatgtgcaccggcaggtggtggtggtgaaggaggagagcctgcacagcatcctggccggcacctggttcctgaccagcaggacccactggctgtctgtgcagaccctgggcgccgcctgccaccccaggaccccctgctgtgcccaggacagatag

SEQ ID NO: 137437 - DNA, 3054 bp, Artificial Sequence
  derived and/or modified sequence
atgaagctgctgaagcccacctgggtgaaccacaacggcaagcccatattttcagtagacatccacccagacgggaccaaattcgctacagggggccaggggcaggatagtggcaaggtggtgatttggaacatgagcccagtcctccaggaagacgacgagaaagatgaaaacattcctaaaatgctctgtcagatggacaaccacctagcgtgtgttaactgtgtaagatggagtaatagtggtatgtacttggcttctggcggggatgacaagctgataatggtgtggaaaagggcaacttatattgggcctagcacggtctttggcagctccggaaaattagctaacgtggaacagtggcgatgtgtcagcattctgaggaatcattcgggggacgtgatggacgttgcttggtctccccatgatgcttggctggctagctgtagtgtggataataccgtagttatttggaacgcagtgaagtttcctgagatactagccacactcagagggcattctggtctggtcaagggcctaacctgggaccctgtggggaaatacatagcttcgcaagcagacgacagatctctgaaagtctggcggaccctggactggcagctggagaccagcattacaaagccttttgatgagtgcggcggcacaacgcacgtgctgcggctctcttggtctcctgacggacactacttggtgtcagcccacgccatgaacaactcaggtcccacggcccagattatcgaacgcgagggctggaaaaccaacatggacttcgtaggccacaggaaagctgtcacagtggttaagttcaatccaaagatcttcaagaagaagcagaaaaatgggtcaagtgcaaagccgtcttgtccatactgttgttgcgctgtgggcagcaaggaccgaagtttgtccgtgtggctgacgtgcctaaaacggcctctggtagtgatccacgaactgtttgacaaatcgatcatggacatctcctggaccctgaatggacttgggatcctcgtgtgttcaatggatgggtctgtcgcgtttctcgacttctcccaggatgagttgggtgatcccctgtctgaagaggagaaatccagaatccaccagtccacctacggtaaatctcttgccataatgacagaagcccaactaagcacagctgtcatcgagaatcccgaaatgttaaaataccagaggaggcagcagcagcagcagctggaccagaagtcagccgccacaagggagatggggtcagccacgtctgtagcaggtgtggtgaatggcgaatccctggaggatatcagaaagaatctgttgaaaaagcaggtggagactcgaaccgcagacggcagacgtagaattacaccgctgtgtattgctcaactcgacacaggggatttttcaactgccttttttaacagcatccccctttcaggttcgttggccggcacaatgctcagttctcacagcagcccacaacttctccccttggactccagcactcccaatagcttcggcgcttccaaaccatgtacagagccggtggttgcagcatccgcccgaccggcgggcgatagtgtcaataaggatagtatgaacgctacctccacgcccgccgcattgtcgccatctgtactcactaccccctctaagattgaacctatgaaggcatttgactcgaggttcactgaacgaagtaaagccacccccggcgccccggcgttaacatccatgactcctacagccgtggagcggctaaaggaacagaatctggtgaaggaactccggcccagagatctgctggagagctcttctgacagcgacgaaaaagtgcccttagccaaagctagctccctatctaagcgcaaacttgagctggaggtggagaccgttgagaaaaagaagaaagggcgcccaaggaaggattcgaggctgatgccggtgagtctgtctgtgcagtctccggccgcactgaccgcagaaaaggaagccatgtgcctgagtgcccctgcactggcactgaaattacctataccatcaccacagagggcattcaccctgcaagtgagctctgaccctagcatgtacatcgaggtggagaacgaggttaccgtggtcggtggagtgaagctgagcaggctgaagtgtaaccgggaggggaaagagtgggagacagtgctaacaagcaggatactgaccgcagcgggatcgtgcgatgttgtgtgtgtagcctgcgaaaagcggatgctttccgtgttcagcacttgcgggcgaagattgctctccccgatactcctcccctcccccataagtaccctccattgtactggttcgtatgtcatggccctcacggccgctgcaaccctaagcgtctgggatgtgcatagacaagtcgtggttgttaaagaggaaagccttcatagtatacttgccgggagcgatatgactgtttcccagatcttactgactcagcatggaatccctgtgatgaacctgtcagatggaaaagcttactgtttcaatccgtctctgtcaacatggaacctggtgtcagacaagcaggattcgcttgcacagtgtgctgatttccggtcatccctccccagccaggatgccatgctctgtagcggacctctggcaattatccagggtcgcaccagtaactcaggaagacaggcagcccggctgttttcagttccccacgtggtgcaacaggagactaccttagcctatttggagaatcaagtggccgccgcccttaccctgcagagttcccacgaatatagacactggctcctggtgtatgcccgctatctggtgaatgaaggcttcgagtatagactcagagaaatctgcaaggacctcctcggccctgttcactactcaactggaagtcagtgggaaagcactgtggtgggcctgaggaagcgggaattgttgaaggagctgctacctgttattggtcagaacttacgatttcaaagactctttaccgaatgtcaggagcagttggacattctgagagacaaatag

SEQ ID NO: 137438 - DNA, 2433 bp, Artificial Sequence
  derived and/or modified sequence
atgaagctgctgaagcccacctgggtgaaccacaacggcaagcccatcttctcagtagatattcaccccgacggcacgaagtttgcgaccggcgggcagggccaggacagcggtaaggtggtcatttggaacatgtcgcccgtcctccaggaggacgatgagaaggacgaaaacattccaaaaatgctgtgccagatggacaaccacctcgcatgtgtcaactgcgtccggtggagcaattcaggcatgtatctcgcttcaggaggagacgataagttgataatggtatggaaaagggccacttatatcgggccctccactgtctttggcagcagcgggaaattagccaatgtggaacagtggcgatgcgtgagtatcctgcggaaccacagcggcgatgtcatggatgttgcatggagcccacacgatgcctggctggcctcttgttcagttgacaatactgttgtgatctggaacgctgttaagttcccagagatacttgccaccctgcggggacactcaggactagttaagggactgacgtgggaccctgtcggcaaatacattgcaagtcaggcagatgatagaagtctgaaagtctggaggacattagactggcagcttgaaacatcaattactaagcccttcgacgagtgcggaggcactactcacgtcttgagactctcctggtcaccagatggccattatctggtatcagcacacgccatgaataattctggccccaccgctcagattatcgagcgagagggatggaaaaccaatatggattttgtgggtcaccgcaaagctgtcaccgtcgtaaagttcaatccaaaaatctttaaaaaaaaacagaaaaacggcagttccgccaagccatcatgtccttactgttgctgtgccgtaggatcgaaagacagaagcctgagtgtctggttgacttgtctgaagcggccccttgtcgtaattcacgagctgtttgacaagtcaatcatggatatttcttggaccttaaatggtcttggtatcttggtgtgctccatggatggatccgtggccttcctcgacttctcccaggatgagctgggggatcctctttcagaagaggaaaaatcgagaatccaccaatccacctacgggaagtccctcgccatcatgacggaggctcagctgagcaccgccgtcatcgagaacccggaaatgctgaagtaccaaaggaggcagcagcagcagcaactcgaccaaaagtccgcggcaactagggagatgggcagtgcgacatctgtggccggcgtggtcaatggggaaagtcttgaggatatcagaaaaaacctgttaaagaaacaggtcgagacgcggactgccgatgggcgcaggagaatcacgccactatgcatcgcgcagttggatacgggagatttcagcaccgctttctttaattcaatcccgctgtctggcagccttgccggcacaatgctgtcatcgcacagcagcccacagctgctgccgcttgattcttctacccccaattcctttggcgcaagcaagccgtgcacagagcccgtggtggctgccagcgcgaggccagcaggggacagtgtgaacaaggatagcatgaacgcaacatctacgcccgcagccctttcgcccagcgtcctgactacacccagcaagatagagcctatgaaagccttcgactcacgcttcaccgaacgctcgaaggctactcctggagctcctgcccttaccagtatgacaccaacggccgtcgaaagagatgtccatcggcaggtggtggtggtcaaagaggaatctctgcactcgattcttgctgggtccgatatgacagtatcgcagattctactgactcaacacggtatccctgtgatgaatctgtccgacggtaaagcatattgtttcaacccatctctgagcacttggaacctggtaagcgacaagcaggactcactggcccagtgcgcagacttcagaagctccctcccttcacaggacgcaatgctgtgtagcggccccctggcaatcatacaaggcagaacttcgaattccggaaggcaggccgccagactttttagcgtgcctcacgtcgtccagcaggagactaccctcgcttacctcgaaaatcaggttgccgcagctcttacactgcagtcgtcccatgaataccgccattggctgcttgtgtatgccagatatctggtgaatgagggctttgagtaccgtctcagggaaatttgcaaggatctactaggccctgtgcattacagcacaggatcccaatgggagtccactgtcgtgggcctccgcaaacgggaactgcttaaagaactactgcctgtcatcggccagaatctcaggttccaaaggttattcacagaatgccaggaacagttagatatcctgagagataagtag

SEQ ID NO: 137439 - DNA, 1815 bp, Artificial Sequence
  derived and/or modified sequence
atgctgagcagccacagcagcccccagctgctgcccctggacagcagcaccccaaacagcttcggagcttccaagccatgtaccgagcctgttgtcgctgctagcgcccgcccagccggggacagcgtcaataaagattccatgaacgcaaccagcactcccgctgcgctgagtccctctgtactcaccaccccatctaagattgaacccatgaaagctttcgacagcagattcacggagaggtccaaagccacacccggcgcacccgctctgactagcatgaccccaacagccgtagaaaggctgaaggagcagaatctagtgaaggagttgcgtccgcgtgatctgctggagtcctcatcggattctgatgaaaaggttcctctggctaaagcctcatctctgtctaagcgaaaactagagcttgaggtggagacagtggagaagaagaagaagggccgacccaggaaggattcgagattgatgccagtctcactgagcgtgcaatcccctgccgctctcaccgccgagaaggaggcgatgtgcttgtctgcacccgcactagccctcaagctgccaatcccttcaccccagcgggcttttaccctccaggtcagcagcgaccctagcatgtacatagaggtcgaaaacgaggttaccgtggttggcggagtgaagctctcccgactgaaatgcaaccgtgagggcaaggagtgggagactgtcctgactagccgcatcttgactgctgcgggctcctgtgatgttgtctgtgtcgcttgcgaaaaacgcatgttatcggttttctccacctgcggccgccggctgctgtctccgatacttttgcccagcccaatttcaaccctacattgtacaggaagttacgtgatggcccttacggcggctgcaaccctaagtgtgtgggacgtccatcggcaggtggtggtcgtgaaagaggagagtctccacagcattctggctggctctgacatgacggtaagccagatcttgctcacacaacacggcattcctgtcatgaacctctcggacggtaaggcatactgtttcaatccaagcctttccacatggaatctggtgagcgataaacaggacagtctcgcccaatgcgccgattttcgcagtagtttgccctcccaggacgccatgctgtgttcaggacccctggcgataatccaggggagaactagtaacagcggtcgtcaagctgcccgccttttctctgtaccccacgtggtgcagcaggagacgaccctggcatacctagaaaaccaggtcgcggcagccctgacactccaatcaagccacgagtatcgacattggctgctggtgtacgctcgttacctcgtcaacgaggggtcagccgaggagggggcagccgaaggggcggccacctctcatcgggccgagccaccgattcccgcccctttgcacagggtcagcggcaccgctaggcaccccgaagggcaggtcgcctgcccgagcttgccctggctgcaacaaggtcaggggcacacactcgcggccgacgatatgcaggaccgcctctccccagaccaggcagtggggggaggcgatacagggagaaggtgtgctgtgctacaccagagacagccttcgtcactcggaagatgtgcgttatgccctgggtctgatatcgctagcggagggggttcttctagtcttcctccctcccctcgctgcggcgcccgcgccggagcactacctcggtgccccggggcctcaaaggcagtgccagggctgcccagtcctgctcgccctcaaggcggacactag

SEQ ID NO: 137440 - DNA, 2922 bp, Artificial Sequence
  derived and/or modified sequence
atgagccccgtgctgcaggaggacgacgagaaggacgagaacatccccaagatgctgtgccaaatggataatcatctagcctgtgtgaactgcgtccgatggagcaatagcgggatgtacctggctagtggaggagacgataagttaattatggtttggaagcgagcgacctacatcggcccatctactgttttcggaagttcaggtaaacttgcaaatgtcgagcagtggagatgcgtgtccattctgagaaatcacagcggggacgtgatggacgtggcctggtctcctcacgacgcgtggttggccagctgctcggtggataataccgtggttatatggaacgctgttaaatttcctgagatcctagctactctcaggggccattcaggtctggtgaaaggtctaacctgggatcccgtgggcaaatatatcgcctcccaggcagacgaccgcagcctgaaggtatggcggactctggactggcagttagaaacctccattacaaaaccgtttgacgagtgcgggggaactacccacgtcttgcgcctgagctggtcccccgacggacattacttagtgtccgctcacgcaatgaacaactctggccccactgcacagatcatagagcgcgagggctggaaaactaatatggactttgtgggacaccgcaaggccgtgacagtcgtcaaattcaaccccaagattttcaagaaaaagcaaaagaatggttcatccgctaaacctagttgcccctactgctgttgcgcggttggcagcaaggacaggagcctgagcgtatggcttacgtgtctgaaaaggcctctggtggtgatccacgagttgttcgataagtcaattatggacatttcttggaccctaaacggcctagggatccttgtatgcagtatggacggttcggtggcatttctggatttctcccaggatgagctaggtgatcctctgagcgaagaggagaagagccgcatccaccagtccacttatgggaaatcattggctattatgaccgaggcccaattgagcactgcagttatagaaaacccagaaatgctgaagtatcagagacgtcagcaacaacagcaacttgatcagaagagtgctgccacccgagagatgggaagcgcaacatccgtggccggcgtcgtaaacggggaatctctcgaggatatccggaagaacttgctgaagaagcaagtggagacacgaaccgccgacggcagaagacgcataactccgctgtgcattgcccagctcgatacaggagacttctctaccgctttttttaatagcatccccctgagcggctccctcgcggggactatgttgagctctcactcatccccccaacttttacccctggactcctcgacacccaattccttcggcgcttcaaagccatgcacagaacccgtcgtcgccgcatcagccaggccagcaggcgactcagtgaataaagattccatgaacgccacaagcactccagccgcactctcaccgagtgtcctgaccactccttccaaaatcgaaccaatgaaggcctttgacagccgatttaccgagcgttctaaagccacaccaggcgcaccagctctgacatcaatgactcccaccgctgtggagcggctgaaagaacagaacctggtaaaggaactccgccctcgagaccttctcgagtccagctctgactccgacgaaaaagtgcctcttgccaaagccagctccctgtccaaacgcaagctcgaattagaagtggaaacggtagagaagaaaaaaaagggacgccctaggaaggattcacggctcatgcctgtaagcctgtctgtacagagccctgcagccctgacagccgaaaaggaggccatgtgtctgtcagccccagcgctagcacttaaactgcccattccaagccctcagagagcttttacgttgcaagtgagctccgatccaagtatgtacattgaggtggaaaacgaagtgacagtggtaggcggggtgaagcttagcaggctgaagtgtaatagggagggaaaagagtgggagactgtactcacaagccgaatcttgaccgcagccggttcttgtgatgtggtgtgtgtggcctgcgaaaaaagaatgttgtccgttttttctacctgcggccgccgtctgcttagcccaatactcctgccctcacccatatccaccttgcattgtaccgggtcgtatgtaatggccttaacggcggcagctacgctgtccgtgtgggatgttcacaggcaggtggtggtggttaaagaggagtctttgcatagtatcctcgcaggttcggacatgaccgtttcacagattctgcttacgcaacatggaatcccagtgatgaacctcagcgatgggaaggcctactgttttaacccctccctgagcacatggaacctggtgagcgataagcaagactcacttgcccagtgtgctgatttcagatcctctctgccatcacaggatgcgatgttgtgcagtgggccattggccatcatccagggccgcacatctaatagtggccggcaggctgccagactgtttagtgtgcctcatgtagtgcaacaggagactaccctggcctacctggagaaccaagtcgctgccgccctgaccctccaatcatcccacgaatatcgtcattggctactggtgtatgcgaggtatctggtgaacgaggggttcgagtacagactaagagagatatgtaaagatttattgggccctgtgcactacagtacaggctctcagtgggagtccaccgtggtgggtctgagaaaaagagagctgcttaaagaactgttacccgtgatagggcaaaacttgcgattccagcgactcttcacagagtgccaggagcagctagatatactgagagacaagtag

SEQ ID NO: 137441 - DNA, 2421 bp, Artificial Sequence
  derived and/or modified sequence
atgagccccgtgctgcaggaggacgacgagaaggacgagaacatcccaaagatgctctgtcagatggataaccacctcgcgtgtgtgaattgtgttaggtggtccaattcaggcatgtacctggcatccggcggtgatgataaactgatcatggtgtggaagagggccacctatatcggacctagtaccgtctttggctcatccggtaaactggctaacgttgagcagtggagatgtgtaagcattttgcgcaatcactctggcgatgtcatggacgttgcctggagcccgcatgatgcgtggttggccagttgctctgtcgataacaccgtcgttatctggaacgccgtgaaattcccagagatcttggcaacgctgcgcggtcactccggtctcgtcaaggggttgacatgggatccagtcggaaagtatatcgcatcacaggcagatgaccgctcacttaaagtttggcggaccctggactggcagttggaaacaagtattactaagcccttcgacgagtgcggggggacaactcatgtcctgcgcctatcctggtcccctgacggacattatttagttagcgcccatgctatgaataacagtggcccaacagcgcagataatcgaacgggagggctggaaaaccaacatggactttgtcgggcatagaaaagcggtgaccgtggttaaattcaatcctaagatcttcaagaaaaagcagaaaaatggttcttcagctaaaccaagttgcccctactgttgttgcgccgtgggaagcaaagacaggtcccttagtgtctggttaacatgcttgaaacggcccctagtggtcatccacgagctgtttgataaatccataatggatatttcttggacactcaacggactgggcattctcgtttgcagcatggacggcagtgttgcgtttctcgatttctctcaggatgagcttggtgacccactctcggaagaagaaaaaagcagaatacaccagtctacctatgggaaatccctagccataatgacagaggcgcagctgagcacagccgttatagaaaaccccgaaatgctgaaataccaaaggcgccagcagcagcagcagttagatcagaaaagcgcggccaccagagaaatggggagtgcaacgtctgtcgccggagttgtgaacggcgagtctcttgaggatataaggaagaacctcctgaagaaacaggtggagacaaggaccgccgacggtaggcgtagaatcaccccgctgtgtatcgcccagcttgacaccggcgacttcagcaccgcatttttcaactccataccattgtccggcagtctcgctggcacaatgcttagctcccatagttctccgcagttattgccactggattcgtccactcccaacagctttggggcgagcaagccctgcacggagcctgtggtagcagcctctgcgcgccccgccggggattccgtgaataaggacagcatgaatgccacaagcaccccggccgctctatcccccagcgttctgacaaccccttccaaaattgaacctatgaaagcttttgactcacgcttcaccgaaagatcaaaggctacccctggagctccagctctcactagtatgacacctactgcagtcgagcgtctcaaagaacaaaatctcgtgaaggaactgaggccccgcgaccttcttgaatccagcagcgattcagacgagaaagtgcccctcgcaaaagccagctcactgtccaaacggaagctggagcttgaagttgagaccgtcgaaaagaagaaaaagggacgaccacggaaagatagcagactgatgcctgtgtccttatcagtccaatctccagctgcactgaccgccgaaaaggaggcaatgtgtctgagcgcaccggccctcgcgttgaagctccctatcccctctccacagagggccttcacacttcaggtgtccagcgatccctccatgtacattgaggtcgaaaatgaggtcacggtggtcggcggcgtgaagctcagcaggctgaagtgtaatcgggaaggcaaggaatgggaaacagtgctcactagtcgcattctcactgctgccggctcttgcgacgtggtatgcgttgcctgcgaaaagcggatgttatcagtgttcagcacttgtgggcggcgattgcttagtcccattctgctgccctccccgatctccacattgcactgcacagggtcttacgtgatggcccttaccgcagctgctacactgagcgtgtgggacgtgcatagacaggtggtggttgtcaaagaagagagtcttcactctatactcgccgggacttggtttctaaccagtcgaacgcattggctgtccgtccagacactgggagccgcatgtcacccgagaactccttgttgcgcccaagatcgctag

SEQ ID NO: 137442 - DNA, 3054 bp, Artificial Sequence
  derived and/or modified sequence
atgaaactgttgaaacctacatgggtgaatcacaatggaaagcccatctttagcgtggatattcaccctgatgggaccaaattcgctactggtggacaaggccaggattccggcaaggtggtgatctggaatatgtcgccggtgttgcaggaggacgacgaaaaagatgaaaatatccccaagatgctgtgtcagatggacaaccatctcgcatgcgtgaactgtgtgcggtggtccaattcaggaatgtacctggccagcggtggtgacgataagctgatcatggtgtggaagagggctacttacattggaccatcaactgtctttggttctagcggcaaactcgctaatgtcgaacaatggcggtgtgtttccatcctacgtaatcatagtggcgatgttatggatgtagcctggtcccctcacgatgcttggctcgctagctgtagcgtggacaacactgttgttatctggaacgccgtgaaatttcccgaaatccttgccaccctccggggtcactcgggccttgtgaagggactgacatgggaccccgtgggcaaatatatcgcctcccaggccgacgatcgaagtctgaaagtttggaggacgctggattggcagcttgaaactagtattacaaaaccttttgatgagtgtggaggaactacccatgttcttagattgtcctggtcccctgatgggcactacctggtctccgcacatgcaatgaacaattcagggcctacagcgcagatcatagagcgggagggctggaaaacaaatatggactttgttgggcacaggaaagcagtgacagtggtgaaatttaatcctaaaatttttaagaaaaagcaaaagaatggttcttcagccaaaccgagctgcccctactgctgctgcgcggtgggttccaaagaccgcagcctaagtgtttggctcacctgcctcaagcggccattagtcgtgattcatgagctgttcgataaatcaataatggatattagctggactctaaatggtctcggaattctagtatgtagcatggacggttccgtggcatttctcgacttcagccaggatgaactgggagacccactgagtgaagaggagaaaagccggatccatcagagcacatatggtaaaagcttagccatcatgaccgaggctcagttgagtacagccgtgattgaaaatccagagatgctcaaatatcagcggcgacagcagcagcaacaactggaccagaaatcagcagccacgagagagatggggtccgccaccagcgtggccggagtggtgaacggtgaatctctggaagatataaggaaaaacttgttgaagaagcaggttgagactcggaccgcagatggccgtaggcggatcaccccactctgtatcgcccaactagacaccggcgactttagcacggcattctttaattcaatccctctgagcggcagcctggccggtactatgctgagctcccactcgagcccccagctgctgccgctcgatagcagcaccccaaactctttcggggcttctaagccctgcaccgagcctgtagtggcagctagcgcgagaccagccggagacagcgtgaacaaagactctatgaacgccacctccactccggcagcgctgagtccaagcgtgctgacaactccatcaaagatcgagccaatgaaggcattcgacagccgattcacagagcgatcaaaggcgacaccaggagcgccagcactgacaagtatgacccctacggccgtggaacgattaaaagaacagaatcttgtgaaagaactaagacctagggatctgctcgaatcttctagcgactcagacgagaaagtgccactggcaaaggcctcctccctttccaaacggaagttggagctcgaggttgagacagtggaaaagaagaagaaagggcgtccgagaaaggatagtaggctaatgccggtaagcctctcagttcagagccctgctgctctgaccgctgagaaggaggctatgtgcctgagcgccccagctttagctctaaaactccctatacccagtccccagcgggcatttacactgcaggtttcaagcgacccatcaatgtacattgaggtcgagaatgaggtgaccgtggtgggtggagtgaagctcagccgcctcaaatgtaaccgtgaggggaaggaatgggaaacagtccttacatcccggatcttaacggccgctggctcgtgcgatgtggtctgcgtagcgtgtgagaaacggatgttatctgtgttttctacttgtggacgtagactgctgtctcccatcctgctgccctccccaatctcaacactgcactgcactggaagctatgtcatggctctgaccgccgcagcaaccttgtcagtgtgggatgtgcaccggcaagtggtggttgtgaaagaggagtcccttcatagcatcttggccggaagcgatatgaccgtatcccagatattgctgactcagcatggtatcccagttatgaatcttagcgacggcaaggcatattgtttcaatccttcactgtctacctggaacctcgtaagcgacaagcaggattcactagcccagtgcgcagattttcgtagttcacttccctcccaggacgcaatgctctgctcgggacccctggcaatcatacaagggaggacgtcaaatagcggaaggcaggccgctagactctttagtgttcctcacgtggtacagcaagaaaccacgctcgcttatttggaaaaccaggtggcagcggcacttacactacagtcatctcacgagtacaggcattggctcctcgtgtacgccaggtacctggtgaacgaaggtttcgaatatcgcctgcgagagatctgcaaggatctcctgggtcccgtacattactcaaccggatcccagtgggaaagtaccgtggtcggtctcagaaaacgagaactattgaaagagcttttacccgtgattggtcagaacttgaggttccagcgcctgttcactgaatgccaggagcagctggacatactgcgtgacaagtag

SEQ ID NO: 137443 - DNA, 2433 bp, Artificial Sequence
  derived and/or modified sequence
atgaaattgctcaagccaacctgggtgaatcataacggtaagcccattttctctgtcgatatccacccagatggcacgaagtttgcaaccggaggccaggggcaggactctggaaaggtcgttatttggaacatgtcgcccgtgctgcaggaagatgatgagaaagacgagaatatcccaaaaatgttgtgtcagatggacaatcacttagcatgtgtgaactgcgtgagatggtcgaactccggcatgtatttggcctctggaggcgatgacaaacttattatggtgtggaaacgcgcaacttacataggcccatcaactgtatttggatcttctggtaaacttgccaacgtagaacaatggaggtgcgtgtcaatcctccgcaatcacagtggtgacgtgatggacgtggcttggtccccgcatgatgcatggttggcatcttgctcagtcgataataccgtggtcatttggaacgccgtcaagttccctgagatcctagctacactcaggggccacagcggccttgtgaaaggtctcacctgggatcccgtgggcaagtacatcgccagccaagcagacgaccgctcactaaaggtatggcgaacactggattggcagctggaaactagcattactaagccgttcgacgagtgtgggggaacaacacacgtgctgaggctgtcatggtccccagatggacattacttggtgtccgcccacgcgatgaacaacagcggccctacagctcaaatcatcgagcgcgaaggatggaagacaaacatggatttcgtggggcaccgaaaagcggtcaccgtagtgaagtttaatcctaaaatctttaaaaaaaaacagaagaatggatcctccgccaaaccttcctgcccatactgctgctgcgccgtaggaagcaaggataggtccctgtctgtgtggctgacatgtttgaagcgcccacttgttgttatccatgagctgtttgataaaagcattatggatatctcctggactttgaatggattggggatattggtgtgtagcatggacggatctgtagcctttctggacttcagccaagacgagcttggtgatcctctgagcgaagaagagaagtctagaattcatcagagtacatatgggaagtccctggccatcatgaccgaggcccagctttctacggctgtgatcgaaaatcctgaaatgctgaagtaccagagaaggcagcaacaacagcagcttgaccagaaaagcgctgccacccgcgaaatgggaagtgccactagtgtggccggtgtggtgaatggcgaaagtctggaggacatccgcaagaacctgctgaagaagcaagtagagactaggactgcggacggacggaggaggatcacacccctgtgcatcgcccaattagacacgggggatttctcgacggccttttttaattctatccccctgtcaggatcccttgccggaacgatgctgtcttcacacagctcacctcagctgctgcccctggacagtagcactcccaactcttttggcgctagcaagccttgtaccgaaccagtggttgctgcgtccgctaggcctgccggagattccgtaaacaaagattctatgaacgctacttcgacacctgccgctctctcccctagcgtcctcacaaccccctctaaaatcgagccgatgaaagcgtttgatagccgcttcactgaacggtcaaaggctacccctggcgctccagcgctcactagcatgacccccaccgccgtggaaagggatgtgcacaggcaggttgttgtggtgaaggaagaatccctccattccattcttgctgggtcagacatgacagtgagtcaaattttgttgacccagcacggcattcccgtcatgaatctctctgacggaaaggcatattgctttaacccatccctgtctacctggaaccttgtgtccgacaagcaggacagcctggcacaatgcgcggattttcgatcatctctgccgagtcaagatgcgatgctgtgtagcggcccacttgctatcatccagggtaggacctctaatagcgggagacaggccgctaggctgttttccgtcccgcatgtcgttcagcaagagactaccttggcatatctggagaaccaagtcgccgctgccctaacactgcaaagctcacacgagtataggcactggctgcttgtgtacgcccgttacctggtaaacgagggattcgaatatcggctgagggagatttgtaaggacctgctgggcccagtgcactactctacaggcagccaatgggagtctaccgtggtcggcctgaggaagcgggaactgctcaaggaactgctacccgttataggccagaatctgagattccaacgacttttcaccgaatgccaggaacagctggatatccttcgcgataagtag

SEQ ID NO: 137444 - DNA, 1815 bp, Artificial Sequence
  derived and/or modified sequence
atgctgtcttctcattctagcccccaattattgcccctggactccagcacacctaacagttttggagcaagtaagccctgcacagagcccgtagtggcggcaagcgcccgacctgctggggacagcgtgaataaagattcgatgaacgccacatcaacaccagccgctttgtctccttccgtgcttaccaccccctctaagatcgaacccatgaaggccttcgactcacgctttactgagagatcaaaggccacacctggtgcaccggcactgacttctatgactcctaccgcggtggaacggctcaaggaacagaacctcgtcaaagagctcaggcctcgggatctgttggaatcaagttctgatagcgacgaaaaggtgcctcttgctaaagccagtagtctgtccaagcggaaactggaactggaagtcgagacagtggaaaagaaaaaaaaaggccgacctagaaaagactctcgcctcatgccagtgtccctctcagttcagtcgcctgctgccctcactgccgagaaagaggcaatgtgtctctctgcccctgccttagcgctgaaattgcccatcccatcgcctcagagagcgtttactctgcaagtgagcagtgatccttcaatgtacatcgaggtggagaacgaagtcacggtggtaggtggcgttaagttatcacggctgaagtgcaatagagagggcaaggagtgggaaacagtgctgacatcaagaatcctaacagccgcaggcagttgcgacgtcgtgtgcgtggcatgcgagaagagaatgctctccgtgttctccacttgcggcagaagattgctttctccaatactcctcccctctccgatctccactctccactgtacaggcagctacgtgatggcacttacagctgctgccactctttccgtgtgggacgttcacaggcaggtagtggtggtcaaggaagaaagcctgcactctatcctcgcaggctctgatatgacagttagccaaatactgctgacccagcatggcatccccgtaatgaacctctcggatgggaaggcctactgctttaatccatctctgagcacttggaatctggtgtcggataaacaagactcccttgcacagtgtgcagacttcaggtctagcttgccgagtcaggatgctatgctgtgcagtgggccactggcaattattcaagggcgtacaagtaattctggaagacaggcagcacggcttttttcggtgcctcatgttgtgcagcaagagacaacactggcctatctggaaaatcaggtcgcagccgctctgactttacaaagctctcacgagtaccggcactggctgctggtttacgcgaggtacctggttaacgaaggctccgccgaggagggtgccgcagaaggggcagccacatcccacagggccgagcctcctattcccgcacccctgcaccgtgtctccggaaccgcccgacatcctgaagggcaggtcgcttgtccaagcctcccatggctgcaacaaggtcaggggcacactctggctgctgatgatatgcaagatagactgtcacccgaccaggccgtagggggaggcgatacaggaaggcgctgcgccgtgctgcatcaaaggcagccttctagcctaggccgatgtgcgctctgtccaggctctgacatcgcttctggagggggatcttcttcactgccgccatccccacgctgcggtgccagggcgggagcacttccacgctgcccgggtgcctcaaaagccgtgccaggcctgccatctcccgctcgaccacagggagggcactag

SEQ ID NO: 137445 - DNA, 2922 bp, Artificial Sequence
  derived and/or modified sequence
atgtccccggttctgcaagaagacgatgaaaaggatgaaaacattcccaagatgctgtgtcaaatggacaatcatctggcctgtgttaattgcgtccggtggagcaattccggaatgtatctggcctcaggaggtgacgacaagctgatcatggtgtggaaaagagcgacctacattggtccttcaacggtattcggaagctccggaaaactggctaacgtggagcagtggcggtgtgtgtcaattctacggaatcactccggagacgtcatggatgtggcgtggtccccgcatgatgcttggctcgcatcttgctcggtagacaataccgtggtgatatggaatgccgtcaagttcccagaaattcttgcaacactgcggggacacagcggccttgtaaaggggttgacctgggacccagttgggaagtatatcgccagccaggctgacgacagaagcctgaaagtgtggaggacactcgattggcagctggaaaccagtataaccaaacctttcgatgagtgtggtggcactactcatgtccttcgcctgtcttggtctccggatggtcactacctcgtcagtgctcatgcaatgaacaactctgggccaaccgcacaaattatcgaaagagaaggatggaagaccaacatggattttgtgggccatagaaaagcggtgactgtcgtgaagtttaaccctaaaattttcaaaaagaagcagaagaacggctccagtgcgaagcccagctgcccctattgctgttgcgccgtgggcagcaaggacagatctctgtcagtctggttgacctgtctgaagagacctctggtggtcattcacgagctgtttgacaagtctattatggacatcagctggaccttgaatgggttgggcattctggtgtgctctatggatggttcagttgcctttctggacttcagccaggacgagctgggcgatccgctgtccgaagaggagaagtctaggatccaccagagcacatatggcaagtccttggccataatgacagaggctcagctgtccacagccgtgattgaaaatccagagatgcttaaataccaacggcgacagcagcagcagcagcttgaccagaagagcgccgcaacccgcgagatgggatcggctaccagcgtggctggcgtcgtgaacggagaaagcctcgaagatatccggaaaaaccttttgaaaaagcaggtggaaacgcgcactgccgacggaagacgcagaataaccccactttgtatagcccagctggataccggggatttctccaccgctttctttaacagcataccgctgtctgggtccctggcaggcaccatgctgtcctcacattcgtctcctcagctcttacccttggatagctctacacctaacagtttcggcgcttctaaaccatgcaccgagcctgtggtcgctgctagcgctcgccctgccggtgactctgtgaacaaagattctatgaacgctacgtctactcccgcagcattgtctccctctgttctcacaacacctagcaagatcgaacctatgaaggccttcgactctaggttcaccgaacgatctaaggcgacccctggcgcacctgctctgactagtatgactccaacagccgtggagcgattgaaggagcagaatctcgtgaaggaactccggccaagggatctcctggagtcctctagtgacagcgatgagaaagtacctctagccaaagccagtagcttatccaaaagaaaacttgaactagaggtcgagacggtcgaaaaaaaaaagaaaggaaggcctcgcaaagatagtcgtctgatgcccgtgtctttatcagttcagtcgccggctgccttgacggctgagaaggaagctatgtgcctgtctgcacctgcattggctttgaagctcccgatacccagtccccagcgggcttttacgctccaagtcagctccgaccccagtatgtatattgaggtggaaaatgaagtcacggtggtcggcggtgtaaagttatctagactgaagtgcaaccgcgaaggaaaggaatgggaaaccgtgctgacttcgaggatcctgactgcagctggatcatgcgacgtggtgtgcgtcgcttgtgaaaaaagaatgctctctgtgttttccacttgtggcaggagattgctttcaccaattcttcttccatcaccaatcagtacgcttcactgtacgggttcttacgtaatggctctaactgcggctgccaccctctctgtgtgggacgtccatcgtcaggtggttgtggtcaaagaagagtccttgcactcgatcttagcaggtagcgatatgaccgtgagtcagatcctcctaacccaacatgggattccggtcatgaacctctctgacggaaaagcttattgttttaatccaagcctttccacgtggaacttggtttccgataaacaggattcccttgcccagtgcgctgatttccgcagttcactcccatcgcaagacgccatgttgtgtagcggcccattggcaattatacagggtcggacatccaacagtggacgacaagcggcaaggctattcagcgtcccccacgtggttcaacaggaaacgaccctggcatacctggagaaccaggtggccgcagcgctgaccttgcagagctctcacgaatacagacattggctcctagtgtacgcccgttatctggtcaacgaggggtttgagtatcggctcagagaaatctgcaaggatctccttggacccgtacactacagcacagggtcacagtgggagagcaccgtggtcgggctaagaaagagagaactgctaaaggagttactgcctgttataggacaaaatctgcgttttcagagactgtttactgaatgccaggaacaattggatatattgcgggataaatag

SEQ ID NO: 137446 - DNA, 2421 bp, Artificial Sequence
  derived and/or modified sequence
atgtcacctgttctgcaggaagacgatgagaaagatgaaaatattccgaagatgttgtgtcagatggacaatcacctggcctgcgtcaactgtgtgaggtggtctaattcagggatgtatctcgcatcaggcggagacgacaagctcatcatggtctggaaacgggcaacatatatcggccctagcaccgtttttgggtcttccggcaagttggccaatgtggagcaatggagatgcgtgtctatactccgtaatcattctggtgacgtgatggacgttgcttggtccccgcacgacgcctggctggcctcatgttccgtcgacaatactgtggtgatctggaacgcagtcaagttccccgaaattctcgcaactctccgagggcactcaggcctggtcaagggactgacctgggaccccgtaggaaagtacatcgccagccaggctgacgaccgtagcctgaaagtctggcggacactagactggcaactcgaaacgagtatcaccaaaccctttgatgaatgtggaggaaccacccacgtcctgcggctttcttggagtccagacggacattatttggtgtctgcgcatgcgatgaataatagtggaccaactgcccagattatcgaaagagaaggctggaaaacaaatatggactttgtcgggcaccgaaaagctgttacagtagtaaaattcaatcccaagatttttaagaagaagcagaaaaatggttcaagtgccaagccaagctgcccctattgctgctgcgcagtcggctcaaaggaccgtagtcttagtgtgtggctgacctgcttgaagagaccccttgtggtgatccacgaacttttcgataaaagtattatggacattagctggaccctcaacggactgggtattctcgtgtgttcaatggacggcagcgtggcgttcttggacttctctcaggatgaactaggcgaccccctgtctgaggaagagaagagtagaattcaccagtctacttatgggaaatccctagccatcatgacggaggcccagctgagcacagcggtcatcgagaacccagagatgctgaagtatcagcgcagacaacagcagcagcagttagatcagaaaagcgctgcaacacgagaaatggggtcagccacttcagtagctggggtcgtgaatggcgagagtctcgaggacattagaaagaatctgctcaaaaagcaggtcgagacacggacggccgacggtcgacgcaggatcacacctctgtgcattgcccagcttgacaccggcgatttctcaactgctttcttcaacagcatcccactatccgggtctctcgctggcaccatgctcagctcccactcctctccccagctgctaccactcgacagcagtaccccaaacagttttggggcttccaaaccatgtactgagccagttgttgcagcaagcgctagacctgctggggactcagtcaacaaggactctatgaacgcgacatctacgccagccgctctgagtcctagcgtgctcacaaccccttcaaagattgaacccatgaaggcttttgacagtcgtttcacggagcggtcaaaggccacaccaggggcacccgcactcacgtcaatgacacccactgcagtggagcgtttaaaggagcagaacctggtcaaggagttacgccctagagatctgctggagtcgtcctcggactcggacgagaaagttccactcgcaaaggcttccagcctgtccaaaagaaaactggaactggaggtcgagactgtcgagaagaagaaaaagggtcgaccaaggaaggactctcggctgatgcctgttagcctctctgtgcagtcccccgcagccttgactgcagagaaagaggccatgtgtctctcagcaccggctctggcactgaaattgcctataccaagtccccagagggctttcacattgcaggtgagcagcgacccaagcatgtacattgaagttgagaatgaggtgacggttgtaggtggagtcaaactctccagactgaagtgcaatcgagaggggaaggaatgggaaaccgttttaacatcgcgtatactgacagctgcgggtagctgtgacgtcgtttgtgtagcctgtgaaaagcgtatgctttccgtctttagcacctgtggaagacggctgctatcaccaatcttgctcccttcaccaatctctaccctccactgcactggctcttacgttatggctctcacagctgccgctactctcagtgtctgggacgtgcatagacaagtggttgtcgtgaaggaggaatccctgcattcaattttggcaggcacttggtttcttacatcacggacccattggctgagcgttcaaacactgggggcagcctgccatcctaggaccccatgctgcgctcaggatcgctag

SEQ ID NO: 137447 - DNA, 3054 bp, Artificial Sequence
  derived and/or modified sequence
atgaagctgctgaagcccacctgggtgaaccacaacggcaagcccatcttcagcgtggacatccaccccgacggcaccaagttcgccaccggcggccagggccaggacagcggcaaggtggtgatctggaacatgagccccgtgctgcaggaggacgacgagaaggacgagaacatccccaagatgctgtgccagatggacaaccacctggcctgcgtgaactgcgtgagatggagcaacagcggcatgtacctggccagcggcggcgacgacaagctgatcatggtgtggaagagagccacctacatcggccccagcaccgtgttcggcagcagcggcaagctggccaacgtggagcagtggagatgcgtgagcatcctgagaaaccacagcggcgacgtgatggacgtggcctggagcccccacgacgcctggctggccagctgcagcgtggacaacaccgtggtgatctggaacgccgtgaagttccccgagatcctggccaccctgagaggccacagcggcctggtgaagggcctgacctgggaccccgtgggcaagtacatcgccagccaggccgacgacagaagcctgaaggtgtggagaaccctggactggcagctggagaccagcatcaccaagcccttcgacgagtgcggcggcaccacccacgtgctgagactgagctggagccccgacggccactacctggtgagcgcccacgccatgaacaacagcggccccaccgcccagatcatcgagagagagggctggaagaccaacatggacttcgtgggccacagaaaggccgtgaccgtggtgaagttcaaccccaagatcttcaagaagaagcagaagaacggcagcagcgccaagcccagctgcccctactgctgctgcgccgtgggcagcaaggacagaagcctgagcgtgtggctgacctgcctgaagagacccctggtggtgatccacgagctgttcgacaagagcatcatggacatcagctggaccctgaacggcctgggcatcctggtgtgcagcatggacggcagcgtggccttcctggacttcagccaggacgagctgggcgaccccctgagcgaggaggagaagagcagaatccaccagagcacctacggcaagagcctggccatcatgaccgaggcccagctgagcaccgccgtgatcgagaaccccgagatgctgaagtaccagagaagacagcagcagcagcagctggaccagaagagcgccgccaccagagagatgggcagcgccaccagcgtggccggcgtggtgaacggcgagagcctggaggacatcagaaagaacctgctgaagaagcaggtggagaccagaaccgccgacggcagaagaagaatcacccccctgtgcatcgcccagctggacaccggcgacttcagcaccgccttcttcaacagcatccccctgagcggcagcctggccggcaccatgctgagcagccacagcagcccccagctgctgcccctggacagcagcacccccaacagcttcggcgccagcaagccctgcaccgagcccgtggtggccgccagcgccagacccgccggcgacagcgtgaacaaggacagcatgaacgccaccagcacccccgccgccctgagccccagcgtgctgaccacccccagcaagatcgagcccatgaaggccttcgacagcagattcaccgagagaagcaaggccacccccggcgcccccgccctgaccagcatgacccccaccgccgtggagagactgaaggagcagaacctggtgaaggagctgagacccagagacctgctggagagcagcagcgacagcgacgagaaggtgcccctggccaaggccagcagcctgagcaagagaaagctggagctggaggtggagaccgtggagaagaagaagaagggcagacccagaaaggacagcagactgatgcccgtgagcctgagcgtgcagagccccgccgccctgaccgccgagaaggaggccatgtgcctgagcgcccccgccctggccctgaagctgcccatccccagcccccagagagccttcaccctgcaggtgagcagcgaccccagcatgtacatcgaggtggagaacgaggtgaccgtggtgggcggcgtgaagctgagcagactgaagtgcaacagagagggcaaggagtgggagaccgtgctgaccagcagaatcctgaccgccgccggcagctgcgacgtggtgtgcgtggcctgcgagaagagaatgctgagcgtgttcagcacctgcggcagaagactgctgagccccatcctgctgcccagccccatcagcaccctgcactgcaccggcagctacgtgatggccctgaccgccgccgccaccctgagcgtgtgggacgtgcacagacaggtggtggtggtgaaggaggagagcctgcacagcatcctggccggcagcgacatgaccgtgagccagatcctgctgacccagcacggcatccccgtgatgaacctgagcgacggcaaggcctactgcttcaaccccagcctgagcacctggaacctggtgagcgacaagcaggacagcctggcccagtgcgccgacttcagaagcagcctgcccagccaggacgccatgctgtgcagcggccccctggccatcatccagggcagaaccagcaacagcggcagacaggccgccagactgttcagcgtgccccacgtggtgcagcaggagaccaccctggcctacctggagaaccaggtggccgccgccctgaccctgcagagcagccacgagtacagacactggctgctggtgtacgccagatacctggtgaacgagggcttcgagtacagactgagagagatctgcaaggacctgctgggccccgtgcactacagcaccggcagccagtgggagagcaccgtggtgggcctgagaaagagagagctgctgaaggagctgctgcccgtgatcggccagaacctgagattccagagactgttcaccgagtgccaggagcagctggacatcctgagagacaagtag

SEQ ID NO: 137448 - DNA, 2433 bp, Artificial Sequence
  derived and/or modified sequence
atgaagctgctgaagcccacctgggtgaaccacaacggcaagcccatcttcagcgtggacatccaccccgacggcaccaagttcgccaccggcggccagggccaggacagcggcaaggtggtgatctggaacatgagccccgtgctgcaggaggacgacgagaaggacgagaacatccccaagatgctgtgccagatggacaaccacctggcctgcgtgaactgcgtgagatggagcaacagcggcatgtacctggccagcggcggcgacgacaagctgatcatggtgtggaagagagccacctacatcggccccagcaccgtgttcggcagcagcggcaagctggccaacgtggagcagtggagatgcgtgagcatcctgagaaaccacagcggcgacgtgatggacgtggcctggagcccccacgacgcctggctggccagctgcagcgtggacaacaccgtggtgatctggaacgccgtgaagttccccgagatcctggccaccctgagaggccacagcggcctggtgaagggcctgacctgggaccccgtgggcaagtacatcgccagccaggccgacgacagaagcctgaaggtgtggagaaccctggactggcagctggagaccagcatcaccaagcccttcgacgagtgcggcggcaccacccacgtgctgagactgagctggagccccgacggccactacctggtgagcgcccacgccatgaacaacagcggccccaccgcccagatcatcgagagagagggctggaagaccaacatggacttcgtgggccacagaaaggccgtgaccgtggtgaagttcaaccccaagatcttcaagaagaagcagaagaacggcagcagcgccaagcccagctgcccctactgctgctgcgccgtgggcagcaaggacagaagcctgagcgtgtggctgacctgcctgaagagacccctggtggtgatccacgagctgttcgacaagagcatcatggacatcagctggaccctgaacggcctgggcatcctggtgtgcagcatggacggcagcgtggccttcctggacttcagccaggacgagctgggcgaccccctgagcgaggaggagaagagcagaatccaccagagcacctacggcaagagcctggccatcatgaccgaggcccagctgagcaccgccgtgatcgagaaccccgagatgctgaagtaccagagaagacagcagcagcagcagctggaccagaagagcgccgccaccagagagatgggcagcgccaccagcgtggccggcgtggtgaacggcgagagcctggaggacatcagaaagaacctgctgaagaagcaggtggagaccagaaccgccgacggcagaagaagaatcacccccctgtgcatcgcccagctggacaccggcgacttcagcaccgccttcttcaacagcatccccctgagcggcagcctggccggcaccatgctgagcagccacagcagcccccagctgctgcccctggacagcagcacccccaacagcttcggcgccagcaagccctgcaccgagcccgtggtggccgccagcgccagacccgccggcgacagcgtgaacaaggacagcatgaacgccaccagcacccccgccgccctgagccccagcgtgctgaccacccccagcaagatcgagcccatgaaggccttcgacagcagattcaccgagagaagcaaggccacccccggcgcccccgccctgaccagcatgacccccaccgccgtggagagagacgtgcacagacaggtggtggtggtgaaggaggagagcctgcacagcatcctggccggcagcgacatgaccgtgagccagatcctgctgacccagcacggcatccccgtgatgaacctgagcgacggcaaggcctactgcttcaaccccagcctgagcacctggaacctggtgagcgacaagcaggacagcctggcccagtgcgccgacttcagaagcagcctgcccagccaggacgccatgctgtgcagcggccccctggccatcatccagggcagaaccagcaacagcggcagacaggccgccagactgttcagcgtgccccacgtggtgcagcaggagaccaccctggcctacctggagaaccaggtggccgccgccctgaccctgcagagcagccacgagtacagacactggctgctggtgtacgccagatacctggtgaacgagggcttcgagtacagactgagagagatctgcaaggacctgctgggccccgtgcactacagcaccggcagccagtgggagagcaccgtggtgggcctgagaaagagagagctgctgaaggagctgctgcccgtgatcggccagaacctgagattccagagactgttcaccgagtgccaggagcagctggacatcctgagagacaagtag

SEQ ID NO: 137449 - DNA, 1815 bp, Artificial Sequence
  derived and/or modified sequence
atgctgagcagccacagcagcccccagctgctgcccctggacagcagcacccccaacagcttcggcgccagcaagccctgcaccgagcccgtggtggccgccagcgccagacccgccggcgacagcgtgaacaaggacagcatgaacgccaccagcacccccgccgccctgagccccagcgtgctgaccacccccagcaagatcgagcccatgaaggccttcgacagcagattcaccgagagaagcaaggccacccccggcgcccccgccctgaccagcatgacccccaccgccgtggagagactgaaggagcagaacctggtgaaggagctgagacccagagacctgctggagagcagcagcgacagcgacgagaaggtgcccctggccaaggccagcagcctgagcaagagaaagctggagctggaggtggagaccgtggagaagaagaagaagggcagacccagaaaggacagcagactgatgcccgtgagcctgagcgtgcagagccccgccgccctgaccgccgagaaggaggccatgtgcctgagcgcccccgccctggccctgaagctgcccatccccagcccccagagagccttcaccctgcaggtgagcagcgaccccagcatgtacatcgaggtggagaacgaggtgaccgtggtgggcggcgtgaagctgagcagactgaagtgcaacagagagggcaaggagtgggagaccgtgctgaccagcagaatcctgaccgccgccggcagctgcgacgtggtgtgcgtggcctgcgagaagagaatgctgagcgtgttcagcacctgcggcagaagactgctgagccccatcctgctgcccagccccatcagcaccctgcactgcaccggcagctacgtgatggccctgaccgccgccgccaccctgagcgtgtgggacgtgcacagacaggtggtggtggtgaaggaggagagcctgcacagcatcctggccggcagcgacatgaccgtgagccagatcctgctgacccagcacggcatccccgtgatgaacctgagcgacggcaaggcctactgcttcaaccccagcctgagcacctggaacctggtgagcgacaagcaggacagcctggcccagtgcgccgacttcagaagcagcctgcccagccaggacgccatgctgtgcagcggccccctggccatcatccagggcagaaccagcaacagcggcagacaggccgccagactgttcagcgtgccccacgtggtgcagcaggagaccaccctggcctacctggagaaccaggtggccgccgccctgaccctgcagagcagccacgagtacagacactggctgctggtgtacgccagatacctggtgaacgagggcagcgccgaggagggcgccgccgagggcgccgccaccagccacagagccgagccccccatccccgcccccctgcacagagtgagcggcaccgccagacaccccgagggccaggtggcctgccccagcctgccctggctgcagcagggccagggccacaccctggccgccgacgacatgcaggacagactgagccccgaccaggccgtgggcggcggcgacaccggcagaagatgcgccgtgctgcaccagagacagcccagcagcctgggcagatgcgccctgtgccccggcagcgacatcgccagcggcggcggcagcagcagcctgccccccagccccagatgcggcgccagagccggcgccctgcccagatgccccggcgccagcaaggccgtgcccggcctgcccagccccgccagaccccagggcggccactag

SEQ ID NO: 137450 - DNA, 2922 bp, Artificial Sequence
  derived and/or modified sequence
atgagccccgtgctgcaggaggacgacgagaaggacgagaacatccccaagatgctgtgccagatggacaaccacctggcctgcgtgaactgcgtgagatggagcaacagcggcatgtacctggccagcggcggcgacgacaagctgatcatggtgtggaagagagccacctacatcggccccagcaccgtgttcggcagcagcggcaagctggccaacgtggagcagtggagatgcgtgagcatcctgagaaaccacagcggcgacgtgatggacgtggcctggagcccccacgacgcctggctggccagctgcagcgtggacaacaccgtggtgatctggaacgccgtgaagttccccgagatcctggccaccctgagaggccacagcggcctggtgaagggcctgacctgggaccccgtgggcaagtacatcgccagccaggccgacgacagaagcctgaaggtgtggagaaccctggactggcagctggagaccagcatcaccaagcccttcgacgagtgcggcggcaccacccacgtgctgagactgagctggagccccgacggccactacctggtgagcgcccacgccatgaacaacagcggccccaccgcccagatcatcgagagagagggctggaagaccaacatggacttcgtgggccacagaaaggccgtgaccgtggtgaagttcaaccccaagatcttcaagaagaagcagaagaacggcagcagcgccaagcccagctgcccctactgctgctgcgccgtgggcagcaaggacagaagcctgagcgtgtggctgacctgcctgaagagacccctggtggtgatccacgagctgttcgacaagagcatcatggacatcagctggaccctgaacggcctgggcatcctggtgtgcagcatggacggcagcgtggccttcctggacttcagccaggacgagctgggcgaccccctgagcgaggaggagaagagcagaatccaccagagcacctacggcaagagcctggccatcatgaccgaggcccagctgagcaccgccgtgatcgagaaccccgagatgctgaagtaccagagaagacagcagcagcagcagctggaccagaagagcgccgccaccagagagatgggcagcgccaccagcgtggccggcgtggtgaacggcgagagcctggaggacatcagaaagaacctgctgaagaagcaggtggagaccagaaccgccgacggcagaagaagaatcacccccctgtgcatcgcccagctggacaccggcgacttcagcaccgccttcttcaacagcatccccctgagcggcagcctggccggcaccatgctgagcagccacagcagcccccagctgctgcccctggacagcagcacccccaacagcttcggcgccagcaagccctgcaccgagcccgtggtggccgccagcgccagacccgccggcgacagcgtgaacaaggacagcatgaacgccaccagcacccccgccgccctgagccccagcgtgctgaccacccccagcaagatcgagcccatgaaggccttcgacagcagattcaccgagagaagcaaggccacccccggcgcccccgccctgaccagcatgacccccaccgccgtggagagactgaaggagcagaacctggtgaaggagctgagacccagagacctgctggagagcagcagcgacagcgacgagaaggtgcccctggccaaggccagcagcctgagcaagagaaagctggagctggaggtggagaccgtggagaagaagaagaagggcagacccagaaaggacagcagactgatgcccgtgagcctgagcgtgcagagccccgccgccctgaccgccgagaaggaggccatgtgcctgagcgcccccgccctggccctgaagctgcccatccccagcccccagagagccttcaccctgcaggtgagcagcgaccccagcatgtacatcgaggtggagaacgaggtgaccgtggtgggcggcgtgaagctgagcagactgaagtgcaacagagagggcaaggagtgggagaccgtgctgaccagcagaatcctgaccgccgccggcagctgcgacgtggtgtgcgtggcctgcgagaagagaatgctgagcgtgttcagcacctgcggcagaagactgctgagccccatcctgctgcccagccccatcagcaccctgcactgcaccggcagctacgtgatggccctgaccgccgccgccaccctgagcgtgtgggacgtgcacagacaggtggtggtggtgaaggaggagagcctgcacagcatcctggccggcagcgacatgaccgtgagccagatcctgctgacccagcacggcatccccgtgatgaacctgagcgacggcaaggcctactgcttcaaccccagcctgagcacctggaacctggtgagcgacaagcaggacagcctggcccagtgcgccgacttcagaagcagcctgcccagccaggacgccatgctgtgcagcggccccctggccatcatccagggcagaaccagcaacagcggcagacaggccgccagactgttcagcgtgccccacgtggtgcagcaggagaccaccctggcctacctggagaaccaggtggccgccgccctgaccctgcagagcagccacgagtacagacactggctgctggtgtacgccagatacctggtgaacgagggcttcgagtacagactgagagagatctgcaaggacctgctgggccccgtgcactacagcaccggcagccagtgggagagcaccgtggtgggcctgagaaagagagagctgctgaaggagctgctgcccgtgatcggccagaacctgagattccagagactgttcaccgagtgccaggagcagctggacatcctgagagacaagtag

SEQ ID NO: 137451 - DNA, 2421 bp, Artificial Sequence
  derived and/or modified sequence
atgagccccgtgctgcaggaggacgacgagaaggacgagaacatccccaagatgctgtgccagatggacaaccacctggcctgcgtgaactgcgtgagatggagcaacagcggcatgtacctggccagcggcggcgacgacaagctgatcatggtgtggaagagagccacctacatcggccccagcaccgtgttcggcagcagcggcaagctggccaacgtggagcagtggagatgcgtgagcatcctgagaaaccacagcggcgacgtgatggacgtggcctggagcccccacgacgcctggctggccagctgcagcgtggacaacaccgtggtgatctggaacgccgtgaagttccccgagatcctggccaccctgagaggccacagcggcctggtgaagggcctgacctgggaccccgtgggcaagtacatcgccagccaggccgacgacagaagcctgaaggtgtggagaaccctggactggcagctggagaccagcatcaccaagcccttcgacgagtgcggcggcaccacccacgtgctgagactgagctggagccccgacggccactacctggtgagcgcccacgccatgaacaacagcggccccaccgcccagatcatcgagagagagggctggaagaccaacatggacttcgtgggccacagaaaggccgtgaccgtggtgaagttcaaccccaagatcttcaagaagaagcagaagaacggcagcagcgccaagcccagctgcccctactgctgctgcgccgtgggcagcaaggacagaagcctgagcgtgtggctgacctgcctgaagagacccctggtggtgatccacgagctgttcgacaagagcatcatggacatcagctggaccctgaacggcctgggcatcctggtgtgcagcatggacggcagcgtggccttcctggacttcagccaggacgagctgggcgaccccctgagcgaggaggagaagagcagaatccaccagagcacctacggcaagagcctggccatcatgaccgaggcccagctgagcaccgccgtgatcgagaaccccgagatgctgaagtaccagagaagacagcagcagcagcagctggaccagaagagcgccgccaccagagagatgggcagcgccaccagcgtggccggcgtggtgaacggcgagagcctggaggacatcagaaagaacctgctgaagaagcaggtggagaccagaaccgccgacggcagaagaagaatcacccccctgtgcatcgcccagctggacaccggcgacttcagcaccgccttcttcaacagcatccccctgagcggcagcctggccggcaccatgctgagcagccacagcagcccccagctgctgcccctggacagcagcacccccaacagcttcggcgccagcaagccctgcaccgagcccgtggtggccgccagcgccagacccgccggcgacagcgtgaacaaggacagcatgaacgccaccagcacccccgccgccctgagccccagcgtgctgaccacccccagcaagatcgagcccatgaaggccttcgacagcagattcaccgagagaagcaaggccacccccggcgcccccgccctgaccagcatgacccccaccgccgtggagagactgaaggagcagaacctggtgaaggagctgagacccagagacctgctggagagcagcagcgacagcgacgagaaggtgcccctggccaaggccagcagcctgagcaagagaaagctggagctggaggtggagaccgtggagaagaagaagaagggcagacccagaaaggacagcagactgatgcccgtgagcctgagcgtgcagagccccgccgccctgaccgccgagaaggaggccatgtgcctgagcgcccccgccctggccctgaagctgcccatccccagcccccagagagccttcaccctgcaggtgagcagcgaccccagcatgtacatcgaggtggagaacgaggtgaccgtggtgggcggcgtgaagctgagcagactgaagtgcaacagagagggcaaggagtgggagaccgtgctgaccagcagaatcctgaccgccgccggcagctgcgacgtggtgtgcgtggcctgcgagaagagaatgctgagcgtgttcagcacctgcggcagaagactgctgagccccatcctgctgcccagccccatcagcaccctgcactgcaccggcagctacgtgatggccctgaccgccgccgccaccctgagcgtgtgggacgtgcacagacaggtggtggtggtgaaggaggagagcctgcacagcatcctggccggcacctggttcctgaccagcagaacccactggctgagcgtgcagaccctgggcgccgcctgccaccccagaaccccctgctgcgcccaggacagatag

SEQ ID NO: 137452 - DNA, 552 bp, Artificial Sequence
  derived and/or modified sequence
atggagagagtgcagcccctggaggagaacgtgggcaacgccgccagacccagattcgagagaaacaagctgctgctggtggccagcgtgatccagggcctgggcctgctgctgtgcttcacctacatctgcctgcacttcagcgccctgcaggtgagccacagataccccagaatccagagcatcaaggtgcagttcaccgagtacaagaaggagaagggcttcatcctgaccagccagaaggaggacgagatcatgaaggtgcagaacaacagcgtgatcatcaactgcgacggcttctacctgatcagcctgaagggctacttcagccaggaggtgaacatcagcctgcactaccagaaggacgaggagcccctgttccagctgaagaaggtgagaagcgtgaacagcctgatggtggccagcctgacctacaaggacaaggtgtacctgaacgtgaccaccgacaacaccagcctggacgacttccacgtgaacggcggcgagctgatcctgatccaccagaaccccggcgagttctgcgtgctgtag

SEQ ID NO: 137453 - DNA, 552 bp, Artificial Sequence
  derived and/or modified sequence
atggagcgtgtgcagcctcttgaggagaatgtgggaaatgcagcccggcctcgattcgaacgtaataaactcctgctcgtggcctccgtgatccagggtctcggtttattgctgtgttttacctatatatgcttacactttagtgcattacaggtctcacaccggtaccctcgcattcagtctataaaagtgcagtttaccgagtataagaaggagaaaggttttatactgacttctcagaaagaggacgagatcatgaaggtgcagaataatagcgtcattatcaactgcgatggattctatctaatttccctaaaggggtacttcagccaggaggtcaatatatcactgcactatcaaaaggacgaggagcccctgtttcaactgaagaaagtgcgatcagttaactctctgatggttgcctctctgacctataaggacaaagtctacttgaacgtgacaactgacaacacctcactggatgactttcatgtgaatgggggggaactgattcttatccatcagaatccaggagaattctgtgtgctctag

SEQ ID NO: 137454 - DNA, 552 bp, Artificial Sequence
  derived and/or modified sequence
atggagcgggtgcagcccctggaggagaatgtgggcaatgctgcccggcccaggtttgaaagaaacaagctgctgctggtggccagcgtcatccagggcctgggcctgctgctgtgcttcacctacatctgcctgcacttcagcgccctgcaggtgagccaccgctacccccgcatccagagcatcaaggtgcagttcacagagtacaagaaggagaagggcttcatcctgaccagccagaaggaggatgagatcatgaaggtgcagaacaacagcgtcatcatcaactgtgatggcttctacctgatcagcctgaagggctacttcagccaggaggtgaacatcagcctgcactaccagaaggatgaggagcccctcttccagctgaagaaggtgcgctctgtgaacagcctgatggtggccagcctgacctacaaggacaaggtgtacctgaatgtgaccacagacaacaccagcctggatgacttccacgtgaatggaggagagctgatcctgatccaccagaaccctggagagttctgtgtgctgtag

SEQ ID NO: 137455 - DNA, 552 bp, Artificial Sequence
  derived and/or modified sequence
atggagcgggtgcagcccctggaggagaacgtgggcaacgccgcccgcccgcgttttgagcgaaataagttactgcttgttgcatctgtgatacaggggttgggtttacttctttgctttacatatatttgtctccactttagtgcgcttcaggtatcccatcggtacccgcgcatccagtcaatcaaggtccagttcactgaatataaaaaggagaaaggattcattctgacttcacaaaaagaggacgaaatcatgaaagtgcagaacaactctgtaattataaactgcgatgggttctatctgatcagtctgaagggatattttagccaggaagtaaatatttcactacattatcagaaggacgaagaaccactttttcaactgaagaaagtccggtccgtgaactccctgatggttgctagccttacctacaaggataaagtctatttaaacgtcacaacagataacactagcctcgacgatttccatgtgaacggaggtgaactgatattgatccatcaaaaccccggcgagttctgcgttttatag

SEQ ID NO: 137456 - DNA, 552 bp, Artificial Sequence
  derived and/or modified sequence
atggagcgggtccagcccctcgaggagaacgttggtaatgccgcacgtcccaggtttgaacgcaacaagctgctgttggtggccagcgtcattcaggggctgggtttgttgctgtgcttcacttacatctgtctgcattttagtgcactccaggtgtcccaccgctacccccgtatccaatccattaaagtccaatttaccgaatacaaaaaagagaagggtttcattcttacctcccagaaggaggatgaaattatgaaggtgcagaacaattctgttatcatcaactgtgacggattctatctgatttcactgaagggatacttttcccaggaggtgaacatcagtctgcattatcagaaggacgaagaaccgctttttcaactgaagaaggttaggagtgtgaactccttaatggtagccagcctgacatataaggacaaggtatatctgaacgtcaccactgataacacctctttagacgattttcatgtaaatgggggagaattgatactcattcaccagaatccgggtgagttttgtgttctgtag

SEQ ID NO: 137457 - protein, 527 aa, Artificial Sequence
  derived and/or modified sequence
MILSSYNTIQSVFCCCCCCSVQKRQMRTQISLSTDEELPEKYTQRRRPWLSQLSNKKQSNTGRVQPSKRKPLPPLPPSEVAEEKIQVKALYDFLPREPCNLALRRAEEYLILEKYNPHWWKARDRLGNEGLIPSNYVTENKITNLEIYEWYHRNITRNQAEHLLRQESKEGAFIVRDSRHLGSYTISVFMGARRSTEAAIKHYQIKKNDSGQWYVAERHAFQSIPELIWYHQHNAAGLMTRLRYPVGLMGSCLPATAGFSYEKWEIDPSELAFIKEIGSGQFGVVHLGEWRSHIQVAIKAINEGSMSEEDFIEEAKVMMKLSHSKLVQLYGVCIQRKPLYIVTEFMENGCLLNYLRENKGKLRKEMLLSVCQDICEGMEYLERNGYIHRDLAARNCLVSSTCIVKISDFGMTRYVLDDEYVSSFGAKFPIKWSPPEVFLFNKYSSKSDVWSFGVLMWEVFTEGKMPFENKSNLQVVEAISEGFRLYRPHLAPMSIYEVMYSCWHEKPEGRPTFAELLRAVTEIAETW

SEQ ID NO: 137458 - DNA, 1584 bp, Artificial Sequence
  derived and/or modified sequence
atgatcctgagcagctacaacaccatccagagcgtgttctgctgctgctgctgctgcagcgtgcagaagagacagatgagaacccagatcagcctgagcaccgacgaggagctgcccgagaagtacacccagagaagaagaccctggctgagccagctgagcaacaagaagcagagcaacaccggcagagtgcagcccagcaagagaaagcccctgccccccctgccccccagcgaggtggccgaggagaagatccaggtgaaggccctgtacgacttcctgcccagagagccctgcaacctggccctgagaagagccgaggagtacctgatcctggagaagtacaacccccactggtggaaggccagagacagactgggcaacgagggcctgatccccagcaactacgtgaccgagaacaagatcaccaacctggagatctacgagtggtaccacagaaacatcaccagaaaccaggccgagcacctgctgagacaggagagcaaggagggcgccttcatcgtgagagacagcagacacctgggcagctacaccatcagcgtgttcatgggcgccagaagaagcaccgaggccgccatcaagcactaccagatcaagaagaacgacagcggccagtggtacgtggccgagagacacgccttccagagcatccccgagctgatctggtaccaccagcacaacgccgccggcctgatgaccagactgagataccccgtgggcctgatgggcagctgcctgcccgccaccgccggcttcagctacgagaagtgggagatcgaccccagcgagctggccttcatcaaggagatcggcagcggccagttcggcgtggtgcacctgggcgagtggagaagccacatccaggtggccatcaaggccatcaacgagggcagcatgagcgaggaggacttcatcgaggaggccaaggtgatgatgaagctgagccacagcaagctggtgcagctgtacggcgtgtgcatccagagaaagcccctgtacatcgtgaccgagttcatggagaacggctgcctgctgaactacctgagagagaacaagggcaagctgagaaaggagatgctgctgagcgtgtgccaggacatctgcgagggcatggagtacctggagagaaacggctacatccacagagacctggccgccagaaactgcctggtgagcagcacctgcatcgtgaagatcagcgacttcggcatgaccagatacgtgctggacgacgagtacgtgagcagcttcggcgccaagttccccatcaagtggagcccccccgaggtgttcctgttcaacaagtacagcagcaagagcgacgtgtggagcttcggcgtgctgatgtgggaggtgttcaccgagggcaagatgcccttcgagaacaagagcaacctgcaggtggtggaggccatcagcgagggcttcagactgtacagaccccacctggcccccatgagcatctacgaggtgatgtacagctgctggcacgagaagcccgagggcagacccaccttcgccgagctgctgagagccgtgaccgagatcgccgagacctggtag

SEQ ID NO: 137459 - DNA, 1584 bp, Artificial Sequence
  derived and/or modified sequence
atgattctttccagctacaataccatacaaagcgtcttctgctgttgctgctgctgctctgtgcaaaagaggcaaatgaggactcagatatctttaagcacagacgaggaattgcctgagaagtatacgcagcgccgacggccatggctttctcagctttcaaacaaaaagcaaagcaatactgggagggtgcagccctccaaacggaagcctctcccaccgctacctcccagtgaagtcgcagaggaaaagattcaggtgaaggccttgtatgattttttgccacgtgagccgtgtaacctcgcccttcggagagcggaagagtacttgatactggagaaatacaatcctcactggtggaaagctagggatcggctcggtaacgagggtctcataccctctaattacgtgactgagaacaagattacaaatctggagatctacgaatggtaccaccgaaatatcaccagaaatcaagccgagcaccttctgcggcaagagagtaaggagggagctttcattgtgcgggattctcggcatctcgggtcctacaccatcagcgtctttatgggggccaggcgctcgactgaagccgctattaaacattatcagattaaaaagaatgatagcgggcagtggtatgtggccgagcgtcatgcctttcaatcgatccctgagctgatctggtaccaccaacacaatgccgctgggctgatgaccaggttgcgctatcctgtgggactgatgggaagctgcttacccgccaccgccggcttttcgtacgaaaagtgggagatcgaccccagcgagctggctttcatcaaggaaattgggagtggccaatttggagttgtgcacctaggcgagtggagaagccatattcaggtagccattaaagcaattaatgaaggctccatgagcgaggaagatttcatcgaagaggcaaaggtaatgatgaagttgtctcactcgaagcttgtgcagctgtacggcgtctgcattcaacggaaacctctgtacattgtcactgagtttatggaaaacggatgcctgcttaattacctgcgggagaacaaaggaaagctcagaaaggagatgctgctctctgtgtgccaggacatttgcgagggaatggagtacttagagaggaacggctatatccacagggacctcgcggctaggaactgcctcgtcagctcaacatgtatcgtgaaaatcagcgacttcgggatgaccaggtatgtgttagacgacgagtacgtgtcatcgttcggggcaaaattccctatcaagtggtctcccccagaagtcttcctgttcaataagtacagctctaaaagtgacgtgtggagctttggggtgttgatgtgggaagtcttcaccgagggaaaaatgccttttgagaataaatctaatttgcaagttgtcgaggctatttctgaaggctttcgtctatacaggcctcacctggcacccatgtccatttacgaagtgatgtacagttgctggcatgagaagccagaggggcgccccacttttgccgagctactgagggccgtgacggaaatcgcagaaacatggtag

SEQ ID NO: 137460 - DNA, 1584 bp, Artificial Sequence
  derived and/or modified sequence
atgatcctgagcagctacaacaccatccagagcgtcttctgctgctgctgctgctgcagcgtgcagaagaggcagatgaggacccagatcagcctgagcacagatgaggagctgcctgagaagtacacccagaggcggcggccctggctgagccagctgagcaacaagaagcagagcaacacaggccgggtgcagcccagcaagaggaagcccctgccccccctgccccccagcgaggtggccgaggagaagatccaggtgaaggccctgtatgacttcctgccccgggagccctgcaacctggccctgcggcgggcagaggagtacctgatcctggagaagtacaacccccactggtggaaggcccgggaccggctgggcaatgaaggcctcatccccagcaactacgtgacagagaacaagatcaccaacctggagatctatgagtggtaccacaggaacatcaccaggaaccaggccgagcacctgctgcggcaggagagcaaggagggcgccttcatcgtgcgggacagccgccacctgggcagctacaccatctctgtgttcatgggcgcccggcgcagcacagaggccgccatcaagcactaccagatcaagaagaatgacagcggccagtggtacgtggccgagagacatgccttccagagcatccctgagctgatctggtaccaccagcacaatgctgctggcctgatgacccggctgcgctaccctgtgggcctgatgggcagctgcctgcctgccacagctggcttctcctatgagaagtgggagattgaccccagcgagctggccttcatcaaggagatcggcagcggccagtttggagtggtgcacctgggggagtggaggagccacatccaggtggccatcaaggccatcaatgaaggctccatgtctgaggaggacttcatcgaggaggccaaggtgatgatgaagctgagccacagcaagctggtgcagctgtatggagtgtgcatccagaggaagcccctgtacatcgtgacagagttcatggagaatggctgcctgctgaactacctgagagaaaataaaggcaagctgaggaaggagatgctgctgtctgtgtgccaggacatctgtgagggcatggagtacctggagagaaatggctacatccaccgggacctggccgccaggaactgcctggtgagcagcacctgcatcgtgaagatcagtgactttggcatgacccgctacgtgctggatgatgaatatgtgtcctcctttggagccaagttccccatcaagtggagccccccagaggtgttcctgttcaacaagtacagcagcaagagtgatgtgtggagctttggagtgctgatgtgggaggtgttcacagagggcaagatgccctttgagaacaagagcaacctgcaggtggtggaggccatcagcgagggcttccggctgtaccggccccacctggcccccatgagcatctatgaggtgatgtacagctgctggcatgagaagccagagggccggcccacctttgctgagctgctgcgggctgtgacagaaattgctgagacctggtag

SEQ ID NO: 137461 - DNA, 1584 bp, Artificial Sequence
  derived and/or modified sequence
atgatcctgagcagctacaacaccatccagagcgtgttctgctgctgttgctgctgttccgtgcaaaagcggcaaatgcgcacacagatttccctgtctaccgatgaggagcttcccgagaagtatacccagcgaagacggccctggttgtcccaattgagcaataaaaaacagagcaacactggcagagttcagccttctaagcggaaacctctgccgccgctgccaccgagcgaagttgcggaggagaagatccaggtgaaagccctttatgactttctgccgcgagagccatgcaacctagcgctgagaagagctgaggagtacttaatcctcgagaaatataaccctcactggtggaaggctcgtgacagactgggcaacgaagggctgattcctagcaactatgtgacagaaaataaaatcacgaatttggaaatctacgaatggtaccacagaaacataacgagaaatcaggctgagcatctgcttcggcaggagtcaaaggaaggtgccttcatcgtacgagacagtcggcacttagggagctatacaatatcagtcttcatgggagcccgccgcagcacagaagctgcaattaaacactaccagatcaagaagaatgactcgggacagtggtacgtcgcggagcgccacgccttccagtctattccagaattgatctggtatcaccagcacaacgcagcagggttgatgacacgcctccgctatcccgtcggcctgatgggctcctgtctccctgctactgccggcttttcttatgaaaagtgggagatcgaccccagcgagctggcgtttatcaaagagatcgggtctggccaatttggcgttgtgcacctcggggaatggcggagccatattcaggttgccatcaaggccattaacgaagggagtatgtctgaggaagactttattgaggaagccaaagtcatgatgaagttaagccattccaagctggtgcaactatatggggtctgcatccagcgtaaaccactgtacattgttaccgagttcatggaaaacggctgtctgctgaattatctgagggagaacaagggcaagttgcgcaaggagatgctcctttccgtgtgtcaggacatctgcgaaggtatggaatatctggaaaggaatggctatatccatcgcgacctggccgcccgtaattgtctggttagctcgacatgtatcgtaaagatctcagatttcggcatgactcgatatgtgctggacgatgaatatgtgtcgtcgttcggagcgaagttccccattaaatggagtcctcccgaagtcttcttgttcaacaagtactcatctaaatcagatgtgtggagtttcggagtgttgatgtgggaggtgtttactgaaggtaaaatgccgtttgaaaataagagcaacctgcaggtggtggaggccatcagcgaggggtttcggctctacagaccgcacctggcccctatgtccatctacgaagtgatgtactcttgctggcacgagaaaccagaggggagaccaacatttgccgagctgctaagggctgtgaccgagatcgcagagacatggtag

SEQ ID NO: 137462 - DNA, 1584 bp, Artificial Sequence
  derived and/or modified sequence
atgattctatctagttataacaccatacagtccgtcttctgttgctgttgctgttgtagcgtccagaagcggcagatgcgtacccaaattagcctctccacagacgaggaactgcctgagaagtatactcagcgacgcagaccgtggctgagccagttgtctaataagaagcagtcaaatacaggcagagtccagccctcaaaaagaaaacctctgcctccgctgcccccaagtgaagtggccgaggagaagatacaggtgaaagctctgtacgacttcctgccacgtgaaccttgtaacctggcactgaggcgggcagaggaatatttgatcctggagaaatacaacccacactggtggaaggccagggacagacttggaaacgaaggtcttattcctagcaactatgtaacagagaataaaataactaacctcgagatttatgagtggtaccacagaaatattacccgtaaccaggccgaacacctgttaaggcaagagagcaaggaaggggcttttatcgtgcgggactctcggcatctgggatcttataccataagtgtgtttatgggtgctcgcagaagtactgaggccgctatcaagcactaccagatcaaaaagaatgacagcggccagtggtatgtagccgagaggcacgcttttcagtcaattcccgaattgatatggtaccaccagcataacgctgccggtctgatgaccaggttacgttacccggtgggactgatggggtcatgcttgcccgcaacggccggattctcttatgaaaagtgggaaattgacccaagcgagctcgcttttataaaggagatagggagcgggcaatttggcgtagtgcacctgggcgaatggaggtcccatattcaggtggccatcaaagctatcaacgaggggtccatgtccgaggaagattttatcgaagaagcgaaagtgatgatgaaattgagtcattctaaactggtgcaactgtatggagtctgcatacagagaaagcccctgtacatcgttactgaattcatggaaaatggctgtctactgaattacctgagggaaaacaaaggcaagcttaggaaagagatgttgctgtcggtgtgtcaggacatttgcgagggtatggaatacctggagaggaatggatacattcatcgggacttggcagctaggaactgtcttgttagcagcacttgcatcgttaagatcagtgacttcggcatgacccgctacgtgctggacgacgagtacgtaagcagttttggtgcgaaatttccaatcaaatggtccccacctgaggtgtttctgtttaataaatacagcagcaagagtgatgtgtggtcctttggggtcctgatgtgggaggtttttacagagggaaaaatgcccttcgagaataaatcaaatcttcaggtcgtcgaagctattagtgaaggatttaggttataccgaccccacctcgccccaatgagtatttacgaggtgatgtactcatgctggcacgaaaaaccagagggaaggccgacttttgccgagctccttagagccgtgacagagatcgctgagacctggtag

SEQ ID NO: 137463 - DNA, 2914 bp, Artificial Sequence
  derived and/or modified sequence
gatttcagttgaaagatgtgtttttgtgagtagagcaccgcagaagaactgaagactgttgtgtgctccccgcagaaggggctaccatgatcctttcctcctataacaccatccagtcggttttctgttgctgctgttgctgttcagtgcagaagcgacaaatgagaacacagataagcctgagcacagatgaagagcttccagaaaaatacacccagcgtcgcaggccgtggctcagccaattgtcaaataagaagcaatccaacacgggccgtgtgcagccgtcaaaacgaaagccactgcctcccctcccaccctctgaggttgctgaagagaagatccaagtcaaggcactttatgattttctgcccagagaaccctgtaatttagccttaaggagagcagaagaatacctgatactggagaaatacaatcctcactggtggaaggcaagagaccgtttggggaatgaaggcttaatcccaagcaactatgtgactgaaaacaaaataactaatttagaaatatatgagtggtaccatagaaacattaccagaaatcaggcagaacatctattgagacaagagtctaaagaaggtgcatttattgtcagagattcaagacatttaggatcctacacaatttccgtatttatgggagctagaagaagtacggaggctgccataaaacattatcagataaaaaagaatgactcaggacagtggtatgtggctgaaagacacgcctttcaatcaatccctgagttaatctggtatcaccagcacaatgcagccggtctcatgactcgtctccgatatccagttgggctgatgggcagttgtttaccagccacagctgggtttagctacgaaaagtgggagatagatccatctgagttggcttttataaaggagattggaagcggtcagtttggagtggtccatttaggtgaatggcggtcacatatccaggtagctatcaaggccatcaatgaaggctccatgtctgaagaggatttcattgaagaggccaaagtgatgatgaaattatctcattcaaagctagtgcaactttatggagtctgtatacagcggaagcccctttacattgtgacagagttcatggaaaatggctgcctgcttaactatctcagggagaataaaggaaagcttaggaaggaaatgctactgagtgtatgccaggatatatgtgaaggaatggaatatctggagaggaatggctatattcatagggatttggcggcaaggaattgtttggtcagttcaacatgcatagtaaaaatttcagactttggaatgacaaggtacgttttggatgatgagtatgtcagttcttttggagccaagttcccaatcaagtggtcccctcctgaagtttttcttttcaataagtacagcagtaaatctgatgtctggtcatttggagttttaatgtgggaagtttttacagaaggaaaaatgccttttgaaaataagtcaaatttgcaagtcgtggaagctatttctgaaggcttcaggctatatcgccctcacctggcaccaatgtccatatatgaagtcatgtacagctgctggcatgagaaacctgaaggccgccctacatttgccgagctgctgcgggctgtcacagagattgcggaaacctggtgaccggaaacagaatgccaacccaaagagtcatcttgcaaaactgtcatttattgtgaatatcttcaccatatggggtcacttatggtgaatatctttcttcagagttgctgactcttgaaaacagtgcaaagatcacagtttttaaaagttttaaaaatttaagaatattcacacaatcgtttttctatgtgtgagagggatttgcacactcttatttttctgtaaaatatttcacatcccaaatgtgaagaagtgaaaaagacttcgcagcagtcttcattgtggtgctcttcatgatcatagccccaggaacccttgaggttcttcttcacaaggctgagagtgcttccttcttgaagacgagtgacattcatcacttcagtgatccatgcatagaatatgaaaataaattcttccaactcatgggataaaggggactcccttgaagaatttcatgtttttgggctgtatagctctttacagaaaatgcacctttataaatcacatgaatgttagtattctggaaatgtcttttgttaatataatcttcccatgttatttaacaaattgtttttgcacatatctgattatattgaaagcagttttttgcattcgagttttaaacactgttataaaatgtagccaaagctcacctttgaacagatcccggtgacattctatttccaggaaaatccggaacctgattttagttctgtgattttacactttttacatgtgagattggacagtttcagaggccttattttgtcatactaagtgtctcctgtaattttcaggaagatgatttgttctttccagaagaggagacaaaagcaagatagccaaatgtgacatcaagctccattgtttcggaaatccaggattttgaattcgagatgaaacaaccagcaatcacagttaaatcttaactttgcctgcactctttgtaggaatgatcagaaatttatctttatcattctgagtgcttcaggagtacaataggaagaaagatactggagaaagcactaatgtaatcaccatgaagtctgacaacaggagcccattatttgcgtactgtcccaccctgtatcatggttctctgggaacaagctttatgattctcattagagtttatttgttgattgtcagtagttgcgacttttaaattatatttcccccactcaaagaatggtatctttatatatcaatgacattcaataaatgtgtattatttctaatgagaa

SEQ ID NO: 137464 - protein, 105 aa, Artificial Sequence
  derived and/or modified sequence
MVKQIESKTAFQEALDAAGDKLVVVDFSATWCGPCKMIKPFFHSLSEKYSNVIFLEVDVDDCQDVASECEVKCMPTFQFFKKGQKVGEFSGANKEKLEATINELV

SEQ ID NO: 137465 - DNA, 318 bp, Artificial Sequence
  derived and/or modified sequence
atggtgaagcagatcgagagcaagaccgccttccaggaggccctggacgccgccggcgacaagctggtggtggtggacttcagcgccacctggtgcggcccctgcaagatgatcaagcccttcttccacagcctgagcgagaagtacagcaacgtgatcttcctggaggtggacgtggacgactgccaggacgtggccagcgagtgcgaggtgaagtgcatgcccaccttccagttcttcaagaagggccagaaggtgggcgagttcagcggcgccaacaaggagaagctggaggccaccatcaacgagctggtgtag

SEQ ID NO: 137466 - DNA, 318 bp, Artificial Sequence
  derived and/or modified sequence
atggtcaagcagatagaaagtaagactgccttccaggaagcattagatgccgccggcgacaaactggttgtcgtggacttttcagctacatggtgcggcccgtgcaaaatgattaagccatttttccactctctctcagaaaagtattctaatgtgatttttttagaggtggacgtggacgactgccaggacgtggcttcagagtgcgaggttaaatgcatgccgacctttcagttcttcaaaaagggccagaaagttggtgaattcagcggagccaacaaagagaaactggaggccaccatcaatgagctggtgtag

SEQ ID NO: 137467 - DNA, 318 bp, Artificial Sequence
  derived and/or modified sequence
atggtgaagcagatcgagagcaagacagccttccaggaggccctggatgctgctggggacaagctggtggtggtggacttcagcgccacctggtgtggcccctgcaagatgatcaagcccttcttccacagcctgtctgagaagtacagcaatgtcatcttcctggaggtggatgtggatgactgccaggatgtggcctctgaatgtgaggtgaagtgcatgcccaccttccagttcttcaagaagggccagaaggtgggggagttcagcggggccaacaaggagaagctggaggccaccatcaatgagctggtgtag

SEQ ID NO: 137468 - DNA, 318 bp, Artificial Sequence
  derived and/or modified sequence
atggtgaagcagatcgagagcaagaccgccttccaggaggccctggacgcggctggtgacaagctggtggtggtggacttctctgccacttggtgtggcccttgtaaaatgattaagcccttcttccactcgctcagcgagaaatatagcaacgtaatatttctggaggtcgatgtggatgattgtcaagatgttgcctctgagtgtgaagttaagtgtatgccaaccttccagtttttcaaaaaaggccaaaaagtgggggaattttccggcgcaaataaggagaagctggaggctacaataaatgagctggtatag

SEQ ID NO: 137469 - DNA, 318 bp, Artificial Sequence
  derived and/or modified sequence
atggtcaagcagatcgagtccaagacagcattccaggaagcgctagatgcggctggcgacaagctggtggttgttgatttttccgccacttggtgtggcccttgcaaaatgatcaagccattcttccacagcctgtctgaaaagtattctaacgtgatatttttagaagttgatgtcgatgattgtcaggacgtggcatcagagtgtgaggtgaaatgcatgccgacttttcaattctttaagaagggccaaaaagtgggggaattcagcggggcaaacaaggagaagcttgaggcgaccataaacgaattagtatag

SEQ ID NO: 137470 - DNA, 869 bp, Artificial Sequence
  derived and/or modified sequence
ctcgcaggctccaggggcggggcgtggccggggcgcagcgacgggcgcggaggtccggccgggcgcgcgcgcccccgccacacgcacgccgggcgtgccagtttataaagggagagagcaagcagcgagtcttgaagctctgtttggtgctttggatccatttccatcggtccttacagccgctcgtcagactccagcagccaagatggtgaagcagatcgagagcaagactgcttttcaggaagccttggacgctgcaggtgataaacttgtagtagttgacttctcagccacgtggtgtgggccttgcaaaatgatcaagcctttctttcattccctctctgaaaagtattccaacgtgatattccttgaagtagatgtggatgactgtcaggatgttgcttcagagtgtgaagtcaaatgcatgccaacattccagttttttaagaagggacaaaaggtgggtgaattttctggagccaataaggaaaagcttgaagccaccattaatgaattagtctaatcatgttttctgaaaatataaccagccattggctatttaaaacttgtaatttttttaatttacaaaaatataaaatatgaagacataaacccagttgccatctgcgtgacaataaaacattaatgctaacactttttaaaaccgtctcatgtctgaatagctttcaaaataaatgtgaaatggtcatttaatgtattttcctatattctcaatcactttttagtaaccttgtaggccactgattattttaagattttaaaaattattattgctaccttaatgtattgctacaaaaatctcttgttgggggcaatgcaggtaataaagtagtatgttgttatttgtt

SEQ ID NO: 137471 - protein, 549 aa, Artificial Sequence
  derived and/or modified sequence
MSCEDGRALEGTLSELAAETDLPVVFVKQRKIGGHGPTLKAYQEGRLQKLLKMNGPEDLPKSYDYDLIIIGGGSGGLAAAKEAAQYGKKVMVLDFVTPTPLGTRWGLGGTCVNVGCIPKKLMHQAALLGQALQDSRNYGWKVEETVKHDWDRMIEAVQNHIGSLNWGYRVALREKKVVYENAYGQFIGPHRIKATNNKGKEKIYSAERFLIATGERPRYLGIPGDKEYCISSDDLFSLPYCPGKTLVVGASYVALECAGFLAGIGLDVTVMVRSILLRGFDQDMANKIGEHMEEHGIKFIRQFVPIKVEQIEAGTPGRLRVVAQSTNSEEIIEGEYNTVMLAIGRDACTRKIGLETVGVKINEKTGKIPVTDEEQTNVPYIYAIGDILEDKVELTPVAIQAGRLLAQRLYAGSTVKCDYENVPTTVFTPLEYGACGLSEEKAVEKFGEENIEVYHSYFWPLEWTIPSRDNNKCYAKIICNTKDNERVVGFHVLGPNAGEVTQGFAAALKCGLTKKQLDSTIGIHPVCAEVFTTLSVTKRSGASILQAGC

SEQ ID NO: 137472 - protein, 551 aa, Artificial Sequence
  derived and/or modified sequence
MSCEDGRALEGTLSELAAETDLPVVFVKQRKIGGHGPTLKAYQEGRLQKLLKMNGPEDLPKSYDYDLIIIGGGSGGLAAAKEAAQYGKKVMVLDFVTPTPLGTRWGLGGTCVNVGCIPKKLMHQAALLGQALQDSRNYGWKVEETVKHDWDRMIEAVQNHIGSLNWGYRVALREKKVVYENAYGQFIGPHRIKATNNKGKEKIYSAERFLIATGERPRYLGIPGDKEYCISSDDLFSLPYCPGKTLVVGASYVALECAGFLAGIGLDVTVMVRSILLRGFDQDMANKIGEHMEEHGIKFIRQFVPIKVEQIEAGTPGRLRVVAQSTNSEEIIEGEYNTVMLAIGRDACTRKIGLETVGVKINEKTGKIPVTDEEQTNVPYIYAIGDILEDKVELTPVAIQAGRLLAQRLYAGSTVKCDYENVPTTVFTPLEYGACGLSEEKAVEKFGEENIEVYHSYFWPLEWTIPSRDNNKCYAKIICNTKDNERVVGFHVLGPNAGEVTQGFAAALKCGLTKKQLDSTIGIHPVCAEVFTTLSVTKRSGASILQAGCCG

SEQ ID NO: 137473 - DNA, 1650 bp, Artificial Sequence
  derived and/or modified sequence
atgagctgcgaggacggcagagccctggagggcaccctgagcgagctggccgccgagaccgacctgcccgtggtgttcgtgaagcagagaaagatcggcggccacggccccaccctgaaggcctaccaggagggcagactgcagaagctgctgaagatgaacggccccgaggacctgcccaagagctacgactacgacctgatcatcatcggcggcggcagcggcggcctggccgccgccaaggaggccgcccagtacggcaagaaggtgatggtgctggacttcgtgacccccacccccctgggcaccagatggggcctgggcggcacctgcgtgaacgtgggctgcatccccaagaagctgatgcaccaggccgccctgctgggccaggccctgcaggacagcagaaactacggctggaaggtggaggagaccgtgaagcacgactgggacagaatgatcgaggccgtgcagaaccacatcggcagcctgaactggggctacagagtggccctgagagagaagaaggtggtgtacgagaacgcctacggccagttcatcggcccccacagaatcaaggccaccaacaacaagggcaaggagaagatctacagcgccgagagattcctgatcgccaccggcgagagacccagatacctgggcatccccggcgacaaggagtactgcatcagcagcgacgacctgttcagcctgccctactgccccggcaagaccctggtggtgggcgccagctacgtggccctggagtgcgccggcttcctggccggcatcggcctggacgtgaccgtgatggtgagaagcatcctgctgagaggcttcgaccaggacatggccaacaagatcggcgagcacatggaggagcacggcatcaagttcatcagacagttcgtgcccatcaaggtggagcagatcgaggccggcacccccggcagactgagagtggtggcccagagcaccaacagcgaggagatcatcgagggcgagtacaacaccgtgatgctggccatcggcagagacgcctgcaccagaaagatcggcctggagaccgtgggcgtgaagatcaacgagaagaccggcaagatccccgtgaccgacgaggagcagaccaacgtgccctacatctacgccatcggcgacatcctggaggacaaggtggagctgacccccgtggccatccaggccggcagactgctggcccagagactgtacgccggcagcaccgtgaagtgcgactacgagaacgtgcccaccaccgtgttcacccccctggagtacggcgcctgcggcctgagcgaggagaaggccgtggagaagttcggcgaggagaacatcgaggtgtaccacagctacttctggcccctggagtggaccatccccagcagagacaacaacaagtgctacgccaagatcatctgcaacaccaaggacaacgagagagtggtgggcttccacgtgctgggccccaacgccggcgaggtgacccagggcttcgccgccgccctgaagtgcggcctgaccaagaagcagctggacagcaccatcggcatccaccccgtgtgcgccgaggtgttcaccaccctgagcgtgaccaagagaagcggcgccagcatcctgcaggccggctgctag

SEQ ID NO: 137474 - DNA, 1656 bp, Artificial Sequence
  derived and/or modified sequence
atgagctgcgaggacggcagagccctggagggcaccctgagcgagctggccgccgagaccgacctgcccgtggtgttcgtgaagcagagaaagatcggcggccacggccccaccctgaaggcctaccaggagggcagactgcagaagctgctgaagatgaacggccccgaggacctgcccaagagctacgactacgacctgatcatcatcggcggcggcagcggcggcctggccgccgccaaggaggccgcccagtacggcaagaaggtgatggtgctggacttcgtgacccccacccccctgggcaccagatggggcctgggcggcacctgcgtgaacgtgggctgcatccccaagaagctgatgcaccaggccgccctgctgggccaggccctgcaggacagcagaaactacggctggaaggtggaggagaccgtgaagcacgactgggacagaatgatcgaggccgtgcagaaccacatcggcagcctgaactggggctacagagtggccctgagagagaagaaggtggtgtacgagaacgcctacggccagttcatcggcccccacagaatcaaggccaccaacaacaagggcaaggagaagatctacagcgccgagagattcctgatcgccaccggcgagagacccagatacctgggcatccccggcgacaaggagtactgcatcagcagcgacgacctgttcagcctgccctactgccccggcaagaccctggtggtgggcgccagctacgtggccctggagtgcgccggcttcctggccggcatcggcctggacgtgaccgtgatggtgagaagcatcctgctgagaggcttcgaccaggacatggccaacaagatcggcgagcacatggaggagcacggcatcaagttcatcagacagttcgtgcccatcaaggtggagcagatcgaggccggcacccccggcagactgagagtggtggcccagagcaccaacagcgaggagatcatcgagggcgagtacaacaccgtgatgctggccatcggcagagacgcctgcaccagaaagatcggcctggagaccgtgggcgtgaagatcaacgagaagaccggcaagatccccgtgaccgacgaggagcagaccaacgtgccctacatctacgccatcggcgacatcctggaggacaaggtggagctgacccccgtggccatccaggccggcagactgctggcccagagactgtacgccggcagcaccgtgaagtgcgactacgagaacgtgcccaccaccgtgttcacccccctggagtacggcgcctgcggcctgagcgaggagaaggccgtggagaagttcggcgaggagaacatcgaggtgtaccacagctacttctggcccctggagtggaccatccccagcagagacaacaacaagtgctacgccaagatcatctgcaacaccaaggacaacgagagagtggtgggcttccacgtgctgggccccaacgccggcgaggtgacccagggcttcgccgccgccctgaagtgcggcctgaccaagaagcagctggacagcaccatcggcatccaccccgtgtgcgccgaggtgttcaccaccctgagcgtgaccaagagaagcggcgccagcatcctgcaggccggctgctgaggctag

SEQ ID NO: 137475 - DNA, 1650 bp, Artificial Sequence
  derived and/or modified sequence
atgtcctgcgaagacggacgcgcgcttgagggaaccctaagtgagctcgcagcagagaccgaccttcctgtggttttcgtgaagcagcgcaaaataggaggccatggccccaccctgaaagcataccaggagggaagactgcaaaagttattgaaaatgaacgggccagaggaccttcccaaatcatacgattacgatcttatcatcattgggggaggaagtggtggactggcagctgccaaggaagctgctcagtacggcaaaaaggttatggtattagatttcgttactcccactccgctggggacccgttggggtctgggcggcacctgtgtgaacgttggatgcattcccaagaagctgatgcaccaggcggctttgttgggtcaggcgctgcaggactcgcgcaattacggctggaaagtggaggagacagttaagcacgattgggaccgcatgattgaagccgttcagaatcatattggttccttgaactgggggtatcgggtggccctgcgcgaaaaaaaggttgtatacgaaaatgcttacggccagttcatcggtccccatcgaattaaagccacaaacaataaaggaaaagagaagatttattctgcagagcggtttttgattgctaccggggagaggcctagatatctgggtattcctggagacaaggagtattgtatcagctctgacgacctgttttcattgccttactgccctggcaagacacttgtcgtgggcgcatcctatgtggccctggagtgcgctggcttcctggcgggtatcgggttggacgtgacggtgatggtccggagcatactgctccgcggctttgaccaggacatggctaataagatcggagagcacatggaggagcatggcatcaagtttattcggcagtttgtgcctatcaaagtggaacagattgaggctggcacaccagggcggctgagagttgtggcccagtctaccaactcggaagaaatcattgagggagagtataatacagtgatgcttgcaattggtagagacgcttgcacgagaaagatcggccttgagactgtcggggtaaagatcaatgagaaaaccggaaagattcctgtaacagatgaagagcaaacgaacgtcccttacatctatgcaattggcgacatccttgaagataaagtcgagctcactccagtggccatccaagcaggtagattactggctcaacggctgtacgcgggctctaccgttaagtgtgattacgagaatgtgccaacaactgtttttacacccttagaatacggcgcatgtggactatcagaagaaaaggccgtggaaaaattcggcgaggagaatattgaagtttatcattcttacttctggcctctggagtggaccattcccagccgcgacaacaacaaatgctacgcgaagatcatttgcaatactaaggacaatgagcgggtggtaggcttccacgtgttgggtcccaacgctggtgaggttacacaagggtttgctgccgccctgaagtgtggtctcaccaagaaacagcttgacagcactattggcattcacccagtgtgcgccgaagtcttcacaaccttgtctgtcacaaagaggtccggcgcttcaattctgcaggccggttgctag

SEQ ID NO: 137476 - DNA, 1656 bp, Artificial Sequence
  derived and/or modified sequence
atgtcgtgcgaagacggccgggccctcgaagggacacttagtgagcttgccgccgagactgacctgcctgtggtgttcgtcaaacagcgcaaaattggaggacatggccccaccttgaaagcctaccaagaggggcgattgcaaaaactgcttaaaatgaacggccctgaagacctgcccaagtcttacgattacgacttgataatcattgggggcggctctggcgggctagcagcagcaaaagaggccgcacaatatggcaaaaaggttatggtcctggactttgtaacccccaccccattggggacccgctgggggctcgggggaacctgtgttaatgtgggctgtattccaaaaaaattgatgcaccaggccgccctgttgggacaggcgctgcaagacagccggaactatggctggaaggttgaggagacagttaaacatgattgggaccgcatgattgaggctgtgcagaaccacattggctctctgaactgggggtatagagtagccctgcgggagaagaaggtcgtctatgaaaatgcctatggccaatttatcggaccccacagaatcaaagccaccaataacaaaggaaaagaaaagatttactccgcagagaggttcctcatcgccaccggggagaggcccaggtatttggggatcccgggtgacaaggagtattgtatttccagcgatgacctcttcagcctgccctactgtccaggaaagaccctagtggtcggcgcctcgtacgtggcactggagtgcgccggtttcctcgcggggatcgggcttgacgtgactgtcatggtcaggagcatacttcttagaggatttgaccaagatatggctaacaaaattggggagcatatggaggagcatgggattaaatttatccgccagtttgtgcctatcaaggtggagcaaatagaagccggtacccctggccggcttagggtagtcgctcagtcaaccaactctgaagagattattgagggcgaatataacacagtgatgttagcaatcggtcgagatgcttgtacaaggaagatcggactcgagacagtgggtgtgaaaattaacgagaagacaggcaaaattccagtgaccgatgaggagcagacaaatgtcccgtacatttatgcaatcggcgatatcctcgaggacaaagtggagttgacacctgtagctatccaggccgggaggctcttggctcaacggctgtatgcagggagcactgtgaaatgtgactacgaaaacgtgcctacaactgtctttaccccgctggagtacggtgcctgcggactcagcgaggaaaaagctgtggagaagtttggggaagaaaacatcgaggtgtaccatagctacttttggccgctggagtggacaattccaagccgagacaataataagtgttatgccaagatcatctgcaacactaaagacaatgaacgtgtggtagggtttcacgtgctggggcctaatgctggtgaggtcactcagggattcgcagccgctctgaagtgtggtcttacaaaaaagcagcttgactcaaccattggaattcaccccgtgtgtgcagaagtcttcacgaccctgtccgttaccaagcgttcaggtgctagtatcctgcaggcaggatgctgagggtag

SEQ ID NO: 137477 - DNA, 1650 bp, Artificial Sequence
  derived and/or modified sequence
atgagctgtgaagatggccgggccctggagggcaccctgtctgagctggccgctgagacagacctgcctgtggtgtttgtgaagcagaggaagattggaggccacggccccaccctgaaggcctaccaggagggccgcctgcagaagctgctgaagatgaatggacctgaggacctgcccaagagctatgactatgacctgatcatcatcggcggcggcagcggcggcctggccgccgccaaggaggccgcccagtatggcaagaaggtgatggtgctggactttgtgacccccacccccctgggcacccgctggggcctgggcggcacctgtgtgaatgtgggctgcatccccaagaagctgatgcaccaggccgccctgctgggccaggccctgcaggacagcaggaactacggctggaaggtggaggagaccgtgaagcatgactgggacaggatgattgaggccgtgcagaaccacatcggcagcctgaactggggctacagagtggccctgcgggagaagaaggtggtgtatgaaaatgcctacggccagttcatcggcccccaccgcatcaaggccaccaacaacaagggcaaggagaagatctacagcgctgagcgcttcctgattgccactggagagcggccccgctacctgggcatccctggggacaaggagtactgcatcagcagtgatgacctcttcagcctgccctactgccctgggaagaccctggtggtgggcgccagctatgtggccctggagtgtgccggcttcctggccggcatcggcctggatgtgacagtgatggtgcgcagcatcctgctgcggggctttgaccaggacatggccaacaagatcggggagcacatggaggagcacggcatcaagttcatccggcagtttgtgcccatcaaggtggagcagattgaagctggcaccccaggccgcctgcgggtggtggcccagagcaccaacagcgaggagatcatcgagggggagtacaacacagtgatgctggccatcggcagagatgcctgcaccaggaagattggcctggagaccgtgggcgtgaagatcaatgagaagacaggcaagatccctgtgacagatgaggagcagaccaacgtgccctacatctatgccatcggggacatcctggaggacaaggtggagctgacccctgtggccatccaggccggccgcctgctggcccagaggctgtatgccggcagcacagtgaagtgtgactatgaaaatgtgcccaccaccgtcttcacccccctggagtatggagcctgtggcctgtctgaggagaaggctgtggagaagtttggagaagaaaatattgaggtgtaccacagctacttctggcccctggagtggaccatccccagccgggacaacaacaagtgctacgccaagatcatctgcaacaccaaggacaatgaaagagtggtgggcttccacgtgctgggccccaatgctggggaggtgacccagggctttgctgctgccctgaagtgtggcctgaccaagaagcagctggacagcaccatcggcatccaccctgtgtgtgccgaggtgttcaccaccctgtctgtgaccaagaggtctggggccagcatcctgcaggccggctgctag

SEQ ID NO: 137478 - DNA, 1650 bp, Artificial Sequence
  derived and/or modified sequence
atgagctgtgaagatggccgggccctggagggcaccctgtctgagctggccgctgagacagacctgcctgtggtgtttgtgaagcagaggaagattggaggccacggccccaccctgaaggcctaccaggagggccgcctgcagaagctgctgaagatgaatggacctgaggacctgcccaagagctatgactatgacctgatcatcatcggcggcggcagcggcggcctggccgccgccaaggaggccgcccagtatggcaagaaggtgatggtgctggactttgtgacccccacccccctgggcacccgctggggcctgggcggcacctgtgtgaatgtgggctgcatccccaagaagctgatgcaccaggccgccctgctgggccaggccctgcaggacagcaggaactacggctggaaggtggaggagaccgtgaagcatgactgggacaggatgattgaggccgtgcagaaccacatcggcagcctgaactggggctacagagtggccctgcgggagaagaaggtggtgtatgaaaatgcctacggccagttcatcggcccccaccgcatcaaggccaccaacaacaagggcaaggagaagatctacagcgctgagcgcttcctgattgccactggagagcggccccgctacctgggcatccctggggacaaggagtactgcatcagcagtgatgacctcttcagcctgccctactgccctgggaagaccctggtggtgggcgccagctatgtggccctggagtgtgccggcttcctggccggcatcggcctggatgtgacagtgatggtgcgcagcatcctgctgcggggctttgaccaggacatggccaacaagatcggggagcacatggaggagcacggcatcaagttcatccggcagtttgtgcccatcaaggtggagcagattgaagctggcaccccaggccgcctgcgggtggtggcccagagcaccaacagcgaggagatcatcgagggggagtacaacacagtgatgctggccatcggcagagatgcctgcaccaggaagattggcctggagaccgtgggcgtgaagatcaatgagaagacaggcaagatccctgtgacagatgaggagcagaccaacgtgccctacatctatgccatcggggacatcctggaggacaaggtggagctgacccctgtggccatccaggccggccgcctgctggcccagaggctgtatgccggcagcacagtgaagtgtgactatgaaaatgtgcccaccaccgtcttcacccccctggagtatggagcctgtggcctgtctgaggagaaggctgtggagaagtttggagaagaaaatattgaggtgtaccacagctacttctggcccctggagtggaccatccccagccgggacaacaacaagtgctacgccaagatcatctgcaacaccaaggacaatgaaagagtggtgggcttccacgtgctgggccccaatgctggggaggtgacccagggctttgctgctgccctgaagtgtggcctgaccaagaagcagctggacagcaccatcggcatccaccctgtgtgtgccgaggtgttcaccaccctgtctgtgaccaagaggtctggggccagcatcctgcaggccggcggctag

SEQ ID NO: 137479 - DNA, 1650 bp, Artificial Sequence
  derived and/or modified sequence
atgagctgcgaggacggccgggccctggagggcaccctgagcgagctggcggccgaaaccgacttgccagttgtctttgtgaagcagagaaagatcggcggccacgggcctacactgaaagcttatcaggagggaagactccagaagctcctgaagatgaatgggcccgaggatctgcctaaatcttatgactacgaccttattattatcggcggtgggagcggtggactcgccgcggcgaaggaagccgctcagtatggcaaaaaagtgatggtgctcgatttcgtgacccctaccccgctcggaacaaggtgggggctaggcgggacttgcgtgaacgtcgggtgtatcccaaagaagctgatgcatcaggcggcgctgctgggacaggctttgcaggacagccgtaattacggatggaaggtagaagagaccgtgaaacatgactgggaccgcatgattgaagctgtacagaaccacatagggtcgctgaattggggttacagggtcgcccttagggagaagaaggtcgtgtacgaaaatgcctatggccagtttatagggccacaccgtatcaaagcaaccaataataagggaaaggagaagatctactcggctgagcgcttcctgattgcgaccggagagagaccccggtacctgggaataccaggtgataaggagtactgtattagctcggatgatttatttagccttccctattgtcccggcaagacacttgtagttggagccagctacgtagctctcgagtgcgctggctttctcgcaggaattgggttggatgtgacagtcatggtccgctctatcttgctccggggtttcgaccaggatatggccaataaaattggagaacacatggaagaacacgggatcaagtttattcggcagttcgtgcccatcaaggtcgaacagatcgaggccggcacacccggaagactgcgcgtggtagcacagtctactaactccgaagagattattgagggggaatacaacactgtcatgctggcgattgggcgcgatgcatgcaccaggaaaatcggtctggaaaccgtgggagtgaagattaacgagaaaacagggaagatacctgtcactgacgaggagcagaccaacgtgccttatatctacgccataggagacattctagaagataaggttgaactcaccccggtggcaatacaggcaggaaggctcctcgcacagagactttatgcaggcagtaccgtcaagtgtgattacgagaatgtgcctaccactgtatttacccctctggagtacggggcttgtgggctgagtgaagagaaggccgtggagaagttcggagaagaaaatattgaggtatatcattcctatttttggcccctcgagtggaccatcccatcaagggataataataagtgctatgcaaaaatcatatgtaacacaaaagacaatgaacgggttgtcggatttcacgtactgggacctaacgctggtgaagttacccagggattcgcagccgcactgaaatgcggtttgaccaagaaacaactcgacagtacaatcgggattcaccctgtttgtgctgaggtgttcacgactctgagtgtaactaaacgttctggcgccagcatcttgcaggctggctgttag

SEQ ID NO: 137480 - DNA, 1656 bp, Artificial Sequence
  derived and/or modified sequence
atgagctgcgaggacggccgggccctggagggcaccctgagcgagctcgctgcggaaacggatctgcccgtggtgttcgtcaagcaacgcaagatagggggccacgggccaactcttaaagcataccaggagggaaggctacagaaactgcttaagatgaacggcccagaggatctccctaaaagctatgactacgacctgattataatcggcggcggatcaggcggccttgcagccgcgaaggaagctgcccagtacgggaaaaaggtgatggtccttgactttgttactcccacccctcttgggactagatggggtcttggtgggacttgcgttaacgttggttgtatccctaagaaactgatgcatcaggcagcattgctgggacaggcactgcaagattcacgaaactatggttggaaggttgaggaaaccgtcaaacacgactgggaccggatgattgaggcggttcaaaatcatatcgggagcctcaattggggctaccgggtcgccctgcgggagaaaaaagtagtgtacgagaacgcttatggacagttcatcggtccgcaccgcatcaaagccacaaataataaggggaaagagaagatctacagtgccgaaagatttctgatcgccacgggagaacggccacgctatttaggtattcccggcgacaaggagtattgcatctcgagcgacgacctgttctccttgccatactgtcccggaaagacgctcgttgtcggtgcgtcatatgtcgcactggagtgcgctggattcttggctggtatcggcctggatgttacagttatggtcagatcaatcctcctcagggggttcgatcaggatatggcgaacaaaattggggagcatatggaggagcatggcatcaaattcatcagacagttcgtccccatcaaggtcgaacagatcgaggccggcacacccggacgtttacgcgtcgttgctcaatctacaaactcagaagagatcattgagggcgagtacaacaccgtcatgcttgccatcgggcgcgatgcttgcaccaggaagatcggcctcgagaccgtgggggttaagatcaatgagaagacaggcaagattcccgtgaccgacgaagaacagacgaatgtcccatacatttatgcaatcggcgacattcttgaagataaggtcgagctgacgccagtagcaattcaggcagggaggctcctggctcagagattatatgctgggtcgactgtaaaatgtgactatgaaaacgtgcccactacagtgtttacccccctcgagtacggcgcatgcggcctgagtgaggagaaagccgtggagaagtttggtgaagaaaacatagaagtgtatcactcatacttctggcctttggaatggacaattccatctagggataacaataagtgttatgctaaaattatttgcaataccaaagacaatgaacgcgtcgtgggctttcacgtgcttggacccaacgccggagaggttactcaagggttcgcggccgcactgaagtgcgggctgaccaagaaacagctggactcaactattggcatccatcccgtctgtgctgaagtgttcactacattgtccgtcaccaaacgaagcggagcgtccattctgcaggcaggttgctgaggatag

SEQ ID NO: 137481 - DNA, 1650 bp, Artificial Sequence
  derived and/or modified sequence
atgtcctgcgaggatggtcgtgcgctcgaaggaactttgtctgaacttgccgctgaaacggatctgcccgtggtcttcgtgaaacagcgaaagattggaggccatggccctacactcaaggcttatcaggaaggacgtcttcagaagctgctgaagatgaacggtcccgaagatctcccaaaatcctatgattacgacttgattatcatcggtgggggtagtggcggtctggcggcagctaaagaggcagcccagtatggaaagaaagtgatggtgcttgatttcgttacacctaccccactgggtacacgatggggactaggaggcacttgtgtcaacgtgggctgcataccgaaaaagctgatgcaccaggcggctctcttggggcaagcccttcaggactcgcgaaactacggctggaaggtggaggagactgttaaacatgactgggatcggatgatcgaagccgtgcaaaatcacattggaagcttgaactggggatacagagtcgctttgcgcgagaagaaagtcgtctacgaaaacgcctacggtcagtttatcggaccccatcgcatcaaagcgactaacaataaaggcaaggaaaaaatctactccgccgagcggtttctgattgcgaccggggagcgaccgagatatcttggcatcccaggcgataaagaatactgcatcagctccgacgacctcttcagtttaccttactgccctggcaaaaccctggtcgtcggcgcatcatatgtagccttagagtgtgctggctttctggctgggatcgggttggacgtcaccgtaatggtgcggtccattctattacgcggtttcgaccaagacatggccaataagatcggggaacacatggaggagcacggaatcaagttcattcggcagtttgtccctataaaggtggagcagattgaagctggtacccctgggagattgagggtcgtagcccagagcactaactccgaagagattatcgagggagagtacaacaccgtgatgcttgccattggaagggacgcctgcacgcggaaaatcggactggaaacagttggggtgaaaattaacgaaaagacaggcaagattccagtgaccgacgaagaacagactaatgtgccgtacatctacgccataggggatattttggaggataaggtcgaactcacccccgtcgccatccaggccggacgactgcttgcgcagcggctgtacgctggaagcacagtaaagtgtgattacgaaaatgtgcctaccaccgtgttcaccccattagaatatggcgcttgtggactgagcgaggagaaggccgttgaaaagtttggagaggagaacatagaagtgtatcacagttatttctggcccctggagtggacaattccaagcagagataacaacaagtgctacgcgaaaattatctgcaacacaaaagacaatgaaagagtggttggattccatgtgctcggcccaaacgccggagaagtgacacaggggtttgctgcagccctgaagtgtggacttacaaagaagcagttggattccacgattggcattcacccagtctgcgccgaggtctttacgaccttgtcagtgacaaagcggagtggcgcatctatcttgcaagctgggtgttag

SEQ ID NO: 137482 - DNA, 1656 bp, Artificial Sequence
  derived and/or modified sequence
atgtcgtgcgaagacggcagggcactcgaaggtacattaagcgagcttgcagccgagacagacctacccgtggtgttcgttaaacagcggaaaatcggcggacatgggcctacactgaaagcctatcaggaaggccgtctgcagaaactgcttaagatgaacggacccgaagatctgccaaaatcatacgattatgacttgattataattggaggtggctccgggggtctggcagccgctaaggaggcggctcagtatggcaagaaggtgatggtattagatttcgtgactcccaccccccttgggacgagatggggcttgggcggaacctgcgttaacgtgggttgcatacctaaaaagctcatgcatcaggctgctcttctggggcaggctctgcaagactctcgcaactatggatggaaagtcgaagaaacagtgaagcacgactgggatcgaatgattgaggctgtacagaaccatattgggagcctaaactgggggtacagggtggccctcagggagaagaaggttgtatatgaaaatgcttacggtcagttcattggcccacaccggataaaagcaacaaacaacaagggaaaggagaagatctatagcgcagaacggtttctcatcgccaccggagaacgaccaaggtacttgggcatcccgggagacaaagaatattgtatctcatccgacgaccttttcagcctaccctactgccctgggaagacgctcgtggtgggagcatcgtatgtcgcacttgaatgcgctggctttctcgcgggaataggattggacgtaaccgttatggtaagatccatcctgctacgaggctttgaccaggacatggcaaacaagatcggggagcacatggaggaacatggcataaagttcattagacaattcgtgcctatcaaagtcgagcagatcgaggcaggaacaccaggtaggctcagagtcgtcgctcagagcaccaacagtgaggagatcatcgagggtgagtataacactgttatgctcgcaattgggcgagacgcttgcacccgcaagattggtctggagacagtcggggtcaaaattaacgaaaagacaggaaagatccccgtgacagacgaagaacaaaccaacgtcccatatatatacgccatcggggacatcctggaggataaggtggaactgacccctgtcgctattcaggccggacggctgctcgctcagcgactttacgcaggatccacagtgaaatgcgactatgaaaacgttcccaccaccgtgttcactccactcgagtacggggcttgtggactgtcagaggagaaagctgtggagaagttcggcgaggagaatatcgaagtttaccacagctacttttggcccctagagtggaccatcccgtctagagacaataacaagtgctatgctaagatcatctgcaacacgaaagacaacgagagggtggtcggctttcacgtgcttgggccaaacgccggagaagtgacacagggatttgcagcagccctgaaatgcgggctcacgaagaaacaacttgattcaacaatcggcattcatcctgtgtgtgctgaagtcttcaccaccttgagcgttacaaaaaggagtggagcctctatcttgcaggctggatgttgaggctag

SEQ ID NO: 137483 - DNA, 3900 bp, Artificial Sequence
  derived and/or modified sequence
ggcagttagcccgcccgctcggcgcagggcgtggcttctcgtagccattaggaaacagcaaccctttcacctcagttttcttcactccggcatttgcagcagagcgaaaggtggtcgagtcctgaaggagggcctgatgtcttcatcattctcaaattcttgtaagctctgcgtcgggtgaaaccagacaaagccgcgagcccagggatgggagcacgcgggggacggcctgccggcggggacgacagcattgcgcctgggtgcagcagtgtgcgtctcggggaagggaagatattttaaggcgtgtctgagcagacggggaggcttttccaaacccaggcagcttcgtggcgtgtgcggtttcgacccggtcacacaaagcttcagcatgtcatgtgaggacggtcgggccctggaaggaacgctctcggaattggccgcggaaaccgatctgcccgttgtgtttgtgaaacagagaaagataggcggccatggtccaaccttgaaggcttatcaggagggcagacttcaaaagctactaaaaatgaacggccctgaagatcttcccaagtcctatgactatgaccttatcatcattggaggtggctcaggaggtctggcagctgctaaggaggcagcccaatatggcaagaaggtgatggtcctggactttgtcactcccacccctcttggaactagatggggtctcggaggaacatgtgtgaatgtgggttgcatacctaaaaaactgatgcatcaagcagctttgttaggacaagccctgcaagactctcgaaattatggatggaaagtcgaggagacagttaagcatgattgggacagaatgatagaagctgtacagaatcacattggctctttgaattggggctaccgagtagctctgcgggagaaaaaagtcgtctatgagaatgcttatgggcaatttattggtcctcacaggattaaggcaacaaataataaaggcaaagaaaaaatttattcagcagagagatttctcattgccactggtgaaagaccacgttacttgggcatccctggtgacaaagaatactgcatcagcagtgatgatcttttctccttgccttactgcccgggtaagaccctggttgttggagcatcctatgtcgctttggagtgcgctggatttcttgctggtattggtttagacgtcactgttatggttaggtccattcttcttagaggatttgaccaggacatggccaacaaaattggtgaacacatggaagaacatggcatcaagtttataagacagttcgtaccaattaaagttgaacaaattgaagcagggacaccaggccgactcagagtagtagctcagtccaccaatagtgaggaaatcattgaaggagaatataatacggtgatgctggcaataggaagagatgcttgcacaagaaaaattggcttagaaaccgtaggggtgaagataaatgaaaagactggaaaaatacctgtcacagatgaagaacagaccaatgtgccttacatctatgccattggcgatatattggaggataaggtggagctcaccccagttgcaatccaggcaggaagattgctggctcagaggctctatgcaggttccactgtcaagtgtgactatgaaaatgttccaaccactgtatttactcctttggaatatggtgcttgtggcctttctgaggagaaagctgtggagaagtttggggaagaaaatattgaggtttaccatagttacttttggccattggaatggacgattccgtcaagagataacaacaaatgttatgcaaaaataatctgtaatactaaagacaatgaacgtgttgtgggctttcacgtactgggtccaaatgctggagaagttacacaaggctttgcagctgcgctcaaatgtggactgaccaaaaagcagctggacagcacaattggaatccaccctgtctgtgcagaggtattcacaacattgtctgtgaccaagcgctctggggcaagcatcctccaggctggctgctgaggttaagccccagtgtggatgctgttgccaagactgcaaaccactggctcgtttccgtgcccaaatccaaggcgaagttttctagagggttcttgggctcttggcacctgcgtgtcctgtgcttaccaccgcccaaggcccccttggatctcttggataggagttggtgaatagaaggcaggcagcatcacactggggtcactgacagacttgaagctgacatttggcagggcatcgaagggatgcatccatgaagtcaccagtctcaagcccatgtggtaggcggtgatggaacaactgtcaaatcagttttagcatgacctttccttgtggattttcttattctcgttgtcaagttttctagggttgaatttttttcttttttctccatggtgttaatgatattagagatgaaaaacgttagcagttgatttttgtccaaaagcaagtcatggctagagtatccatgcaaggtgtcttgttgcatggaagggatagtttggctcccttggaggctatgtaggcttgtcccgggaaagagaactgtcctgcagctgaaatggactgttctttactgacctgctcagcagtttcttctctcatatattcccaaaacaagtacatctgcgatcaactctagccaaatttgcccctgtgtgctacatgatggatgattattattttaaggtctgtttaggaagggaaatggctacttggccagccattgcctggcatttggtagtatagtatgattctcaccattatttgtcatggaggcagacatacaccagaaatgggggagaaacagtacatatctttctgtctttagtttattgtgtgctggtctaagcaagctgagatcatttgcaatggaaaacacgtaacttgtttaaaagtttttctggtagctttagctttatgctaaaaaaaataatgacattgggtatctatttctttctaagactacattagtaggaaaataagtcttttcatgcttatgatttagctgttttgtggtaattgctttttaaaggaagttattaatatcataagttattattaatattttgaacacaggtggatgtgaaggattttcatttaaaaaccaagtggttttgactttttctgttgaatgaacaactgtgccttgtggaatttttgcagaagtgtttatgctttgttagcatttcaacttgcattattataaagaggtattaatgcctcagttatgtgtttgtcaatgtactggctgaggattctatctcagctgtcttttctaactgtgtaggttgagttttgaacacgtgcttgtggacatcaggcctcctgccagcagttcttgaagcttctttttcattcctgctactctacctgtatttctcagttgcagcactgagtggtcaaaatacatttctgggccacctcagggaacccatgcatctgcctggcatttaggcagcagagcccctgaccgtcccccacagggctctgcctcacgtcctcatctcatttggctgtgtaaagaaatgggaaaagggaaaaggagagagcaattgaggcagttgaccatattcagttttatttatttatttttaatttgtttttttctccaagtccaccagtctctgaaattagaacagtaggcggtatgagataatcaggcctaatcatgttgtgattctcttttcttagtggagtggaatgttctatccccacaagaaggattatatcttatagacttgtcttgttcagattctgtatttacccattttattgaaacatatactaagttccatgtatttttgttacaaatcttctgaaaaaaaacaaaacaatgtgaaacattaaaattaaaaggcatt

SEQ ID NO: 137484 - DNA, 3974 bp, Artificial Sequence
  derived and/or modified sequence
acgaggcaattagcataggttgccagggctgcacgaggagtggatttctgctttgtcattctgactctggcagttagcccgcccgctcggcgcagggcgtggcttctcgtagccattaggaaacagcaaccctttcacctcagttttcttcactccggcatttgcagcagagcgaaaggtggtcgagtcctgaaggagggcctgatgtcttcatcattctcaaattcttgtaagctctgcgtcgggtgaaaccagacaaagccgcgagcccagggatgggagcacgcgggggacggcctgccggcggggacgacagcattgcgcctgggtgcagcagtgtgcgtctcggggaagggaagatattttaaggcgtgtctgagcagacggggaggcttttccaaacccaggcagcttcgtggcgtgtgcggtttcgacccggtcacacaaagcttcagcatgtcatgtgaggacggtcgggccctggaaggaacgctctcggaattggccgcggaaaccgatctgcccgttgtgtttgtgaaacagagaaagataggcggccatggtccaaccttgaaggcttatcaggagggcagacttcaaaagctactaaaaatgaacggccctgaagatcttcccaagtcctatgactatgaccttatcatcattggaggtggctcaggaggtctggcagctgctaaggaggcagcccaatatggcaagaaggtgatggtcctggactttgtcactcccacccctcttggaactagatggggtctcggaggaacatgtgtgaatgtgggttgcatacctaaaaaactgatgcatcaagcagctttgttaggacaagccctgcaagactctcgaaattatggatggaaagtcgaggagacagttaagcatgattgggacagaatgatagaagctgtacagaatcacattggctctttgaattggggctaccgagtagctctgcgggagaaaaaagtcgtctatgagaatgcttatgggcaatttattggtcctcacaggattaaggcaacaaataataaaggcaaagaaaaaatttattcagcagagagatttctcattgccactggtgaaagaccacgttacttgggcatccctggtgacaaagaatactgcatcagcagtgatgatcttttctccttgccttactgcccgggtaagaccctggttgttggagcatcctatgtcgctttggagtgcgctggatttcttgctggtattggtttagacgtcactgttatggttaggtccattcttcttagaggatttgaccaggacatggccaacaaaattggtgaacacatggaagaacatggcatcaagtttataagacagttcgtaccaattaaagttgaacaaattgaagcagggacaccaggccgactcagagtagtagctcagtccaccaatagtgaggaaatcattgaaggagaatataatacggtgatgctggcaataggaagagatgcttgcacaagaaaaattggcttagaaaccgtaggggtgaagataaatgaaaagactggaaaaatacctgtcacagatgaagaacagaccaatgtgccttacatctatgccattggcgatatattggaggataaggtggagctcaccccagttgcaatccaggcaggaagattgctggctcagaggctctatgcaggttccactgtcaagtgtgactatgaaaatgttccaaccactgtatttactcctttggaatatggtgcttgtggcctttctgaggagaaagctgtggagaagtttggggaagaaaatattgaggtttaccatagttacttttggccattggaatggacgattccgtcaagagataacaacaaatgttatgcaaaaataatctgtaatactaaagacaatgaacgtgttgtgggctttcacgtactgggtccaaatgctggagaagttacacaaggctttgcagctgcgctcaaatgtggactgaccaaaaagcagctggacagcacaattggaatccaccctgtctgtgcagaggtattcacaacattgtctgtgaccaagcgctctggggcaagcatcctccaggctggctgctgaggttaagccccagtgtggatgctgttgccaagactgcaaaccactggctcgtttccgtgcccaaatccaaggcgaagttttctagagggttcttgggctcttggcacctgcgtgtcctgtgcttaccaccgcccaaggcccccttggatctcttggataggagttggtgaatagaaggcaggcagcatcacactggggtcactgacagacttgaagctgacatttggcagggcatcgaagggatgcatccatgaagtcaccagtctcaagcccatgtggtaggcggtgatggaacaactgtcaaatcagttttagcatgacctttccttgtggattttcttattctcgttgtcaagttttctagggttgaatttttttcttttttctccatggtgttaatgatattagagatgaaaaacgttagcagttgatttttgtccaaaagcaagtcatggctagagtatccatgcaaggtgtcttgttgcatggaagggatagtttggctcccttggaggctatgtaggcttgtcccgggaaagagaactgtcctgcagctgaaatggactgttctttactgacctgctcagcagtttcttctctcatatattcccaaaacaagtacatctgcgatcaactctagccaaatttgcccctgtgtgctacatgatggatgattattattttaaggtctgtttaggaagggaaatggctacttggccagccattgcctggcatttggtagtatagtatgattctcaccattatttgtcatggaggcagacatacaccagaaatgggggagaaacagtacatatctttctgtctttagtttattgtgtgctggtctaagcaagctgagatcatttgcaatggaaaacacgtaacttgtttaaaagtttttctggtagctttagctttatgctaaaaaaaataatgacattgggtatctatttctttctaagactacattagtaggaaaataagtcttttcatgcttatgatttagctgttttgtggtaattgctttttaaaggaagttattaatatcataagttattattaatattttgaacacaggtggatgtgaaggattttcatttaaaaaccaagtggttttgactttttctgttgaatgaacaactgtgccttgtggaatttttgcagaagtgtttatgctttgttagcatttcaacttgcattattataaagaggtattaatgcctcagttatgtgtttgtcaatgtactggctgaggattctatctcagctgtcttttctaactgtgtaggttgagttttgaacacgtgcttgtggacatcaggcctcctgccagcagttcttgaagcttctttttcattcctgctactctacctgtatttctcagttgcagcactgagtggtcaaaatacatttctgggccacctcagggaacccatgcatctgcctggcatttaggcagcagagcccctgaccgtcccccacagggctctgcctcacgtcctcatctcatttggctgtgtaaagaaatgggaaaagggaaaaggagagagcaattgaggcagttgaccatattcagttttatttatttatttttaatttgtttttttctccaagtccaccagtctctgaaattagaacagtaggcggtatgagataatcaggcctaatcatgttgtgattctcttttcttagtggagtggaatgttctatccccacaagaaggattatatcttatagacttgtcttgttcagattctgtatttacccattttattgaaacatatactaagttccatgtatttttgttacaaatcttctgaaaaaaaacaaaacaatgtgaaacattaaaattaaaaggcattaataat

SEQ ID NO: 137485 - protein, 113 aa, Artificial Sequence
  derived and/or modified sequence
MGGLEPCSRLLLLPLLLAVSGLRPVQAQAQSDCSCSTVSPGVLAGIVMGDLVLTVLIALAVYFLGRLVPRGRGAAEAATRKQRITETESPYQELQGQRSDVYSDLNTQRPYYK

SEQ ID NO: 137486 - DNA, 342 bp, Artificial Sequence
  derived and/or modified sequence
atgggcggcctggagccctgcagcagactgctgctgctgcccctgctgctggccgtgagcggcctgagacccgtgcaggcccaggcccagagcgactgcagctgcagcaccgtgagccccggcgtgctggccggcatcgtgatgggcgacctggtgctgaccgtgctgatcgccctggccgtgtacttcctgggcagactggtgcccagaggcagaggcgccgccgaggccgccaccagaaagcagagaatcaccgagaccgagagcccctaccaggagctgcagggccagagaagcgacgtgtacagcgacctgaacacccagagaccctactacaagtag

SEQ ID NO: 137487 - DNA, 342 bp, Artificial Sequence
  derived and/or modified sequence
atgggcggactggagccctgttcgagactgttgttgctccccctacttctggctgtttccggcttgcggcccgtccaagcccaggcccagtcagactgcagctgttctaccgttagccctggagtgctggctggaatcgtgatgggtgacctggtcctcaccgtgctaattgccctggccgtttactttttgggcaggctagtgccgcggggcagaggcgccgcggaggccgctaccagaaaacagcggatcaccgagactgaaagtccgtatcaggagctacagggccaaagatcagacgtctattcagatctgaatacccaacgtccttattataagtag

SEQ ID NO: 137488 - DNA, 342 bp, Artificial Sequence
  derived and/or modified sequence
atgggcggcctggagccctgcagccggctgctgctgctgcccctgctgctggccgtgtctggcctgcggcctgtgcaggcccaggcccagagcgactgcagctgcagcacagtgtcccctggggtgctggccggcatcgtgatgggagacctggtgctgactgtgctgattgccctggccgtgtacttcctgggccgcctggtgccccggggccgcggggctgctgaggccgccaccaggaagcagaggatcacagaaacagagagcccctaccaggagctgcagggccagaggagtgatgtgtacagcgacctgaacacccagaggccctactacaagtag

SEQ ID NO: 137489 - DNA, 342 bp, Artificial Sequence
  derived and/or modified sequence
atgggcggcctggagccctgcagccggctgctgctgctgcccctgctgctagctgtgtcaggactgaggccagtgcaggcacaagcccaatcggactgttcctgcagcaccgtgtcaccaggcgtactagcggggatcgtcatgggggatctcgtcctgacagttctcatcgctctggcagtatattttctgggaagactggtaccacggggacgaggagcggccgaggcggccactagaaagcagcgcatcactgagaccgagagcccctatcaggaactgcagggccagcgctccgatgtgtattctgatttgaacactcaacggccttattataagtag

SEQ ID NO: 137490 - DNA, 342 bp, Artificial Sequence
  derived and/or modified sequence
atgggtggcctagaaccctgttcaaggctgcttctgctgccgctgctactggcggtcagcgggctgcgtccggtccaggcgcaagcacagagcgattgctcttgttcaacagtcagcccaggcgtcttagcagggatcgttatgggtgatttggtgctcactgtgctcatcgctctggccgtgtatttcctgggacgcctggttcccaggggcaggggcgctgcagaggcggcaacgaggaagcagagaatcaccgaaacagagagcccttatcaggagctgcaaggacagcgctccgacgtgtattctgaccttaatactcagaggccctactacaaatag

SEQ ID NO: 137491 - DNA, 582 bp, Artificial Sequence
  derived and/or modified sequence
agacttcctccttcacttgcctggacgctgcgccacatcccaccggcccttacactgtggtgtccagcagcatccggcttcatggggggacttgaaccctgcagcaggctcctgctcctgcctctcctgctggctgtaagtggtctccgtcctgtccaggcccaggcccagagcgattgcagttgctctacggtgagcccgggcgtgctggcagggatcgtgatgggagacctggtgctgacagtgctcattgccctggccgtgtacttcctgggccggctggtccctcgggggcgaggggctgcggaggcagcgacccggaaacagcgtatcactgagaccgagtcgccttatcaggagctccagggtcagaggtcggatgtctacagcgacctcaacacacagaggccgtattacaaatgagcccgaatcatgacagtcagcaacatgatacctggatccagccattcctgaagcccaccctgcacctcattccaactcctaccgcgatacagacccacagagtgccatccctgagagaccagaccgctccccaatactctcctaaaataaacatgaagc

SEQ ID NO: 137492 - protein, 1012 aa, Artificial Sequence
  derived and/or modified sequence
MDALDASKLLDEELYSRQLYVLGSPAMQRIQGARVLVSGLQGLGAEVAKNLVLMGVGSLTLHDPHPTCWSDLAAQFLLSEQDLERSRAEASQELLAQLNRAVQVVVHTGDITEDLLLDFQVVVLTAAKLEEQLKVGTLCHKHGVCFLAADTRGLVGQLFCDFGEDFTVQDPTEAEPLTAAIQHISQGSPGILTLRKGANTHYFRDGDLVTFSGIEGMVELNDCDPRSIHVREDGSLEIGDTTTFSRYLRGGAITEVKRPKTVRHKSLDTALLQPHVVAQSSQEVHHAHCLHQAFCALHKFQHLHGRPPQPWDPVDAETVVGLARDLEPLKRTEEEPLEEPLDEALVRTVALSSAGVLSPMVAMLGAVAAQEVLKAISRKFMPLDQWLYFDALDCLPEDGELLPSPEDCALRGSRYDGQIAVFGAGFQEKLRRQHYLLVGAGAIGCELLKVFALVGLGAGNSGGLTVVDMDHIERSNLSRQFLFRSQDVGRPKAEVAAAAARGLNPDLQVIPLTYPLDPTTEHIYGDNFFSRVDGVAAALDSFQARRYVAARCTHYLKPLLEAGTSGTWGSATVFMPHVTEAYRAPASAAASEDAPYPVCTVRYFPSTAEHTLQWARHEFEELFRLSAETINHHQQAHTSLADMDEPQTLTLLKPVLGVLRVRPQNWQDCVAWALGHWKLCFHYGIKQLLRHFPPNKVLEDGTPFWSGPKQCPQPLEFDTNQDTHLLYVLAAANLYAQMHGLPGSQDWTALRELLKLLPQPDPQQMAPIFASNLELASASAEFGPEQQKELNKALEVWSVGPPLKPLMFEKDDDSNFHVDFVVAAASLRCQNYGIPPVNRAQSKRIVGQIIPAIATTTAAVAGLLGLELYKVVSGPRPRSAFRHSYLHLAENYLIRYMPFAPAIQTFHHLKWTSWDRLKVPAGQPERTLESLLAHLQEQHGLRVRILLHGSALLYAAGWSPEKQAQHLPLRVTELVQQLTGQAPAPGQRVLVLELSCEGDDEDTAFPPLHYEL

SEQ ID NO: 137493 - DNA, 3039 bp, Artificial Sequence
  derived and/or modified sequence
atggacgccctggacgccagcaagctgctggacgaggagctgtacagcagacagctgtacgtgctgggcagccccgccatgcagagaatccagggcgccagagtgctggtgagcggcctgcagggcctgggcgccgaggtggccaagaacctggtgctgatgggcgtgggcagcctgaccctgcacgacccccaccccacctgctggagcgacctggccgcccagttcctgctgagcgagcaggacctggagagaagcagagccgaggccagccaggagctgctggcccagctgaacagagccgtgcaggtggtggtgcacaccggcgacatcaccgaggacctgctgctggacttccaggtggtggtgctgaccgccgccaagctggaggagcagctgaaggtgggcaccctgtgccacaagcacggcgtgtgcttcctggccgccgacaccagaggcctggtgggccagctgttctgcgacttcggcgaggacttcaccgtgcaggaccccaccgaggccgagcccctgaccgccgccatccagcacatcagccagggcagccccggcatcctgaccctgagaaagggcgccaacacccactacttcagagacggcgacctggtgaccttcagcggcatcgagggcatggtggagctgaacgactgcgaccccagaagcatccacgtgagagaggacggcagcctggagatcggcgacaccaccaccttcagcagatacctgagaggcggcgccatcaccgaggtgaagagacccaagaccgtgagacacaagagcctggacaccgccctgctgcagccccacgtggtggcccagagcagccaggaggtgcaccacgcccactgcctgcaccaggccttctgcgccctgcacaagttccagcacctgcacggcagacccccccagccctgggaccccgtggacgccgagaccgtggtgggcctggccagagacctggagcccctgaagagaaccgaggaggagcccctggaggagcccctggacgaggccctggtgagaaccgtggccctgagcagcgccggcgtgctgagccccatggtggccatgctgggcgccgtggccgcccaggaggtgctgaaggccatcagcagaaagttcatgcccctggaccagtggctgtacttcgacgccctggactgcctgcccgaggacggcgagctgctgcccagccccgaggactgcgccctgagaggcagcagatacgacggccagatcgccgtgttcggcgccggcttccaggagaagctgagaagacagcactacctgctggtgggcgccggcgccatcggctgcgagctgctgaaggtgttcgccctggtgggcctgggcgccggcaacagcggcggcctgaccgtggtggacatggaccacatcgagagaagcaacctgagcagacagttcctgttcagaagccaggacgtgggcagacccaaggccgaggtggccgccgccgccgccagaggcctgaaccccgacctgcaggtgatccccctgacctaccccctggaccccaccaccgagcacatctacggcgacaacttcttcagcagagtggacggcgtggccgccgccctggacagcttccaggccagaagatacgtggccgccagatgcacccactacctgaagcccctgctggaggccggcaccagcggcacctggggcagcgccaccgtgttcatgccccacgtgaccgaggcctacagagcccccgccagcgccgccgccagcgaggacgccccctaccccgtgtgcaccgtgagatacttccccagcaccgccgagcacaccctgcagtgggccagacacgagttcgaggagctgttcagactgagcgccgagaccatcaaccaccaccagcaggcccacaccagcctggccgacatggacgagccccagaccctgaccctgctgaagcccgtgctgggcgtgctgagagtgagaccccagaactggcaggactgcgtggcctgggccctgggccactggaagctgtgcttccactacggcatcaagcagctgctgagacacttcccccccaacaaggtgctggaggacggcacccccttctggagcggccccaagcagtgcccccagcccctggagttcgacaccaaccaggacacccacctgctgtacgtgctggccgccgccaacctgtacgcccagatgcacggcctgcccggcagccaggactggaccgccctgagagagctgctgaagctgctgccccagcccgacccccagcagatggcccccatcttcgccagcaacctggagctggccagcgccagcgccgagttcggccccgagcagcagaaggagctgaacaaggccctggaggtgtggagcgtgggcccccccctgaagcccctgatgttcgagaaggacgacgacagcaacttccacgtggacttcgtggtggccgccgccagcctgagatgccagaactacggcatcccccccgtgaacagagcccagagcaagagaatcgtgggccagatcatccccgccatcgccaccaccaccgccgccgtggccggcctgctgggcctggagctgtacaaggtggtgagcggccccagacccagaagcgccttcagacacagctacctgcacctggccgagaactacctgatcagatacatgcccttcgcccccgccatccagaccttccaccacctgaagtggaccagctgggacagactgaaggtgcccgccggccagcccgagagaaccctggagagcctgctggcccacctgcaggagcagcacggcctgagagtgagaatcctgctgcacggcagcgccctgctgtacgccgccggctggagccccgagaagcaggcccagcacctgcccctgagagtgaccgagctggtgcagcagctgaccggccaggcccccgcccccggccagagagtgctggtgctggagctgagctgcgagggcgacgacgaggacaccgccttcccccccctgcactacgagctgtag

SEQ ID NO: 137494 - DNA, 3299 bp, Artificial Sequence
  derived and/or modified sequence
ccaggaagagagctgtgaccagcagcgtcccttattcgcttggccttggttcctgtttgcactggctacagcagggcactggcccctactgtcaccgccacctacacaaagaccctatctctgagcgctgcagcctactgttcagccccaggtttgaggatggatgccctggacgcttcgaagctactggatgaggagctgtattcaagacagctgtatgtgctgggctcacctgccatgcagaggattcagggagccagggtcctggtgtcaggcctgcagggcctgggggccgaggtggccaagaacttggttctgatgggtgtgggcagcctcactctgcatgatccccaccccacctgctggtccgacctggctgcccagtttctcctctcagagcaggacttggaaaggagcagagccgaggcctctcaagagctcttggctcagctcaacagagctgtccaggtcgtcgtgcacacgggtgacatcactgaggacctgctgttggacttccaggtggtggtgctgactgctgcaaagctggaggagcagctgaaggtgggcaccttgtgtcataagcatggagtttgctttctggcggctgacacccggggcctcgtggggcagttgttctgtgactttggtgaggacttcactgtgcaggaccccacagaggcagaacccctgacagctgccatccagcacatctcccagggctcccctggcattctcactctgaggaaaggggccaatacccactacttccgtgatggagacttggtgactttctcgggaattgagggaatggttgagctcaacgactgtgatccccggtctatccacgtgcgggaggatgggtccctggagattggagacacaacaactttctctcggtacttgcgtggtggggctatcactgaagtcaagagacccaagactgtgagacataagtccctggacacagccctgctccagccccatgtggtggcccagagctcccaggaagttcaccatgcccactgcctgcatcaggccttctgtgcactgcacaagttccagcacctccatggccggccaccccagccctgggatcctgttgatgcagagactgtggtgggcctggcccgggacctggaaccactgaagcggacagaggaagagccactggaagagccactggatgaggccctagtgcggacagtcgccctaagcagtgcaggtgtcttgagccctatggtggccatgctgggtgcagtagctgcccaggaagtgctgaaggcaatctccaggaagttcatgcctctggaccagtggctttactttgatgccctcgattgtcttccggaagatggggagctccttcccagtcctgaggactgtgccctgagaggcagccgctatgatgggcaaattgcagtgtttggggctggttttcaggagaaactgagacgccagcactacctcctggtgggcgctggtgccattggttgtgagctgctcaaagtctttgccctagtgggactgggggccgggaacagcgggggcttgactgttgttgacatggaccacatagagcgctccaatctcagccgtcagttcctcttcaggtcccaggacgttggtagacccaaggcagaggtggctgcagcagctgcccggggcctgaacccagacttacaggtgatcccgctcacctacccactggatcccaccacagagcacatctatggggataactttttctcccgtgtggatggtgtggctgctgccctggacagtttccaggcccggcgctatgtggctgctcgttgcacccactatctgaagccactgctggaggcaggcacatcgggcacctggggcagtgctacagtattcatgccacatgtgactgaggcctacagagcccctgcctcagctgcagcttctgaggatgccccctaccctgtctgtaccgtgcggtacttccctagcacagccgagcacaccctgcagtgggcccggcatgagtttgaagaactcttccgactgtctgcagagaccatcaaccaccaccaacaggcacacacttccctggcagacatggatgagccacagacactcaccttactgaagccagtgcttggggtcctgagagtgcgtccacagaactggcaagactgtgtggcgtgggctcttggccactggaaactctgctttcattatggcatcaaacagctgctgaggcacttcccacctaataaagtgcttgaggatggaactcccttctggtcaggtcccaaacagtgtccccagcccttggagtttgacaccaaccaagacacacacctcctctacgtactggcagctgccaacctgtatgcccagatgcatgggctgcctggctcacaggactggactgcactcagggagctgctgaagctgctgccacagcctgacccccaacagatggcccccatctttgctagtaatctagagctggcttcggcttctgctgagtttggccctgagcagcagaaggaactgaacaaagccctggaagtctggagtgtgggccctcccctgaagcctctgatgtttgagaaggatgatgacagcaacttccatgtggactttgtggtagcggcagctagcctgagatgtcagaactacgggattccaccggtcaaccgtgcccagagcaagcgaattgtgggccagattatcccagccattgccaccactacagcagctgtggcaggcctgttgggcctggagctgtataaggtggtgagtgggccacggcctcgtagtgcctttcgccacagctacctacatctggctgaaaactacctcatccgctatatgccttttgccccagccatccagacgttccatcacctgaagtggacctcttgggaccgtctgaaggtaccagctgggcagcctgagaggaccctggagtcgctgctggctcatcttcaggagcagcacgggttgagggtgaggatcctgctgcacggctcagccctgctctatgcggccggatggtcacctgaaaagcaggcccagcacctgcccctcagggtgacagaactggttcagcagctgacaggccaggcacctgctcctgggcagcgggtgttggtgctagagctgagctgtgagggtgacgacgaggacactgccttcccacctctgcactatgagctgtgacaaggcagccaccctgtcacctagctcaatggagccccggatcccaagccctgcattgtaagcccacagtaggcactcaataaatgcttgttaaaggaagg

SEQ ID NO: 137495 - DNA, 3039 bp, Artificial Sequence
  derived and/or modified sequence
atggatgcactcgatgctagcaaactgctcgacgaagaactttacagtaggcaattatacgtcctcggctcaccagcaatgcagaggatccaaggcgcgagggtcctggtgtctggcctacagggtctcggtgctgaagtagctaaaaacctggttctcatgggcgtcggtagtctgacgctgcacgatccacatcccacctgttggtctgatttggcagctcagtttctactgtccgagcaggacctggaacggtcaagggcagaagctagtcaagagcttttggcacagcttaacagagccgtgcaagttgttgtccataccggggacataactgaggatctgctgcttgactttcaggtggttgtcctgaccgccgcgaaactcgaagaacagctcaaggtgggaaccctgtgccacaagcatggtgtatgttttcttgcggccgacacacgtggcttggtgggccaactattttgtgactttggagaggactttactgtgcaggaccctacagaagcagagccgttaacagccgcaattcagcacatctcgcagggctctcctggtatcctcaccctcagaaaaggagcgaacacccattatttccgcgacggggacttggtgacgttcagcggcattgaagggatggtcgaactgaacgactgcgaccctaggagtatccacgtcagagaagacggctcgctggagattggggacacaacaacattcagccgctaccttcgcgggggcgccattacagaggtcaaaagacccaagacagtgcgacacaagtcactggacacggctcttctgcagcctcatgtggtggcgcagtcgagccaggaggttcatcatgctcattgtctccaccaggctttttgcgctcttcacaaattccaacacttacacggccgcccacctcagccttgggaccctgtagatgctgaaaccgtggtgggactagctcgggacttggagccactgaaacgcaccgaagaggaacccttagaagagcctctcgatgaggctttagtgagaacggtggcattgagttcagctggagtgttatcccctatggttgccatgctgggagcggtcgccgcccaggaggtgttgaaagcaattagtaggaagtttatgcctcttgaccagtggctgtacttcgacgctctcgactgtctgccggaagacggagagttactaccatcccctgaggattgtgcactgcggggaagtaggtatgatggccagatagccgtattcggggccggatttcaggaaaagttaaggcggcagcactatttgctcgtcggtgctggcgccatcgggtgtgagctactcaaggtcttcgcccttgtgggcctaggtgcaggaaattccggaggattgacagtcgtggatatggaccatatcgaacgtagcaacctttcacgacaattcttattcaggagccaggacgtcggtcgtcccaaagctgaggtcgccgctgcagccgcccggggcttaaatcctgacttgcaggtcatccctttgacttaccctctagaccccaccaccgagcatatctacggcgataactttttttccagagtcgatggcgtggcggcagcactcgatagctttcaggcacggagatacgtcgcagcccggtgtactcattatctgaaacccctattagaagctgggacttccggaacatgggggtccgccaccgtctttatgccgcatgtgacggaggcgtacagagccccagctagcgcagccgctagcgaggacgcaccctacccagtctgtacagtgaggtacttccccagcaccgcggagcataccttacagtgggcccgtcacgagttcgaagaactgtttcggttgtcagcagagaccattaatcatcaccagcaggctcacaccagccttgcggacatggacgaacctcaaaccttgactctgctcaaacctgttctgggcgtactgcgcgtcagaccccagaactggcaggattgcgtcgcctgggccctcgggcactggaaactgtgtttccattatggtatcaagcagctgctgcgccactttccgcctaataaggtgcttgaagacgggacacctttttggtccggccccaaacagtgcccccagcccttggagttcgacaccaaccaagatacccatcttctgtacgttcttgccgcagccaatctctacgctcaaatgcatggactaccaggtagtcaagattggacagcactgcgtgagttactgaaacttctgccccagcccgatcctcagcaaatggctccaatttttgccagcaacctggagctggctagtgcaagtgcagagttcggcccagaacaacagaaggagctgaacaaggcgctcgaggtgtggtctgttggaccacccctgaaacctctaatgttcgagaaggatgacgactctaacttccacgtagacttcgtggtggcggctgcgagccttagatgtcagaattatggcatccctcctgtgaacagagcccaatctaaacggattgtgggccagatcattcctgccatcgcaacaacaacagctgcagttgccggacttctgggtctggaactgtacaaagtcgtgtccggtcccagaccccgttccgcgttcaggcactcatacttgcatctggcagaaaactacctgatcaggtacatgcccttcgcaccggccattcaaacatttcaccacctgaagtggacttcgtgggaccgattgaaggtaccggcagggcagcctgagcggactctcgagagccttctggctcacttacaggagcaacacggcctgagggtgaggatactcctccacggatctgccctgttgtatgcagcaggatggtcccccgaaaaacaggctcagcatttacccctccgggtgacagaattagtccagcagctgaccggccaggctcccgcccctggacagagggtactcgtgctggaactgagctgcgagggcgacgacgaggatacagcctttccacccctacattacgagctttag

SEQ ID NO: 137496 - DNA, 3039 bp, Artificial Sequence
  derived and/or modified sequence
atggatgccctggatgccagcaagctgctggatgaggagctgtacagccggcagctgtatgtgctgggcagccctgccatgcagaggatccagggcgcccgggtgctggtgtctggcctgcagggcctgggcgctgaggtggccaagaacctggtgctgatgggcgtgggcagcctgaccctgcatgacccccaccccacctgctggagcgacctggccgcccagttcctgctgtctgagcaggacctggagaggagcagagctgaggccagccaggagctgctggcccagctgaacagagctgtgcaggtggtggtgcacactggagacatcacagaggacctgctgctggacttccaggtggtggtgctgacagctgccaagctggaggagcagctgaaggtgggcaccctgtgccacaagcacggcgtgtgcttcctggccgctgacacccggggcctggtgggccagctgttctgtgactttggagaggacttcaccgtgcaggaccccacagaggccgagcccctgacagctgccatccagcacatcagccagggcagccctggcatcctgaccctgaggaagggggccaacacccactacttcagagatggagacctggtgaccttcagcggcatcgagggcatggtggagctgaatgactgtgaccccaggagcatccacgtgcgggaggatggcagcctggagatcggggacaccaccaccttcagccgctacctgcggggcggggccatcacagaggtgaagaggcccaagacagtgcgccacaagagcctggacacagccctgctgcagccccacgtggtggcccagagcagccaggaggtgcaccacgcccactgcctgcaccaggccttctgtgccctgcacaagttccagcacctgcacggccggcccccccagccctgggaccctgtggatgctgagaccgtggtgggcctggcccgggacctggagcccctgaagaggacagaggaggagcccctggaggagcccctggatgaggccctggtgaggacagtggccctgagcagcgctggggtgctgagccccatggtggccatgctgggcgctgtggccgcccaggaggtgctgaaggccatcagcaggaagttcatgcccctggaccagtggctgtactttgatgccctggactgcctgcctgaagatggagagctgctgcccagccctgaggactgtgccctgcggggcagccgctatgatggccagattgctgtgtttggagctggcttccaggagaagctgcggcggcagcactacctgctggtgggcgctggggccatcggctgtgagctgctgaaggtgtttgccctggtgggcctgggcgccggcaacagcggcggcctgactgtggtggacatggaccacatcgagaggagcaacctgagccggcagttcctgttccgcagccaggatgtgggccggcccaaggccgaggtggccgctgctgctgcccggggcctgaacccagacctgcaggtgatccccctgacctaccccctggaccccaccacagagcacatctacggggacaacttcttcagccgggtggatggagtggccgccgccctggacagcttccaggccaggagatatgtggccgcccgctgcacccactacctgaagcccctgctggaggccggcaccagcggcacctggggcagcgccaccgtcttcatgcctcatgtgacagaggcctaccgggccccagccagcgctgctgcctctgaagatgccccctaccctgtgtgcaccgtgcgctacttccccagcacagctgagcacaccctgcagtgggcccggcatgaatttgaggagctgttccggctgtctgctgagaccatcaaccaccaccagcaggcccacaccagcctggccgacatggatgagccccagaccctgaccctgctgaagcctgtgctgggcgtgctgcgggtgcggccccagaactggcaggactgtgtggcctgggccctgggccactggaagctgtgcttccactacggcatcaagcagctgctgcggcacttcccccccaacaaggtgctggaggatggcacccccttctggagcggccccaagcagtgcccccagcccctggagtttgacaccaaccaggacacccacctgctgtatgtgctggccgccgccaacctgtatgcccagatgcacggcctgcccggcagccaggactggacagccctgcgggagctgctgaagctgctgccccagcctgacccccagcagatggcccccatctttgccagcaacctggagctggccagcgccagcgctgagtttggacctgagcagcagaaggagctgaacaaggccctggaggtgtggagcgtgggcccccccctgaagcccctgatgtttgagaaggatgatgacagcaacttccacgtggactttgtggtggccgccgccagcctgcgctgccagaactacggcatcccccctgtgaacagagcccagagcaagagaattgtgggccagatcatcccagccatcgccaccaccacagctgctgtggccggcctgctgggcctggagctgtacaaggtggtgtctggcccccggcccaggtctgccttccgccacagctacctgcacctggccgagaactacctgatccgctacatgccctttgccccagccatccagaccttccaccacctgaagtggacctcctgggaccggctgaaggtgcctgctggccagcctgagaggaccctggagagcctgctggcccacctgcaggagcagcacggcctgcgggtgcgcatcctgctgcacggcagcgccctgctgtatgctgctggctggagccctgagaagcaggcccagcacctgcccctgcgggtgacagagctggtgcagcagctgaccggccaggccccagcccctggccagagggtgctggtgctggagctgagctgtgaaggagatgatgaggacacagccttcccccccctgcactatgagctgtag

SEQ ID NO: 137497 - DNA, 3039 bp, Artificial Sequence
  derived and/or modified sequence
atggacgccctggacgccagcaagctgctggacgaggagctgtactcccgccagctctacgtactggggtcccctgcaatgcagcgaatccagggagcacgggttttagtttcaggactccagggcctgggggcagaggtggcaaaaaacttggttctgatgggggtcggctccttgacactccacgatccccacccaacatgttggagcgatttggcagcacagttcctgctaagcgagcaggatctggagaggtccagggccgaagccagtcaggagctgctggcgcagctaaaccgtgcggttcaggttgtggtgcatactggcgacatcaccgaggatcttcttctcgacttccaggtggtggtgctgacggctgcgaagttggaggaacagttgaaggtgggcactttatgtcacaagcacggggtgtgtttccttgcagctgacacgaggggcttggtcggacagctgttttgcgacttcggagaggattttactgtgcaggacccaaccgaggcagagcccttgaccgctgccattcaacatatatcccagggatcgccaggcatcttaaccctccggaaaggtgcgaacacccactattttagggacggtgatctggttacgtttagcgggattgaagggatggtggaactgaatgattgtgaccctaggagcattcatgtgagggaggatggaagcctcgagataggtgatacaacaacattctctcgttacctacgcggtggagccataactgaggtgaagagaccaaagacagtgcgacacaagtcactggataccgcactgctgcagccgcatgtagtggctcagagctcacaggaggtacatcatgcccactgccttcaccaggcattttgcgcccttcacaaattccagcacctgcacggcagacctccacagccttgggacccagtggacgccgaaaccgtcgtcggactggctcgggacctcgaacctttgaagcgaaccgaggaggaacccctcgaagaaccattagacgaggccttggtgaggaccgtggctctgtcaagtgccggtgttcttagtcctatggttgctatgcttggggccgtggctgcccaagaggtcttgaaagccatctcacggaagtttatgcctctggaccagtggctgtatttcgacgcgctggattgcctccccgaagacggggaactgttgccttccccagaggattgcgccctgcgtgggtctcggtacgatggacagattgcagtgttcggcgcaggatttcaagagaaactgcgacgtcaacactatctgttagtcggcgcgggagccatcggatgcgagcttctcaaggtcttcgctttggtaggcctcggcgccgggaactccgggggactcactgttgtggacatggaccacatagaacggagtaatttgtccagacagttcctgttccggtcccaagacgtgggccgaccgaaagctgaggttgctgctgctgctgctcgcgggctgaatcccgatctccaggtcatacctctgacatatcccctggatccaactaccgagcacatatacggggataactttttctcaagagttgatggggttgctgctgctttggactcctttcaggcgagacggtatgtggccgcccgatgcactcactacttaaaaccccttctggaggctggcacaagtgggacctggggctcagccacggtctttatgccacatgtgaccgaagcttacagagctcccgcctcagcagccgcatcggaggacgcaccataccccgtgtgcaccgtgaggtatttcccctctaccgccgagcacaccctgcagtgggcaagacatgagttcgaggaactgtttaggttgagcgcagagacgattaatcaccatcaacaggcccacacgtcacttgctgatatggacgagcctcaaactctcactctgctgaagcctgtcttgggagtcctgagggttcgcccccagaactggcaggactgcgtcgcctgggcacttggccattggaaactttgtttccattacggtatcaagcaactgctccgccactttcctccaaacaaagtcctggaggatgggactccattttggtctgggcctaagcagtgccctcagccactcgagttcgatactaatcaggacactcacctgctatatgtactcgcagccgctaatctttacgctcagatgcatggcctgcccgggagccaggattggacggctctgcgggaacttctgaagctgctgccgcagcccgatccacagcagatggcacctatattcgcctccaatctcgaactggctagcgcatcagctgaattcgggcccgaacagcaaaaggaattgaacaaggcattggaggtgtggagtgtgggcccaccgctgaaacccctgatgttcgagaaagatgacgacagtaatttccatgtggatttcgttgtggctgcagcgtccctaaggtgccaaaattatggaatcccaccggtgaatagagcacagagcaagagaattgttggccaaattattcccgccatagcaactactacagctgctgtcgcagggcttctgggcctcgagttatataaggtcgttagtggcccccgcccccgctctgcctttaggcattcctacctccatcttgccgaaaattaccttataagatatatgccattcgcacctgctatccagaccttccaccacttaaaatggactagctgggatagactcaaagtaccggctggtcagccagaacggactctcgaatccctgctagcgcatctgcaggaacagcatgggctgcgggtgcgcatcctccttcatgggagcgccttgctgtacgctgccggatggtcgccagagaagcaggcgcagcaccttccccttagagtaacagaactggttcagcagttgacaggacaagcgcccgcacctggacagcgtgtgctggtgctggaactcagttgtgagggggatgacgaagatactgcattcccgcctcttcactacgaactgtag

SEQ ID NO: 137498 - DNA, 3039 bp, Artificial Sequence
  derived and/or modified sequence
atggacgcattagatgctagcaagctactggacgaggaactctacagccgtcagctctacgtgctcgggtccccagccatgcaaagaattcagggtgctagggtgttagtctccggattgcagggacttggcgctgaagtcgcaaagaacctggttcttatgggggtaggttctttgaccctgcacgatccacacccgacatgttggagcgacctggccgcacagtttctactgtcagaacaggatctcgaacggtcacgcgcagaggcttctcaagagctcctcgctcagctgaaccgggcagtccaggttgttgtgcataccggagatatcacagaagacctgcttctcgatttccaggtcgttgttttgacagctgcaaagctggaagaacagttgaaagtcggcaccctgtgccataaacacggcgtgtgtttcctggccgctgacactagggggttggttggtcagctattttgtgactttggcgaggacttcaccgtgcaggatcccactgaagcagagcctctgaccgctgctattcagcatatttctcagggatctcccggaattctgacgcttagaaagggagcaaacacccattactttagagatggcgatctagtgacattttccggcatagaaggcatggtggagctcaacgattgtgatccaaggtcaatccatgtgagggaggacggtagcctggaaattggagacactacaacattttcacgataccttcgcggaggggcaatcaccgaagtgaaaaggcccaaaacagtacgccacaagagcctcgacacagccctcctgcaacctcacgtggtggcccagtcctctcaggaggtccatcacgcacactgtcttcatcaagcattttgtgcattgcacaagttccagcatcttcatgggcgtcctccgcagccttgggatcccgttgacgcagagacagtcgttgggcttgccagagacctcgaacctctgaaacgcaccgaagaagaaccacttgaggagccgttggacgaggctttagttagaacggtcgcactgtcctcagccggagtgttgagcccgatggtggccatgctcggggcagtggcagctcaagaggttctaaaggccatctcccgtaagttcatgccgctggatcagtggctttattttgatgctttggactgcctgcctgaggacggggagctgcttccatctccggaagactgtgcactccgtggtagccggtacgacggacagattgccgttttcggcgctggctttcaggagaaactaaggagacaacattacttactagtgggcgctggcgcaatcggctgtgagctgctcaaggtttttgccttagtcggtctcggtgctggcaactctgggggtcttaccgtcgtggatatggatcacatcgaacggagcaatttatcccgccagtttttatttaggtctcaggatgtgggaaggcctaaagccgaagtggccgctgccgcagcgagaggcctaaatcctgatcttcaggtaatcccacttacttaccccctagatccaacgactgagcatatatacggggataacttttttagtagggtcgatggggtcgccgctgccctagactcgttccaagctcgcaggtatgtggcagctcgatgtactcattacctgaaacccttgctcgaagcaggcacctcgggaacatggggttctgccacagtgttcatgcctcacgtgacagaagcttacagagccccagctagcgccgcagcctcagaggatgccccatatccggtctgcactgtgcggtatttcccaagtacagcagagcatacacttcagtgggctaggcatgagttcgaagagctcttccggctctcagccgaaactattaatcatcatcagcaggcacacacatcgcttgcggatatggatgaacctcagaccctgacattactgaaaccagtgttgggcgttcttcgcgtgagaccccagaactggcaggattgtgtcgcctgggctcttgggcattggaaactgtgttttcattacggcataaagcagctgttaaggcatttccccccaaataaagttctggaggacgggactcccttttggagcggacctaagcaatgcccgcagcctctggaattcgataccaatcaggacacacatttactgtacgtccttgccgctgccaatctttatgctcagatgcatggccttcccggatcccaggattggaccgccctgagagaactgctgaaactgttgcctcaacctgacccacaacagatggctcccatctttgcatccaatctagaattggcttctgcgtccgcagaatttgggcctgagcagcagaaggaactgaacaaggcactcgaagtgtggagcgtcgggcctccactgaagcctttgatgttcgaaaaagacgacgacagcaatttccatgtagatttcgttgtggctgcagcatcactgcggtgtcagaactatggcatccctcctgttaaccgcgctcagagtaagaggatagtgggccagatcattcccgcaatcgcgaccactacggccgcagtggcaggcctgctcggccttgaactctataaggtcgttagtgggcctcgtccaaggagcgccttccgccattcctacctgcacctggcagagaactacctgatcagatatatgccttttgcacccgctatccaaacatttcaccatttgaagtggacttcatgggatcggctcaaggtgccagcaggccagccggaaagaactctcgagagcctcctggcacacttacaggaacagcacggattacgggtgcgaattcttctccatgggagcgccctactgtacgccgcaggctggtctccggagaagcaggcccagcatctgcccctgcgtgtcacggaactggtccagcagctgacgggtcaggccccagcccctggccaacgtgtattggtgttggagctgagctgtgagggagacgatgaggatactgcattccctccactacactatgagctgtag

SEQ ID NO: 137499 - protein, 152 aa, Artificial Sequence
  derived and/or modified sequence
MSTPARRRLMRDFKRLQEDPPAGVSGAPSENNIMVWNAVIFGPEGTPFEDGTFKLTIEFTEEYPNKPPTVRFVSKMFHPNVYADGSICLDILQNRWSPTYDVSSILTSIQSLLDEPNPNSPANSQAAQLYQENKREYEKRVSAIVEQSWRDC

SEQ ID NO: 137500 - protein, 77 aa, Artificial Sequence
  derived and/or modified sequence
MFHPNVYADGSICLDILQNRWSPTYDVSSILTSIQSLLDEPNPNSPANSQAAQLYQENKREYEKRVSAIVEQSWRDC

SEQ ID NO: 137501 - DNA, 459 bp, Artificial Sequence
  derived and/or modified sequence
atgagcacccccgccagaagaagactgatgagagacttcaagagactgcaggaggacccccccgccggcgtgagcggcgcccccagcgagaacaacatcatggtgtggaacgccgtgatcttcggccccgagggcacccccttcgaggacggcaccttcaagctgaccatcgagttcaccgaggagtaccccaacaagccccccaccgtgagattcgtgagcaagatgttccaccccaacgtgtacgccgacggcagcatctgcctggacatcctgcagaacagatggagccccacctacgacgtgagcagcatcctgaccagcatccagagcctgctggacgagcccaaccccaacagccccgccaacagccaggccgcccagctgtaccaggagaacaagagagagtacgagaagagagtgagcgccatcgtggagcagagctggagagactgctag

SEQ ID NO: 137502 - DNA, 459 bp, Artificial Sequence
  derived and/or modified sequence
atgtccacgccggcacgcaggagacttatgcgtgacttcaagcggttgcaggaagatcccccagcaggcgtgtctggagctcctagtgagaataatatcatggtatggaatgcagtgattttcggccctgagggtaccccgttcgaggacggtacatttaagctgacgatagagttcacggaagagtaccccaataaacctcctacggtgaggtttgtgagtaagatgtttcaccctaacgtgtatgcggacggtagcatctgcctggacatccttcagaatcgctggagcccaacttacgatgtgagctcaatcctcactagtattcagtcactgctcgatgagcccaatccaaattcaccggccaactctcaggctgcacagctataccaagaaaataaacgagagtacgagaagcgcgtgagtgctatagtggaacagagctggagggattgttag

SEQ ID NO: 137503 - DNA, 459 bp, Artificial Sequence
  derived and/or modified sequence
atgagcaccccagcccggcggcggctgatgagggacttcaagaggctgcaggaggaccccccagctggggtgtctggggcccccagcgagaacaacatcatggtgtggaatgctgtgatctttggacctgagggcaccccatttgaagatggcaccttcaagctgaccatcgagttcacagaggagtaccccaacaagcccccaacagtgcgctttgtgtccaagatgttccaccccaacgtgtatgcagatggcagcatctgcctggacatcctgcagaaccgctggagccccacctatgatgtgagcagcatcctgaccagcatccagagcctgctggatgagcccaaccccaacagccctgccaacagccaggccgcccagctgtaccaggagaacaagcgggagtatgagaagagggtgtctgccatcgtggagcagagctggagggactgctag

SEQ ID NO: 137504 - DNA, 459 bp, Artificial Sequence
  derived and/or modified sequence
atgagcacccccgcccggcggcggctgatgcgggacttcaagcggctccaggaagaccctccagccggcgtctccggggcacccagcgagaacaacattatggtgtggaacgctgtcatattcggcccggagggcacaccattcgaggatggtaccttcaaactcaccatagagttcacagaggaatatccaaataagcctcccacagtgcggtttgtctctaaaatgttccaccccaatgtatacgcagatggctccatttgcctggacattttgcagaatcgctggagtcccacctacgacgtaagttccattctaaccagtattcagtcactgctcgatgagcccaatcccaacagtcccgcgaacagccaggcagcccagctctaccaagagaacaaaagggaatatgagaaaagagtctcagcaatcgtggagcagagctggagggactgctag

SEQ ID NO: 137505 - DNA, 459 bp, Artificial Sequence
  derived and/or modified sequence
atgtccacccccgctagacgccgactgatgcgagactttaagcgactccaggaggatccacctgctggtgtcagcggagcgcctagtgagaataacattatggtttggaatgcagtgatcttcggtcccgagggcacgccttttgaggacggcaccttcaaactgacgatcgaattcactgaggaatatcccaataagcccccaactgttcgctttgttagtaagatgtttcaccctaacgtctacgccgatggttcaatctgccttgacattctgcagaacaggtggagcccaacgtatgatgtgagcagcatcttgacaagtattcagtccctgcttgacgaacctaacccaaactcccccgcaaattcacaggccgctcaactataccaggaaaataaacgtgagtatgaaaagcgggtgagcgccatcgtagagcagagctggcgggattgttag

SEQ ID NO: 137506 - DNA, 1796 bp, Artificial Sequence
  derived and/or modified sequence
actggggtggtgcttagccggcgccagaccgaccctcgacttcggagaggcagcgcggttcctctgggtgcttccgcctccccttctcctgcttctccagcctcttcggcctcctcgcccgccgcgggaacccgagaccccagtgtatgccccacccctgaccccgctcgcgacatgtccaccccggctcggcggcgcctcatgcgggacttcaagaggttgcaggaggatcctccagccggagtcagcggggctccgtccgagaacaacataatggtgtggaacgcggtcattttcgggcctgaagggaccccgtttgaggatggaacatttaaacttacaatagaattcactgaagaatatccaaataaaccacctacagttagatttgtctctaagatgttccatccaaatgtctatgcagatggtagtatatgtctggacatacttcagaaccgttggagtccaacctatgatgtgtcttccattctaacatccatacagtctctgttggatgaacccaatcccaatagtccagcaaacagccaggctgctcagctgtaccaggagaacaaacgggaatatgaaaagcgtgtttctgcaatagtagaacaaagctggcgtgattgttgaccccgggtacagtttaaagaagctggccataagaaaaatatatattgatgtgtttgtcacctccctactcctgtcattacatttactttattaaaagcaaaataactgttgtgctgtttccatcttccttgccaagttttcctaccccttctaccctctccttaaacatcagaaaacaccctctatgaaatcaaatgtactgtacctgggttacttgcaaaaattactaatgcttcagtttttctgttgtatttcatttccagttttcaggcagttatttttattattgtactttaagcttttaagatgaattgttatacaagaggtgcttatgcttagcttgatgaccaggatgttatttttaacaaaatgattgctgaagtgtttcatcctggctggtccttcacttgtgttggatttagaagtgaatgtgtttggaatatggcctacagagaatagaaacaaatccatgtaaacaattttgaaggaggcatgggagctaaaaatcctgtgatactaagatctcagtcatatgaattacaacgtagtatttactggcaagaaggagaaagttgaaggactcagctaaaggagtacagcaattgtagtaactgacacatcctctctttgcaagctgctgactgggcacactcatgccaagtttcagaattattggtcttctgggtttttgctttttaaaagaggtgtgggagcagaggaatggaaacaatcgtgagtttttgagctagggaaagttggagctcctttaatctttttaaaggatcagtgctgccctaagtgaataaactcaattgtccatctttattttagagttttaatgaattcaaggaagggagcatagcatatctgtggcaaactattttccactcaaatcctgagttattgctgcatgctttaatttcttccctttcagcatctgagaaccttaaagccaatgtctgcgatctttttttggatatttatacttttagatatatagtacctttaagtagcagtatgggacaaggcttgtaaatgttttgtctaatgttctattgtcaccttttatgcatttatcacttccaaatctaactttgcacaagtaacccatgtaaaaaaaaatgtacatttttcaaaagttgtaaataaaaataaccttaaaa

SEQ ID NO: 137507 - protein, 152 aa, Artificial Sequence
  derived and/or modified sequence
MSTPARRRLMRDFKRLQEDPPVGVSGAPSENNIMQWNAVIFGPEGTPFEDGTFKLVIEFSEEYPNKPPTVRFLSKMFHPNVYADGSICLDILQNRWSPTYDVSSILTSIQSLLDEPNPNSPANSQAAQLYQENKREYEKRVSAIVEQSWNDS

SEQ ID NO: 137508 - DNA, 82 bp, Artificial Sequence
  derived and/or modified sequence
aatggaatcgaagagaatcatcgaacggactcgaatggaatcatctaatggaatggaatggaataatccatggacccgaatg

SEQ ID NO: 137509 - DNA, 459 bp, Artificial Sequence
  derived and/or modified sequence
atgagcacccccgccagaagaagactgatgagagacttcaagagactgcaggaggacccccccgtgggcgtgagcggcgcccccagcgagaacaacatcatgcagtggaacgccgtgatcttcggccccgagggcacccccttcgaggacggcaccttcaagctggtgatcgagttcagcgaggagtaccccaacaagccccccaccgtgagattcctgagcaagatgttccaccccaacgtgtacgccgacggcagcatctgcctggacatcctgcagaacagatggagccccacctacgacgtgagcagcatcctgaccagcatccagagcctgctggacgagcccaaccccaacagccccgccaacagccaggccgcccagctgtaccaggagaacaagagagagtacgagaagagagtgagcgccatcgtggagcagagctggaacgacagctag

SEQ ID NO: 137510 - DNA, 459 bp, Artificial Sequence
  derived and/or modified sequence
atgtcaacccccgcaagacggcggttgatgcgggactttaaacgtctccaggaagatcctcccgtgggagtaagcggagcaccctccgagaacaatataatgcagtggaatgcagtgatcttcgggcctgaggggacgccatttgaggacgggacattcaagctggtgattgaattctccgaggaatacccaaacaaacctcccaccgtgaggttcctatctaaaatgttccatcccaatgtttatgctgacgggtccatttgtctggatattctgcagaaccgatggtcgcctacttacgacgttagctctattctcactagcatccagagcctcctcgacgagcccaatcccaacagccctgcaaattcccaggccgcccaactttatcaggagaacaagcgcgaatatgaaaagagagtgtccgctatcgttgaacagagttggaatgacagctag

SEQ ID NO: 137511 - DNA, 459 bp, Artificial Sequence
  derived and/or modified sequence
atgagcaccccagcccggcggcggctgatgagggacttcaagaggctgcaggaggacccccctgtgggcgtgtctggggcccccagcgagaacaacatcatgcagtggaatgctgtgatctttggacctgagggcaccccatttgaagatggcaccttcaagctggtgattgagttcagcgaggagtaccccaacaagcccccaacagtgcgcttcctgagcaagatgttccaccccaacgtgtatgcagatggcagcatctgcctggacatcctgcagaaccgctggagccccacctatgatgtgagcagcatcctgaccagcatccagagcctgctggatgagcccaaccccaacagccctgccaacagccaggccgcccagctgtaccaggagaacaagcgggagtatgagaagagggtgtctgccatcgtggagcagagctggaatgacagctag

SEQ ID NO: 137512 - DNA, 459 bp, Artificial Sequence
  derived and/or modified sequence
atgagcacccccgcccggcggcggctgatgcgggacttcaagcggctgcaggaggacccaccggtgggcgtgagcggagctccatcagaaaacaatattatgcagtggaatgccgtcatttttggccccgagggaacaccattcgaggacggtaccttcaagctggtcattgaattctctgaagagtaccctaataagccccctaccgtccggttcctgtctaaaatgttccatccgaatgtgtacgcggacgggtccatttgcttagacatcctgcagaataggtggtccccaacatatgacgttagcagtattcttacttcaatccagtctctgctcgatgaacctaaccctaacagtccagcaaattcacaggccgctcagctgtaccaggaaaataaacgggagtacgaaaagcgggtgagtgctatcgtagaacagtcctggaatgactcgtag

SEQ ID NO: 137513 - DNA, 459 bp, Artificial Sequence
  derived and/or modified sequence
atgtcgacacccgcacggagaagacttatgcgtgacttcaagcgacttcaggaggaccctcccgtcggggtgtccggggcaccgtcagagaacaatatcatgcagtggaatgcagtcattttcgggcctgagggtaccccttttgaggacgggacatttaagctcgtgattgaattctcagaggagtacccaaataagcctcccacagtaagattcctgagcaaaatgttccacccaaacgtctacgccgacggatcgatttgcctggatattctgcagaataggtggtcaccaacttacgacgtgtcttctatcctgaccagtatccaatctctgcttgacgagcccaacccaaatagtcctgctaattcacaggcagctcagctctatcaggagaacaaacgggaatacgagaaaagggtgtctgctatcgttgagcagagctggaacgacagttag

SEQ ID NO: 137514 - DNA, 2515 bp, Artificial Sequence
  derived and/or modified sequence
cgtccctctttctccaccccgccgagcctaaactagtgacggggagggagacgggatagtgtttctgtttcgtggtctttgaatccacaacctctagtctgaacacagagaacacaaatttgtctattacttcaggaagcccagggggaaccgcgccccgctgaagggctcggggaaggcgcgctcccgcgtcccgccccctcctcccccagcactcacactgtggtagcggcggagggcggagggatccggaggcggcggagggagacgtcattgcagggttgtttgtcagtctcggcggcggcggcggcggcggcggcggcggcgatccacagtgattcggccgccgcgccggggggtgggggggctgcgcgggactttttttttttcagactgaccgcggggcagctgcggagcatgtcgaccccggcccggaggaggctcatgcgggatttcaagcggttacaagaggacccacctgtgggtgtcagtggcgcaccatctgaaaacaacatcatgcagtggaatgcagttatatttggaccagaagggacaccttttgaagatggtacttttaaactagtaatagaattttctgaagaatatccaaataaaccaccaactgttaggtttttatccaaaatgtttcatccaaatgtgtatgctgatggtagcatatgtttagatatccttcagaatcgatggagtccaacatatgatgtatcttctatcttaacatcaattcagtctctgctggatgaaccgaatcctaacagtccagccaatagccaggcagcacagctttatcaggaaaacaaacgagaatatgagaaaagagtttcggccattgttgaacaaagctggaatgattcataatagacaactggtctgttaatctttttcatcattgttgtgtataatttacctctcattagaaaggctaacaaattttaagtgccacaggttttaaggattctgcagaaaaaaaagaaaaaagtccttcagtttagaacctacaaaagcttgtgtatcttgattaatgtactttttattgcatggtgtgaactaagttattgctgcataaatttgtaatatatcctgtttgtatttttttccaagtgtataatgttggtgtggagttttcatgacagaatatacacattttgtaaatctgtacttttttcaaatattgaatgccttatttttgaattctttagatttttaaattggagaaaagcacttaaagttttttatatatgaatattacatgtaaagctgttaaaatacataacttcagtgcaagagactttgtcacttatttccttatgtgtgtaggaggggttaataagtctctagctctccatctattgatagtttcatttacaatttcaaaagaacattcttatattttatcaaggaagtcttcaaatttgattctaaatagcgattataatctccaactttattttgaatgtacctctattagtttcaattgagtaattctagacataactggtttgactctgtccaactctgtatttaggccatttgttacagtttcttcatgcattacttactgttaaaactgtaccttttgcgatttcacagttggcacttctgccatgagcagagaactgatgcgacttgttttgctgcttggtagcactttaaaaaattttttgattaatgaagaaagtaaaaccataaacatttgccaaaaattcatgccccagtattagcaatgaattagttgcattggtttgagaaaggcacatattggagggaaatcttggtgtaacttaaatatttgaaaattacctttaatgcaatgcatatctgtttattctgggaaatgttttaatgccagggcctgctgagttgcttcttcttgtggagattttttttttaatctcctgagttgtataaaagttgtactgcatcttagtttactggataaatttaaaacacagtattgtagaaagctaatacaaaactatcctatgccttcaaatagtatagaaaatggaaaatatacaagtaaattctgttgaaccacctgtgtagtctctctagtagttaaaacagctattttagtaaccccaagagtttcttctcatatccataaaattggattacagtatggcaatatctacagcttctattcattatgcaacgtttaacattgattggataaatgcttataggctgggccaggtggctcccacctgtagtcccagcactttgggaggcaaaggcgggaggatcacttgaggccaggactttgagaccagccagggcaacataataagacttttctctactttaaattttttaaaaaattagttgggcatagtggcacttgcctgtagtctcagctacttaggaggctgaggtggcagaatagcttatgcctaggaggttgaggctgcagtgagctgtgattatgccattgcactccagcctgggtgacagagcaataccctgtctttaaaaataaaagctattacttggcaaa

SEQ ID NO: 137515 - protein, 147 aa, Artificial Sequence
  derived and/or modified sequence
MALKRIQKELSDLQRDPPAHCSAGPVGDDLFHWQATIMGPPDSAYQGGVFFLTVHFPTDYPFKPPKIAFTTKIYHPNINSNGSICLDILRSQWSPALTVSKVLLSICSLLCDPNPDDPLVPDIAQIYKSDKEKYNRHAREWTQKYAM

SEQ ID NO: 137516 - DNA, 444 bp, Artificial Sequence
  derived and/or modified sequence
atggccctgaagagaatccagaaggagctgagcgacctgcagagagacccccccgcccactgcagcgccggccccgtgggcgacgacctgttccactggcaggccaccatcatgggcccccccgacagcgcctaccagggcggcgtgttcttcctgaccgtgcacttccccaccgactaccccttcaagccccccaagatcgccttcaccaccaagatctaccaccccaacatcaacagcaacggcagcatctgcctggacatcctgagaagccagtggagccccgccctgaccgtgagcaaggtgctgctgagcatctgcagcctgctgtgcgaccccaaccccgacgaccccctggtgcccgacatcgcccagatctacaagagcgacaaggagaagtacaacagacacgccagagagtggacccagaagtacgccatgtag

SEQ ID NO: 137517 - DNA, 444 bp, Artificial Sequence
  derived and/or modified sequence
atggcgttgaagagaatccagaaggagctttcagacctgcaacgggatccgcccgcccactgctctgcgggccctgttggcgacgacttgtttcactggcaggccacaatcatggggccgcccgatagcgcttaccaggggggagtgtttttcctgaccgtacattttcccacagattatcctttcaaacccccaaaaatagctttcaccacgaaaatataccatccgaatatcaacagcaacggaagcatatgtctggacatcctccgaagtcagtggtccccagctctgaccgtttctaaagtgctactcagtatctgctccctgctttgcgaccccaaccccgacgatcccctagttccagatatagcacagatttacaagtccgacaaggagaaatataatcgccacgcccgggagtggacacagaaatacgctatgtag

SEQ ID NO: 137518 - DNA, 444 bp, Artificial Sequence
  derived and/or modified sequence
atggccctgaagaggatccagaaggagctgagtgacctgcagagggaccccccagcccactgcagcgctggccctgtgggagatgacctcttccactggcaggccaccatcatgggccccccagattctgcctaccagggcggcgtcttcttcctgactgtgcacttccccacagactaccccttcaagccacccaagatcgccttcaccaccaagatctaccaccccaacatcaacagcaatggcagcatctgcctggacatcctgcggagccagtggagccctgccctgactgtgtccaaggtgctgctgagcatctgcagcctgctgtgtgaccccaacccagatgaccccctggtgcctgacatcgcccagatctacaagagtgacaaggagaagtacaacagacatgcccgggagtggacccagaagtatgccatgtag

SEQ ID NO: 137519 - DNA, 444 bp, Artificial Sequence
  derived and/or modified sequence
atggccctgaagcggatccagaaggagctgagcgacctgcagcgggatccgcccgctcactgctccgcaggccctgtgggagacgatttatttcactggcaggctacaattatgggaccccccgattcagcatatcagggcggcgtcttttttttaacagtccacttcccgacagattacccattcaaaccacctaaaatagccttcaccaccaagatttatcatcccaacataaactcaaatggtagcatatgccttgacatcctcagaagtcagtggtcacctgccttgactgtcagcaaggtcctgttgtccatttgctccctcctctgtgaccccaaccctgatgaccctctggtgcctgatattgcacagatatacaagagcgacaaggagaaatacaaccggcacgcacgagaatggacccaaaagtatgccatgtag

SEQ ID NO: 137520 - DNA, 444 bp, Artificial Sequence
  derived and/or modified sequence
atggccctcaaaaggatccagaaagagctgtccgatctgcagagggacccaccggcacactgcagcgccggaccagtgggcgatgatctttttcattggcaagctactatcatgggccctccagacagcgcttatcagggcggagtgttcttcctgacagtccactttccaacggattacccattcaaacccccaaagatcgcctttacaacgaaaatttaccatccgaacatcaactctaatggttctatctgccttgacatactccgcagccagtggagcccagccctgacagtttcaaaagtgctgctatcgatttgtagcttgttgtgcgacccaaacccggacgatcccctggtacctgacatcgcccagatctacaaatcagacaaggagaagtataatcggcacgcccgtgagtggacacaaaaatacgccatgtag

SEQ ID NO: 137521 - DNA, 1549 bp, Artificial Sequence
  derived and/or modified sequence
aaacaaaagagtctcgccggcgtccccgcccgcacactcgcgcacactcgcgctcgggcgcacacggagcagggaccggcgcccggagcgagccagggagcggctaaccggggacccaccgcgcggagccagcctagctgccagcgagcccaacccgcgacgacccacgcccctgagccccgcagccgacccctgccggccggtgtccccaccgccatccctgacccatggcgctgaagaggattcagaaagaattgagtgatctacagcgcgatccacctgctcactgttcagctggacctgtgggagatgacttgttccactggcaagccactattatggggcctcctgatagcgcatatcaaggtggagtcttctttctcactgtacattttccgacagattatccttttaaaccaccaaagattgctttcacaacaaaaatttaccatccaaacataaacagtaatggaagtatttgtctcgatattctgaggtcacaatggtcaccagctctgactgtatcaaaagttttattgtccatatgttctctactttgtgatcctaatccagatgaccccttagtaccagatattgcacaaatctataaatcagacaaagaaaaatacaacagacatgcaagagaatggactcagaaatatgcaatgtaaaaatcaaaaacattttcatatataccagagtactgtaaaatctaggtttttttcaacattagcagtaaattgagcactgtttactgtttcattgtaccatgaaaccatttgatttttacccattttaaatgtgtttctgaagcaagacaaaacaaacttccaaaaatacccttaagactgtgatgagagcatttatcattttgtatgcattgagaaagacatttattatggtttttaagatacttggacatctgcatcttcagcttacaagatctacaatgcagctgaaaagcaaccaaattattttttgctgaaactagatgtttttacatgagaaatactgtatgtgttgtctaagatgtcagttttataaatctgtattcagatttcattctttgttagctcactttataatttgtatttttttactgtatagactaaatatattctatttacatgtatgtcaactcattacttttttcctgtgaacagtattgaaaaaccccaacggctgataattaagtgaattaactgtgtctcccttgtcttaggatattctgtagattgattgcagatttcttaaatctgaaatgatctttacactgtaattctcagcatactgattatggagaaacacttgttttgattttgttatacttgacttaactttattgcaatgtgaattaattgcactgctaagtaggaagatgtgtaacttttatttgttgctattcacatttgaattttttcctgtataggcaatattatattgacaccttttacagatcttactgtagctttttccatataaataaaatgctttttctactatttgtcttgattacttaaaaaaataaaaatataagtaaggatcaaaa

SEQ ID NO: 137522 - protein, 118 aa, Artificial Sequence
  derived and/or modified sequence
MFHWQATIMGPNDSPYQGGVFFLTIHFPTDYPFKPPKVAFTTRIYHPNINSNGSICLDILRSQWSPALTISKVLLSICSLLCDPNPDDPLVPEIARIYKTDREKYNRIAREWTQKYAM

SEQ ID NO: 137523 - protein, 147 aa, Artificial Sequence
  derived and/or modified sequence
MALKRIHKELNDLARDPPAQCSAGPVGDDMFHWQATIMGPNDSPYQGGVFFLTIHFPTDYPFKPPKVAFTTRIYHPNINSNGSICLDILRSQWSPALTISKVLLSICSLLCDPNPDDPLVPEIARIYKTDREKYNRIAREWTQKYAM

SEQ ID NO: 137524 - DNA, 444 bp, Artificial Sequence
  derived and/or modified sequence
atggccctgaagagaatccacaaggagctgaacgacctggccagagacccccccgcccagtgcagcgccggccccgtgggcgacgacatgttccactggcaggccaccatcatgggccccaacgacagcccctaccagggcggcgtgttcttcctgaccatccacttccccaccgactaccccttcaagccccccaaggtggccttcaccaccagaatctaccaccccaacatcaacagcaacggcagcatctgcctggacatcctgagaagccagtggagccccgccctgaccatcagcaaggtgctgctgagcatctgcagcctgctgtgcgaccccaaccccgacgaccccctggtgcccgagatcgccagaatctacaagaccgacagagagaagtacaacagaatcgccagagagtggacccagaagtacgccatgtag

SEQ ID NO: 137525 - DNA, 444 bp, Artificial Sequence
  derived and/or modified sequence
atggctctgaagcggattcacaaagagctgaatgatctcgccagagacccaccagctcagtgctctgccggtcccgtaggcgatgatatgttccattggcaggctaccatcatgggaccaaatgattccccttatcaaggcggagtcttcttcctgactattcattttccgaccgattacccatttaaaccccctaaagtagccttcacgacccggatttatcacccaaacattaactcaaacgggtcaatatgcctggacatacttcgctcacagtggagccccgcgcttacgatctcgaaggtcttgctgtccatttgcagcctgctctgtgaccctaatcccgacgatccgctggtgccggaaatcgcaaggatttataagaccgatcgcgagaaatacaatcgtatcgcccgcgagtggacccagaaatacgcaatgtag

SEQ ID NO: 137526 - DNA, 444 bp, Artificial Sequence
  derived and/or modified sequence
atggcacttaagcgtatacacaaggaactcaacgacctcgcgcgggaccccccggcacagtgcagtgccggtcccgtaggtgatgatatgttccattggcaggcgactatcatgggacccaacgactccccttatcaggggggggtgttctttctgaccattcacttccccaccgattacccctttaagcctcctaaagtggctttcacaacaaggatatatcatcccaatattaactccaatggatccatttgtctcgatatcctcaggtcccagtggtctcctgccttaaccataagtaaagtgctgctgtcaatatgttccctactgtgcgatcccaatcccgatgatcctcttgtcccggaaatagctcggatctacaagacagatagggagaagtataatcgtattgccagagaatggacacaaaaatatgctatgtag

SEQ ID NO: 137527 - DNA, 444 bp, Artificial Sequence
  derived and/or modified sequence
atggccctgaagaggatccacaaggagctgaatgacctggcccgggaccccccagcccagtgcagcgctggccctgtgggagatgacatgttccactggcaggccaccatcatgggccccaatgacagcccctaccagggcggcgtcttcttcctgaccatccacttccccacagactaccccttcaagccacccaaggtggccttcaccacccgcatctaccaccccaacatcaacagcaatggcagcatctgcctggacatcctgcggagccagtggagccctgccctgaccatcagcaaggtgctgctgagcatctgcagcctgctgtgtgaccccaacccagatgaccccctggtgcctgagatcgcccgcatctacaagacagaccgggagaagtacaacagaattgcccgggagtggacccagaagtatgccatgtag

SEQ ID NO: 137528 - DNA, 444 bp, Artificial Sequence
  derived and/or modified sequence
atggccctgaagcggatccacaaggagctgaacgacctggcccgggacccgccagctcaatgttccgccgggccagtgggagatgacatgtttcactggcaagctactattatggggccaaacgattctccctaccagggcggcgtgttttttctgaccatccattttcccactgattaccccttcaagccacccaaggtcgcctttaccacccgcatttaccatccaaacataaactccaacgggtccatctgcttggacatcctgagatcccagtggagtcccgcattaacgatctcaaaagttctcctaagcatttgcagcctactgtgtgatcccaatcctgacgatccactcgtgcccgagattgccagaatttacaagacagatagagagaaatataaccgaattgcgagggaatggacacagaagtatgccatgtag

SEQ ID NO: 137529 - DNA, 444 bp, Artificial Sequence
  derived and/or modified sequence
atggccctgaagcggatccacaaggagctgaacgacctggcccgggacccacctgcacagtgttccgctggccccgttggagacgatatgtttcactggcaagcaacaattatggggcccaatgactctccataccagggcggagtattcttcctaactatccatttccccacagattatcccttcaagcccccgaaagtggcatttaccacccgaatctaccatcctaatataaacagcaacggttcaatctgtctggatatcctccggtctcaatggtctcccgccctaactattagcaaggtgttgctgtccatttgtagtctgctgtgtgaccctaatcctgacgacccccttgtgcctgaaatcgcccgcatctacaagacggaccgggaaaaatacaaccgaattgctagagagtggacgcagaagtatgcaatgtag

SEQ ID NO: 137530 - DNA, 444 bp, Artificial Sequence
  derived and/or modified sequence
atggccttaaagcgtattcataaagagcttaatgacctcgcaagagatcccccagcgcaatgctctgctggccctgtgggggatgacatgttccactggcaggctactatcatgggtccaaatgactcgccataccaggggggagtgtttttcctgaccattcatttccctaccgactatccctttaagccccctaaggttgcttttactacacggatctaccaccccaacattaattcgaatggcagtatttgtctggatatcctgagatcacagtggtcacccgcacttaccatctccaaagtcttgctgagtatttgtagccttctgtgcgatccgaaccctgacgacccattggttccagaaattgctcggatctataaaacagatcgcgaaaagtacaatcgcatagcacgcgaatggacacagaaatatgctatgtag

SEQ ID NO: 137531 - DNA, 444 bp, Artificial Sequence
  derived and/or modified sequence
atggcattgaaacggattcacaaggaactgaatgatctggctcgggaccctccagcccagtgtagcgcaggtccggtgggggacgacatgttccattggcaggcaactattatgggacccaacgactccccatatcagggaggtgtgttctttcttacaatacacttcccaactgattatcctttcaagcctcctaaggtcgccttcaccactaggatttatcaccctaacattaattctaatggctccatctgtctcgacattctgagatctcaatggagcccagccctgacgattagtaaggtattgttatcaatctgcagcctcctctgtgaccctaaccccgacgatcccttggtaccggaaatagcacgaatttacaaaaccgaccgggagaagtataatcgtatcgctcgcgaatggactcaaaaatatgccatgtag

SEQ ID NO: 137532 - DNA, 2864 bp, Artificial Sequence
  derived and/or modified sequence
gcttcgcagcgtcacgccctccggggccgtggcggcgacggcggtgcgtagcttactcacaggggcggcccgtatccctccgccgccggcgcggctcggccctccctcccctggcccgccaatccccgcgcctcccgacctgcccctcggtcgggcccaccccgtgctccgacggccccaccccggcggcgcagcccgcccgcccgcgcgtccctcggtccacctgcagcagggaggaagacaggcaatccctccggctgtccgaccaagagaggccggccgagcccgaggcttgggcttttgctttctggcggagggatctgcggcggtttaggaggcggcgctgatcctgggaggaagaggcagctacggcggcggcggcggtggcggctagggcggcggcgaataaaggggccgccgccgggtgatgcggtgaccgctgcggcaggcccaggagctgagtgggccccggccctcagcccgtcccgccggacccgctttcctcaactctccatcttctcctgccgaccgagatcgccgaggcggcctcaggctccctagccccttccccgtcccttccccgcccccgtccccgccccgggggccgccgccacccgcctcccaccatggctctgaagagaatccacaagctccctccacaaaaccgcctgagctcgggctgacagaggaagccgttttgcccgatccacaagtatatcctgagttcacttacctcttgggtggcagcacacatcggtccaccctgcttgtccagaaactgttaagagttggaagttcagaagaaaaaaaaaaggaattgaatgatctggcacgggaccctccagcacagtgttcagcaggtcctgttggagatgatatgttccattggcaagctacaataatggggccaaatgacagtccctatcagggtggagtatttttcttgacaattcatttcccaacagattaccccttcaaaccacctaaggttgcatttacaacaagaatttatcatccaaatattaacagtaatggcagcatttgtcttgatattctacgatcacagtggtctccagcactaactatttcaaaagtactcttgtccatctgttctctgttgtgtgatcccaatccagatgatcctttagtgcctgagattgctcggatctacaaaacagatagagaaaagtacaacagaatagctcgggaatggactcagaagtatgcgatgtaattaaagaaattattggataacctctacaaataaagataggggaactctgaaagagaaagtccttttgatttccatttgactgctttctatgagcccacgcctcatcttcccctgtgcacatgtttacctgatacagcagtgctgcgtgttgtacatacttggaacaacaaactagaaatactgtacttctgtaccaacattgcctcctagcagagaagtgtgtgtgtgacaagccagttctacaggcattacctaggtgtgagactaaaagcttttcttattgacttaaatttggataacagcaaggtgtgaggggggtggtgggtatggtgtgtgcttggatgggaaagaaaaggctccactcacctataggagattatttttaagtggaatccatttaaactcaaaacagttatgaaaagcaaggtgaagaacatgaagctgtgtctgtattcattttattccgaaggagctacgtcttaggtgaaagttatgaccaaccagattaaactctacccacatcctgcattttaaggtctaagtttaactggtcaacatttaaatggattggagctattagtacatcaagtgtgatgggctttgttcccaactcttttacatctccctaccccttcaacctttggcctttcagcccttctttctctcttccatattctttggtttgtatgtggtttctcagttaatacatagctaatagctcttatttttcttatgtttttaaccgcttaggtctatttggatgtaagggtgaaaattcatttgatggaaatacttgtgtatatttaaagacccaattgctcctctggagcttgtactttcaagaatgattaatctgtgtaataaactggttactacagtcattacatataattttgtgtgaataggctttttcatttttaagaagtttgtctagctgagattagtggtggattttctcccacttctgaaatgttcatttatactggttgcattttaagatcatgaaacaattccagttacattgtaaaaaggatatcttacgagtaattttattgaacaagttagaggcataagcttaagagcatttccatgaaacaacacatgcagcattccaggaacttgattgttaaattcaataagaaatttgctttattaatgaaactaagctgcatttcatcaaaaccttgtgacattcccttggtacataggacataaaacacagaggcattgctatttggtaagttaagcttctgtgattgtaattataaaagagcaacattgaccaaacctgggaaacaagagcacagtcttgtttggagagtctacataattactttgcactaacatttgcaggatgttcacacaattttaaattgtactgtatgtggctttttgaagtcttcccttgaccctagtaaaatatagcttgaaacttgtaaacaactgtgtttgccagaaacatcattcatgtgaactaggcaagttaccttttttccccccttcttttcctaattgtaaactaggccaacctgaaagccatggctgatgctctagccatcaggttctttcaaatgcatctttacactcttgcacaaaagttaaggaataaatgtccactgcttttggtttt

SEQ ID NO: 137533 - DNA, 2702 bp, Artificial Sequence
  derived and/or modified sequence
gcttcgcagcgtcacgccctccggggccgtggcggcgacggcggtgcgtagcttactcacaggggcggcccgtatccctccgccgccggcgcggctcggccctccctcccctggcccgccaatccccgcgcctcccgacctgcccctcggtcgggcccaccccgtgctccgacggccccaccccggcggcgcagcccgcccgcccgcgcgtccctcggtccacctgcagcagggaggaagacaggcaatccctccggctgtccgaccaagagaggccggccgagcccgaggcttgggcttttgctttctggcggagggatctgcggcggtttaggaggcggcgctgatcctgggaggaagaggcagctacggcggcggcggcggtggcggctagggcggcggcgaataaaggggccgccgccgggtgatgcggtgaccgctgcggcaggcccaggagctgagtgggccccggccctcagcccgtcccgccggacccgctttcctcaactctccatcttctcctgccgaccgagatcgccgaggcggcctcaggctccctagccccttccccgtcccttccccgcccccgtccccgccccgggggccgccgccacccgcctcccaccatggctctgaagagaatccacaaggaattgaatgatctggcacgggaccctccagcacagtgttcagcaggtcctgttggagatgatatgttccattggcaagctacaataatggggccaaatgacagtccctatcagggtggagtatttttcttgacaattcatttcccaacagattaccccttcaaaccacctaaggttgcatttacaacaagaatttatcatccaaatattaacagtaatggcagcatttgtcttgatattctacgatcacagtggtctccagcactaactatttcaaaagtactcttgtccatctgttctctgttgtgtgatcccaatccagatgatcctttagtgcctgagattgctcggatctacaaaacagatagagaaaagtacaacagaatagctcgggaatggactcagaagtatgcgatgtaattaaagaaattattggataacctctacaaataaagataggggaactctgaaagagaaagtccttttgatttccatttgactgctttctatgagcccacgcctcatcttcccctgtgcacatgtttacctgatacagcagtgctgcgtgttgtacatacttggaacaacaaactagaaatactgtacttctgtaccaacattgcctcctagcagagaagtgtgtgtgtgacaagccagttctacaggcattacctaggtgtgagactaaaagcttttcttattgacttaaatttggataacagcaaggtgtgaggggggtggtgggtatggtgtgtgcttggatgggaaagaaaaggctccactcacctataggagattatttttaagtggaatccatttaaactcaaaacagttatgaaaagcaaggtgaagaacatgaagctgtgtctgtattcattttattccgaaggagctacgtcttaggtgaaagttatgaccaaccagattaaactctacccacatcctgcattttaaggtctaagtttaactggtcaacatttaaatggattggagctattagtacatcaagtgtgatgggctttgttcccaactcttttacatctccctaccccttcaacctttggcctttcagcccttctttctctcttccatattctttggtttgtatgtggtttctcagttaatacatagctaatagctcttatttttcttatgtttttaaccgcttaggtctatttggatgtaagggtgaaaattcatttgatggaaatacttgtgtatatttaaagacccaattgctcctctggagcttgtactttcaagaatgattaatctgtgtaataaactggttactacagtcattacatataattttgtgtgaataggctttttcatttttaagaagtttgtctagctgagattagtggtggattttctcccacttctgaaatgttcatttatactggttgcattttaagatcatgaaacaattccagttacattgtaaaaaggatatcttacgagtaattttattgaacaagttagaggcataagcttaagagcatttccatgaaacaacacatgcagcattccaggaacttgattgttaaattcaataagaaatttgctttattaatgaaactaagctgcatttcatcaaaaccttgtgacattcccttggtacataggacataaaacacagaggcattgctatttggtaagttaagcttctgtgattgtaattataaaagagcaacattgaccaaacctgggaaacaagagcacagtcttgtttggagagtctacataattactttgcactaacatttgcaggatgttcacacaattttaaattgtactgtatgtggctttttgaagtcttcccttgaccctagtaaaatatagcttgaaacttgtaaacaactgtgtttgccagaaacatcattcatgtgaactaggcaagttaccttttttccccccttcttttcctaattgtaaactaggccaacctgaaagccatggctgatgctctagccatcaggttctttcaaatgcatctttacactcttgcacaaaagttaaggaataaatgtccactgcttttggttttaa

SEQ ID NO: 137534 - DNA, 901 bp, Artificial Sequence
  derived and/or modified sequence
gccccttccccgtcccttccccgcccccgtccccgccccgggggccgccgccacccgcctcccaccatggctctgaagagaatccacaaggaattgaatgatctggcacgggaccctccagcacagtgttcagcaggtcctgttggagatgatatgttccattggcaagctacaataatggggccaaatgacagtccctatcagggtggagtatttttcttgacaattcatttcccaacagattaccccttcaaaccacctaaggttgcatttacaacaagaatttatcatccaaatattaacagtaatggcagcatttgtcttgatattctacgatcacagtggtctccagcactaactatttcaaaagtactcttgtccatctgttctctgttgtgtgatcccaatccagatgatcctttagtgcctgagattgctcggatctacaaaacagatagagaaaagtacaacagaatagctcgggaatggactcagaagtatgcgatgtaattaaagaaattattggataacctctacaaataaagataggggaactctgaaagagaaagtccttttgatttccatttgactgctttctatgagcccacgcctcatcttcccctgtgcacatgtttacctgatacagcagtgctgcgtgttgtacatacttggaacaacaaactagaaatactgtacttctgtaccaacattgcctcctagcagagaagtgtgtgtgtgacaagccagttctacaggcattacctaggtctatttggatgtaagggtgaaaattcatttgatggaaatacttgtgtatatttaaagacccaattgctcctctggagcttgtactttcaagaatgattaatctgtgtaataaactggttactacagtcattac

SEQ ID NO: 137535 - DNA, 1113 bp, Artificial Sequence
  derived and/or modified sequence
agcgttcctccccggctgcccttccaggcccgcatggtgtggactcttagggcttctctccagtctgggactgccgctgcacttgagggccattgtcgggccaggatggcggggttggggccgaggggggcgctggggcgttgggcggccccttcgacagaggtcgaaagggcttctcgccccatttctgttccctcctcccacacctgccctagctccctccacaaaaccgcctgagctcgggctgacagaggaagccgttttgcccgatccacaagtatatcctgagttcacttacctcttgggtggcagcacacatcggtccaccctgcttgtccagaaactgttaagagttggaagttcagaagaaaaaaaaaaggaattgaatgatctggcacgggaccctccagcacagtgttcagcaggtcctgttggagatgatatgttccattggcaagctacaataatggggccaaatgacagtccctatcagggtggagtatttttcttgacaattcatttcccaacagattaccccttcaaaccacctaaggttgcatttacaacaagaatttatcatccaaatattaacagtaatggcagcatttgtcttgatattctacgatcacagtggtctccagcactaactatttcaaaagtactcttgtccatctgttctctgttgtgtgatcccaatccagatgatcctttagtgcctgagattgctcggatctacaaaacagatagagaaaagtacaacagaatagctcgggaatggactcagaagtatgcgatgtaattaaagaaattattggataacctctacaaataaagataggggaactctgaaagagaaagtccttttgatttccatttgactgctttctatgagcccacgcctcatcttcccctgtgcacatgtttacctgatacagcagtgctgcgtgttgtacatacttggaacaacaaactagaaatactgtacttctgtaccaacattgcctcctagcagagaagtgtgtgtgtgacaagccagttctacaggcattacctaggtgtgagactaaaagcttttcttattgacttaaatttggataacagcaaggtgtgagg

SEQ ID NO: 137536 - protein, 147 aa, Artificial Sequence
  derived and/or modified sequence
MALKRINKELSDLARDPPAQCSAGPVGDDMFHWQATIMGPNDSPYQGGVFFLTIHFPTDYPFKPPKVAFTTRIYHPNINSNGSICLDILRSQWSPALTISKVLLSICSLLCDPNPDDPLVPEIARIYKTDRDKYNRISREWTQKYAM

SEQ ID NO: 137537 - protein, 49 aa, Artificial Sequence
  derived and/or modified sequence
MALKRINKELSDLARDPPAQCSAGPVGDDMFHWQATIMGPNDSPYQGGV

SEQ ID NO: 137538 - DNA, 444 bp, Artificial Sequence
  derived and/or modified sequence
atggccctgaagagaatcaacaaggagctgagcgacctggccagagacccccccgcccagtgcagcgccggccccgtgggcgacgacatgttccactggcaggccaccatcatgggccccaacgacagcccctaccagggcggcgtgttcttcctgaccatccacttccccaccgactaccccttcaagccccccaaggtggccttcaccaccagaatctaccaccccaacatcaacagcaacggcagcatctgcctggacatcctgagaagccagtggagccccgccctgaccatcagcaaggtgctgctgagcatctgcagcctgctgtgcgaccccaaccccgacgaccccctggtgcccgagatcgccagaatctacaagaccgacagagacaagtacaacagaatcagcagagagtggacccagaagtacgccatgtag

SEQ ID NO: 137539 - DNA, 237 bp, Artificial Sequence
  derived and/or modified sequence
atggccctgaagagaatcaacaaggagctgagcgacctggccagagacccccccgcccagtgcagcgccggccccgtgggcgacgacatgttccactggcaggccaccatcatgggccccaacgacagcccctaccagggcggcgtgttcttcctgaccatccacttccccaccgactaccccttcaagccccccaaggtggccttcaccaccagaatctaccaccccaacatctag

SEQ ID NO: 137540 - DNA, 291 bp, Artificial Sequence
  derived and/or modified sequence
atggccctgaagagaatcaacaaggagctgagcgacctggccagagacccccccgcccagtgcagcgccggccccgtgggcgacgacatgttccactggcaggccaccatcatgggccccaacgacagcccctaccagggcggcgtgttcttcctgaccatccacttccccaccgactaccccttcaagccccccaaggtggccttcaccaccagaatctaccaccccaacatcaacagcaacggcagcatctgcctggacatcctgagaagccagtggagccccgcctag

SEQ ID NO: 137541 - DNA, 150 bp, Artificial Sequence
  derived and/or modified sequence
atggccctgaagagaatcaacaaggagctgagcgacctggccagagacccccccgcccagtgcagcgccggccccgtgggcgacgacatgttccactggcaggccaccatcatgggccccaacgacagcccctaccagggcggcgtgtag

SEQ ID NO: 137542 - DNA, 444 bp, Artificial Sequence
  derived and/or modified sequence
atggcattgaagcgaattaacaaagagctcagcgatttggcgcgggacccccccgcccaatgctctgcaggacctgtgggcgacgacatgtttcactggcaggctaccattatgggccctaatgactctccttaccagggcggggtctttttcttgaccattcactttccgacggattatccattcaagccacccaaggtggctttcaccacacggatttatcatcccaacatcaatagcaacgggagcatttgtttggatatccttaggtcccaatggtcccctgcacttactatcagcaaagtcctactgagcatttgttcactgttgtgtgaccctaaccccgacgacccactcgttcccgagatcgcccgtatctataagactgatagagacaaatataatcggatcagcagggagtggactcaaaaatatgcgatgtag

SEQ ID NO: 137543 - DNA, 444 bp, Artificial Sequence
  derived and/or modified sequence
atggctctgaagagaatcaacaaggaactgagcgacctcgctagggaccccccggcccaatgttctgccggtccggtgggggacgacatgttccattggcaggcaacaatcatggggcccaacgactctccttaccagggcggagtcttcttccttacaatccacttcccaactgattacccttttaagccgcctaaggtcgccttcaccacccggatataccatcctaacattaatagtaacggatctatttgtttggatatcctgcgctctcagtggtccccggcactgaccatctccaaagttctcctgagcatatgctccctgttgtgtgaccctaatccagacgaccctctcgtacccgaaatagcccggatctacaaaaccgaccgggacaaatataatcggatctcccgggagtggactcagaagtatgccatgtag

SEQ ID NO: 137544 - DNA, 444 bp, Artificial Sequence
  derived and/or modified sequence
atggcactgaaacgtataaacaaggaactctccgacctagccagggaccctcccgctcaatgcagcgcaggtccggtgggcgatgacatgtttcactggcaagcgacgatcatgggacccaacgactcgccttaccagggaggggttttcttcctcactatacacttcccgacagactatccatttaagccaccaaaagttgcattcacaacacggatctaccaccccaacattaactcaaacggctcaatttgtctcgacatcctgcgaagtcagtggtcaccagcactgacgatctctaaggttctgctgtcaatctgctcactcctgtgtgaccccaacccagatgacccactagtgcctgaaatcgccaggatctataaaacagatagggataagtataaccggatctctcgggagtggacgcaaaaatatgcaatgtag

SEQ ID NO: 137545 - DNA, 444 bp, Artificial Sequence
  derived and/or modified sequence
atggcgctcaagcgcatcaacaaagagctgtcagacctcgcaagggacccccccgcccagtgcagcgctgggccggtcggcgatgacatgtttcattggcaagccaccatcatgggacctaatgactccccctaccaaggaggggttttttttctcactattcatttccctacagactaccccttcaaacccccgaaggttgcctttacaacgcgcatttaccacccaaatattaattccaatgggtctatttgtctcgacatcttacgttcccagtggtctcccgcactgaccatttcaaaggtactgcttagcatttgtagcctcctctgcgatccaaatccagacgacccattggtgcccgaaatcgcaagaatctataaaacggacagggacaaatacaaccgtattagccgagagtggacgcagaaatatgctatgtag

SEQ ID NO: 137546 - DNA, 444 bp, Artificial Sequence
  derived and/or modified sequence
atggccttaaaacgaataaataaagaactcagcgacctcgcccgcgaccctcccgcgcagtgtagcgccggaccggttggtgatgacatgttccactggcaggctactataatgggtcccaatgatagcccctaccaggggggagtgtttttcttaacaatccatttccccactgattacccatttaagccacccaaagtcgctttcactacccgcatctaccaccctaatattaattcaaacggaagcatctgcctcgacattctgcgctcccagtggtcgcctgccctgaccatctcaaaggtactactgtccatctgtagtctgctgtgcgacccaaatccagatgatcctctggtgcctgagatcgcccgaatttacaaaacagacagagacaagtataacaggatctcgcgggagtggacacagaaatacgcaatgtag

SEQ ID NO: 137547 - DNA, 444 bp, Artificial Sequence
  derived and/or modified sequence
atggcactcaagaggatcaacaaggaactctcagaccttgcgcgcgaccctccagcacagtgctccgccgggcccgttggggatgacatgtttcactggcaggctacaatcatggggcccaatgattccccataccagggaggagtgtttttcttaacaatccacttccctacagactatcccttcaaaccccctaaagttgcttttaccacccggatctaccaccccaatatcaacagcaatggtagcatctgcctggatatcctccgaagccagtggtccccagcactcacaatcagtaaagtcttgctctcaatctgcagcttactgtgtgacccaaaccccgacgatccgctggttcccgagatcgccaggatctataaaaccgacagagacaagtacaatagaatctccagagaatggactcagaaatacgccatgtag

SEQ ID NO: 137548 - DNA, 444 bp, Artificial Sequence
  derived and/or modified sequence
atggcactcaagcggatcaataaggagctgtcggacctggcccgcgaccccccggcacagtgcagcgccgggccggtgggagacgacatgtttcactggcaggctacaatcatggggcctaatgattctccataccagggcggcgtgtttttcctgacaatccatttcccaaccgattacccattcaagcccccgaaagtggcatttacaactcgcatctaccatcctaacataaactccaacggcagcatctgcctcgatatcctgcggtctcaatggtcaccagccctgacaatctctaaggtattactaagtatttgctcactgctctgtgaccccaatcctgacgatccacttgtccccgaaattgctcggatctacaagactgatcgcgacaagtacaatcgaatttcacgagaatggacgcagaagtacgctatgtag

SEQ ID NO: 137549 - DNA, 237 bp, Artificial Sequence
  derived and/or modified sequence
atggccttgaaacgcatcaacaaggaactatccgacttggcgagggacccccccgcgcagtgttcagcgggcccagtgggggacgacatgtttcattggcaggccacaattatgggccctaacgatagcccctaccaggggggagtcttttttctgactatccattttcccactgactatccgttcaagcctcctaaagtggcattcactacaagaatttatcatcccaatatttag

SEQ ID NO: 137550 - DNA, 291 bp, Artificial Sequence
  derived and/or modified sequence
atggcactgaagcggatcaacaaggagctgagcgaccttgcccgcgacccccctgcccaatgttctgctggccctgtgggggacgatatgtttcattggcaagccacaatcatgggcccgaacgactctccataccaagggggcgtgtttttcctgacaattcactttcccactgattatccgtttaaaccccccaaggtcgcctttactacccggatctatcaccccaatattaattctaatggttcaatctgcttagacatactgcgatcccagtggtctcccgcatag

SEQ ID NO: 137551 - DNA, 150 bp, Artificial Sequence
  derived and/or modified sequence
atggctctgaaaagaatcaacaaggagctgagtgacctggcacgggatccgcctgcccagtgcagcgctggcccggtgggcgacgacatgttccactggcaagcaactattatgggcccgaacgactccccctatcagggtggagtttag

SEQ ID NO: 137552 - DNA, 444 bp, Artificial Sequence
  derived and/or modified sequence
atggccctgaagaggatcaacaaggagctgagtgacctggcccgggaccccccagcccagtgcagcgctggccctgtgggagatgacatgttccactggcaggccaccatcatgggccccaatgacagcccctaccagggcggcgtcttcttcctgaccatccacttccccacagactaccccttcaagccacccaaggtggccttcaccacccgcatctaccaccccaacatcaacagcaatggcagcatctgcctggacatcctgcggagccagtggagccctgccctgaccatcagcaaggtgctgctgagcatctgcagcctgctgtgtgaccccaacccagatgaccccctggtgcctgagatcgcccgcatctacaagacagaccgggacaagtacaaccgcatcagccgggagtggacccagaagtatgccatgtag

SEQ ID NO: 137553 - DNA, 237 bp, Artificial Sequence
  derived and/or modified sequence
atggccctgaagaggatcaacaaggagctgagtgacctggcccgggaccccccagcccagtgcagcgctggccctgtgggagatgacatgttccactggcaggccaccatcatgggccccaatgacagcccctaccagggcggcgtcttcttcctgaccatccacttccccacagactaccccttcaagccacccaaggtggccttcaccacccgcatctaccaccccaacatctag

SEQ ID NO: 137554 - DNA, 291 bp, Artificial Sequence
  derived and/or modified sequence
atggccctgaagaggatcaacaaggagctgagtgacctggcccgggaccccccagcccagtgcagcgctggccctgtgggagatgacatgttccactggcaggccaccatcatgggccccaatgacagcccctaccagggcggcgtcttcttcctgaccatccacttccccacagactaccccttcaagccacccaaggtggccttcaccacccgcatctaccaccccaacatcaacagcaatggcagcatctgcctggacatcctgcggagccagtggagccctgcctag

SEQ ID NO: 137555 - DNA, 150 bp, Artificial Sequence
  derived and/or modified sequence
atggccctgaagaggatcaacaaggagctgagtgacctggcccgggaccccccagcccagtgcagcgctggccctgtgggagatgacatgttccactggcaggccaccatcatgggccccaatgacagcccctaccagggcggcgtgtag

SEQ ID NO: 137556 - DNA, 444 bp, Artificial Sequence
  derived and/or modified sequence
atggccctgaagcggatcaacaaggagctgagcgacctggcccgggatccacctgctcagtgttccgccggtcctgtgggagatgatatgttccactggcaagcaaccattatggggccaaacgattcgccataccagggaggcgtgttcttcctcaccatacactttcccactgattacccctttaagccgccgaaggtcgcctttaccacccgcatctaccaccctaacatcaatagcaacggatcaatttgcctcgatattttgagaagccaatggtcacctgccctgactatctcgaaggtcctcctctccatttgtagcttgttatgcgacccaaatcctgatgatcccctcgttccggagatcgccaggatctacaagactgatagggataaatacaacaggatcagtcgagagtggacccagaaatatgctatgtag

SEQ ID NO: 137557 - DNA, 444 bp, Artificial Sequence
  derived and/or modified sequence
atggccctgaagcggatcaacaaggagctgagcgacctggcccgggaccctccagcccagtgttcagccggcccagtgggtgacgatatgttccattggcaagccacaatcatggggcctaatgactccccgtaccaaggaggggtgtttttcctgaccattcacttccccacggactacccgtttaagccaccaaaagtggcctttacaaccagaatctaccacccgaatatcaactctaatggttcaatttgcctcgacattcttaggtcgcaatggtccccagctttgaccatttcgaaagtgctacttagcatttgttcccttttatgtgaccctaaccctgatgaccctctggtacctgagatcgcgcggatatacaagaccgaccgcgacaaatataaccgcatcagtcgagaatggacgcagaaatacgcaatgtag

SEQ ID NO: 137558 - DNA, 444 bp, Artificial Sequence
  derived and/or modified sequence
atggccctgaagcggatcaacaaggagctgagcgacctggcccgggacccgccggctcagtgttccgcagggcccgttggcgacgacatgttccactggcaagcaacaatcatgggacccaacgattcaccctatcagggcggggtgttcttcctgaccatccatttccccacagattacccgtttaagccccctaaggtcgcatttaccacgcgcatttatcacccaaatattaactccaacggcagcatatgcctggacatactaaggagccagtggtctccggcgctgaccatttcgaaggtattgctgtcgatttgttcactcctttgtgacccaaatcctgatgatccactagtgcctgagatcgctaggatttacaaaactgaccgggacaaatacaacaggatcagccgggagtggacacagaagtacgctatgtag

SEQ ID NO: 137559 - DNA, 444 bp, Artificial Sequence
  derived and/or modified sequence
atggccctgaagcggatcaacaaggagctgagcgacctggcccgggatcctcccgcgcagtgcagtgccggccccgtgggggacgacatgtttcactggcaggctacaatcatggggcctaatgattctccataccagggcggcgtgtttttcctgacgatccactttccaacggactatccattcaaaccacccaaggtggccttcacaacccggatataccaccctaatataaatagcaatgggtctatctgcctcgatattctgaggagtcaatggtctcctgccctcaccatttccaaggtgctgctgagcatatgctctcttctgtgtgatccgaatccggacgatccactcgttcctgaaatcgcacggatttacaaaacagacagggacaagtacaaccggatcagtcgagagtggacacagaaatatgctatgtag

SEQ ID NO: 137560 - DNA, 444 bp, Artificial Sequence
  derived and/or modified sequence
atggccctgaagcggatcaacaaggagctgagcgacctggcccgggacccaccagcccagtgcagtgccgggccagtgggagatgacatgtttcattggcaggcaacaatcatggggcctaacgattctccctatcaaggcggagtgttctttctgaccatccactttcctacggactaccctttcaagccccctaaggtggccttcaccacacggatttatcaccccaatatcaatagcaatggttctatttgcttagacatcctgcggtcccaatggagccccgctctgactattagtaaggttctgcttagcatttgttctctgctctgtgatccgaacccggacgacccccttgttccagagatagctaggatctacaaaacagacagagataagtacaataggatttccagggagtggactcagaagtacgctatgtag

SEQ ID NO: 137561 - DNA, 444 bp, Artificial Sequence
  derived and/or modified sequence
atggccctgaagcggatcaacaaggagctgagcgacctggcccgggaccctccggcccagtgtagcgcaggtccggtcggagacgacatgttccattggcaggccacaatcatgggtcccaacgactccccctaccagggcggagtgttcttcctaaccatccatttccccaccgattatccctttaagcctcccaaggtggcgttcacaactagaatctatcaccccaatataaacagcaatgggtcaatctgcctcgacattttacgctcccagtggagtccagctctgacaatctccaaggtactgctaagcatctgtagtctcctttgcgatccgaatcccgatgaccccttggtgcctgaaatagccagaatttacaaaacagaccgtgacaagtacaatagaatctctcgggaatggacccagaagtatgcaatgtag

SEQ ID NO: 137562 - DNA, 444 bp, Artificial Sequence
  derived and/or modified sequence
atggccctgaagcggatcaacaaggagctgagcgacctggcccgggatccgcctgcacagtgttcagcaggtcccgtaggggacgatatgttccactggcaggcaaccatcatgggtcccaatgattcaccttatcagggcggggtattcttcctgactatacatttcccaacagactaccccttcaagcctccaaaggtggccttcacaacacgaatataccatcccaacatcaattcaaatggatcgatttgcctagacattctacggtcacagtggtcccccgctttaacaatctctaaggtccttctgagtatctgctcactcctctgcgatcccaaccctgacgatcccctggtaccagagatcgccaggatctacaaaactgacagggacaagtataatcgcatctcccgcgagtggacacagaagtacgccatgtag

SEQ ID NO: 137563 - DNA, 237 bp, Artificial Sequence
  derived and/or modified sequence
atggccctgaagcggatcaacaaggagctgagcgacctggcccgggaccctccggcccagtgttccgccggccccgtaggcgacgacatgtttcactggcaggctaccatcatgggtcccaatgatagcccctaccaaggtggtgtgttttttttaacaattcattttcctacagattacccctttaaaccccccaaggtggcctttactaccaggatttaccatcctaatatctag

SEQ ID NO: 137564 - DNA, 291 bp, Artificial Sequence
  derived and/or modified sequence
atggccctgaagcggatcaacaaggagctgagcgacctggcccgggatccacccgcccagtgttcggcagggcccgttggcgacgatatgttccattggcaagctaccataatgggcccgaacgattccccttaccagggaggcgtcttcttcctaaccatacacttccctactgactacccatttaaaccccccaaggtggccttcacaacaaggatctatcaccctaacatcaatagcaatggaagcatctgcttggatatactgagatctcaatggtcacctgcctag

SEQ ID NO: 137565 - DNA, 150 bp, Artificial Sequence
  derived and/or modified sequence
atggccctgaagcggatcaacaaggagctgagcgacctggcccgggacccacctgcccaatgttctgccggcccggttggagacgatatgttccactggcaggcaacaattatgggtcctaatgacagcccatatcagggtggcgtatag

SEQ ID NO: 137566 - DNA, 444 bp, Artificial Sequence
  derived and/or modified sequence
atggccctgaagcgcatcaacaaggaactgtcagatctggctagagatcctcccgctcaatgctctgctggaccggtcggagacgatatgtttcactggcaagccacaattatgggacccaatgatagcccctaccaggggggagtgttttttttgacgattcattttcccacagattaccccttcaaacccccaaaggtcgccttcactactagaatctaccaccccaacattaactctaatggctcaatttgcttagatatccttaggtcccagtggagtcccgctctgaccattagcaaggtccttctgtccatttgctcattgctgtgcgatccaaacccagacgacccgctggtaccggaaattgcaaggatctacaagaccgatcgggacaagtacaacaggatatctcgtgagtggacacaaaaatatgctatgtag

SEQ ID NO: 137567 - DNA, 444 bp, Artificial Sequence
  derived and/or modified sequence
atggccctgaagagaataaataaagagctgtccgatctggcaagagacccacctgcccagtgcagcgccggtccagttggagatgacatgtttcattggcaggctacaatcatgggcccaaacgatagcccataccaagggggtgtgttttttctgacgatacactttccaacagattatccctttaagcctcctaaggtggcttttacgacgcgcatctatcatccaaatattaatagtaatggtagcatctgcctcgacatccttcgatcgcagtggtcaccagccctgactatttccaaggtccttctcagtatctgctccctcctgtgcgaccccaatcctgacgatcccctggtcccagagattgccagaatttacaaaacagatcgggacaaatacaatcggatttccagggagtggacacagaaatatgctatgtag

SEQ ID NO: 137568 - DNA, 444 bp, Artificial Sequence
  derived and/or modified sequence
atggctctgaagaggattaataaggaattaagtgatcttgctcgcgacccacctgcccagtgttcagccggaccggtgggcgacgatatgtttcattggcaagctactatcatgggtcccaacgattccccctaccaaggcggagtctttttcctgactatccattttcccacggactacccttttaaaccacctaaggtggccttcacaacgaggatctatcatcctaacattaatagcaacggctcaatctgcctggatattcttcgctcccagtggtctcccgcactgacaattagtaaagtgttgctgtcaatctgctccctgctgtgcgaccccaatccagacgatcccctggtgcccgaaattgccagaatctacaaaacggacagagacaaatacaatcggatctcgcgagagtggacacaaaagtacgccatgtag

SEQ ID NO: 137569 - DNA, 444 bp, Artificial Sequence
  derived and/or modified sequence
atggccctgaagcggatcaacaaagagctcagcgacttagccagggatcctcccgctcagtgctccgccggacccgtcggcgacgacatgtttcactggcaagccacaatcatgggtcccaacgattcgccatatcagggtggagtattcttcttaacgattcactttcctactgattacccatttaagccgccaaaggtggctttcaccaccagaatataccaccccaatatcaatagtaacggttcaatctgtcttgatatcttgcggagccagtggagccctgcgctgactattagtaaagtgctcctgtccatttgcagtctgctgtgtgatcccaatcccgatgatcctctggtgcccgagattgccagaatttacaaaacagaccgtgacaagtataacaggatctccagggagtggactcagaaatacgccatgtag

SEQ ID NO: 137570 - DNA, 444 bp, Artificial Sequence
  derived and/or modified sequence
atggccctaaaaagaattaataaagaactgtccgacttagcaagggaccccccagcccagtgttccgccggacccgtcggagatgacatgtttcactggcaggctacaataatgggtcctaacgacagcccataccagggaggtgttttcttcctcaccatccacttccctacagattacccgttcaaacccccaaaagttgcatttacaacccgtatataccatccgaacatcaatagcaacggttctatttgccttgacatactgcgctctcagtggagccctgcgctgacgatctctaaggtccttctgtcaatttgcagcctgctgtgcgaccccaatcctgacgaccctcttgtgcccgaaattgccagaatctacaagacagaccgagataagtacaaccgtattagcagagagtggacccagaagtatgcgatgtag

SEQ ID NO: 137571 - DNA, 444 bp, Artificial Sequence
  derived and/or modified sequence
atggcactgaaaaggatcaacaaggaactttcagaccttgcccgagaccctcccgcacagtgttctgccggtccagtgggcgatgacatgtttcactggcaggcaacaatcatggggcctaacgacagtccctaccaaggcggagtgttcttcctcacaattcatttccccacggattaccctttcaaaccccctaaggttgcgtttaccactcgtatctaccacccaaacataaactctaacgggagcatctgcttagacattctccgctcacagtggtctcccgctcttaccatatccaaggtactcctgtccatctgttcgctgctttgcgacccaaaccctgacgaccccctcgtgcccgagatagcaagaatctataagaccgatagagacaaatacaacaggatcagccgcgagtggacccaaaagtatgcaatgtag

SEQ ID NO: 137572 - DNA, 444 bp, Artificial Sequence
  derived and/or modified sequence
atggcgctgaaaaggatcaacaaagaactttctgacttggcccgagatccgccagcgcagtgttccgcaggccctgtgggtgatgatatgttccactggcaggcgacaatcatgggccctaacgactcgccgtaccagggtggcgtgttttttttgaccatccactttcctacagattacccatttaagccgcctaaggtcgcatttaccactcgtatatatcaccccaatattaactcaaacgggtccatctgtctcgacatactgcgcagtcagtggagcccggctctcaccatatctaaggtgttgctcagtatctgcagcttactgtgcgaccccaacccggacgatccccttgtgcccgagattgccaggatatacaagaccgaccgggataagtataaccgcatttcccgtgaatggacacaaaaatacgccatgtag

SEQ ID NO: 137573 - DNA, 237 bp, Artificial Sequence
  derived and/or modified sequence
atggccctgaagcggattaataaggagctttcagacctggctcgagatccacccgctcagtgctctgccggtcccgttggggacgacatgttccattggcaagcgacgattatgggacctaatgattctccctatcagggaggcgttttctttctaactattcacttccccacagactatccgttcaagccaccaaaggtagcctttactacgaggatctatcatccgaacatctag

SEQ ID NO: 137574 - DNA, 291 bp, Artificial Sequence
  derived and/or modified sequence
atggccctaaagaggattaataaggaactcagcgatctggccagggacccccctgctcagtgctcagcaggtccggtgggggatgacatgtttcactggcaagcgaccatcatgggaccaaatgacagtccctaccagggcggagtattttttttgaccattcactttccaacagactatccttttaaacccccaaaggtggcatttacaaccagaatttatcatccgaacattaattcaaatgggtccatctgcttggatattcttcggagtcaatggagcccagcttag

SEQ ID NO: 137575 - DNA, 150 bp, Artificial Sequence
  derived and/or modified sequence
atggccttaaagcgtattaacaaggagctgagcgatctagcccgtgacccgccagctcaatgcagcgccggtcctgtgggggatgatatgttccactggcaggcaactattatgggcccaaacgattctccctaccaagggggtgtgtag

SEQ ID NO: 137576 - DNA, 1087 bp, Artificial Sequence
  derived and/or modified sequence
gtagttccgtcagagcggacatcttgtggctgtgtcgtgcgcgtgagccccgtagggccggggaggcaccagctgccgcgcggggaggaggccgaggccgcagcttgagggaggccccggcccctctaggccgggaagttaaacttgtagccaccacctccgctcttcccgtcaccctcgcccccacttcgggccgaaagcacggtacagaggctgttggtggctttgccacgccaccccacccaccccggatcgcggctgtcttaagggacctggattcatcaggggctcttcggggcctgtgcgagtgctgatctgctccgtttttgcaaaaggcgcctgtgtctggcagagctggtgtgagacgagacaatcctgccccgccgccgggataatcaagagttttggccggacctttgagcatacaccgagagagtgaggagccagacgacaagcacacactatggcgctgaaacggattaataaggaacttagtgatttggcccgtgaccctccagcacaatgttctgcaggtccagttggggatgatatgtttcattggcaagccacaattatgggacctaatgacagcccatatcaaggcggtgtattctttttgacaattcattttcctacagactaccccttcaaaccacctaaggttgcatttacaacaagaatttatcatccaaatattaacagtaatggcagcatttgtctcgatattctaagatcacagtggtcgcctgctttaacaatttctaaagttcttttatccatttgttcactgctatgtgatccaaacccagatgaccccctagtgccagagattgcacggatctataaaacagacagagataagtacaacagaatatctcgggaatggactcagaagtatgccatgtgatgctaccttaaagtcagaataacctgcattatagctggaataaactttaaattactgttccttttttgattttcttatccggctgctcccctatcagacctcatcttttttaattttattttttgtttacctccctccattcattcacatgctcatctgagaagacttaagttcttccag

SEQ ID NO: 137577 - DNA, 896 bp, Artificial Sequence
  derived and/or modified sequence
gggaactggcgggtagcgaggccctcctcggaatctcgtgtgaaggtggccctcctcttgggcctttaacgtctgtagatgctggagaccagcagaaaggatactgtgtgcgatgagataagcatgtgagaatgctttctaaccgaaagtgcctttcaaaagcgcctgtgtctggcagagctggtgtgagacgagacaatcctgccccgccgccgggataatcaagagttttggccggacctttgagcatacaccgagagagtgaggagccagacgacaagcacacactatggcgctgaaacggattaataaggaacttagtgatttggcccgtgaccctccagcacaatgttctgcaggtccagttggggatgatatgtttcattggcaagccacaattatgggacctaatgacagcccatatcaaggcggtgtattctttttgacaattcattttcctacagactaccccttcaaaccacctaaggttgcatttacaacaagaatttatcatccaaatattaacagtaatggcagcatttgtctcgatattctaagatcacagtggtcgcctgctttaacaatttctaaagttcttttatccatttgttcactgctatgtgatccaaacccagatgaccccctagtgccagagattgcacggatctataaaacagacagagataagtacaacagaatatctcgggaatggactcagaagtatgccatgtgatgctaccttaaagtcagaataacctgcattatagctggaataaactttaaattactgttccttttttgattttcttatccggctgctcccctatcagacctcatcttttttaattttattttttgtttacctccctccattcattcacatgctcatctgagaa

SEQ ID NO: 137578 - DNA, 838 bp, Artificial Sequence
  derived and/or modified sequence
ctcgatgcttctctgagcctaagggtttccgccactcgttcaccctccccccagctcatgatcctcctccctcccccgccctcctggtccaatctccgatctgtttagtaagaaggcgcctgtgtctggcagagctggtgtgagacgagacaatcctgccccgccgccgggataatcaagagttttggccggacctttgagcatacaccgagagagtgaggagccagacgacaagcacacactatggcgctgaaacggattaataaggaacttagtgatttggcccgtgaccctccagcacaatgttctgcaggtccagttggggatgatatgtttcattggcaagccacaattatgggacctaatgacagcccatatcaaggcggtgtattctttttgacaattcattttcctacagactaccccttcaaaccacctaaggttgcatttacaacaagaatttatcatccaaatattaacagtaatggcagcatttgtctcgatattctaagatcacagtggtcgcctgctttaacaatttctaaagttcttttatccatttgttcactgctatgtgatccaaacccagatgaccccctagtgccagagattgcacggatctataaaacagacagagataagtacaacagaatatctcgggaatggactcagaagtatgccatgtgatgctaccttaaagtcagaataacctgcattatagctggaataaactttaaattactgttccttttttgattttcttatccggctgctcccctatcagacctcatcttttttaattttattttttgtttacctccctccattcattcacatg

SEQ ID NO: 137579 - DNA, 2368 bp, Artificial Sequence
  derived and/or modified sequence
accaagtgaggaaactgggggacgctgtggggaggggcgtggggctggatcgcgcagcggctgcttcctttaccttcctcccatggtctccttccggttctcgatgcttctctgagcctaagggtttccgccactcgttcaccctccccccagctcatgatcctcctccctcccccgccctcctggtccaatctccgatctgtttagtaagaaggtgctgttccgagaagaaggaaaagggcttgacacgtattcactcggccccggacgtgggaagcaagccgtctggcttcggcctcacatcggtcttgtgctcgggacggcggcgttggcggactgatccgcggcggtgaagaggcgcctgtgtctggcagagctggtgtgagacgagacaatcctgccccgccgccgggataatcaagagttttggccggacctttgagcatacaccgagagagtgaggagccagacgacaagcacacactatggcgctgaaacggattaataaggaacttagtgatttggcccgtgaccctccagcacaatgttctgcaggtccagttggggatgatatgtttcattggcaagccacaattatgggacctaatgacagcccatatcaaggcggtgtattctttttgacaattcattttcctacagactaccccttcaaaccacctaaggttgcatttacaacaagaatttatcatccaaatattaacagtaatggcagcatttgtctcgatattctaagatcacagtggtcgcctgctttaacaatttctaaagttcttttatccatttgttcactgctatgtgatccaaacccagatgaccccctagtgccagagattgcacggatctataaaacagacagagataagtacaacagaatatctcgggaatggactcagaagtatgccatgtgatgctaccttaaagtcagaataacctgcattatagctggaataaactttaaattactgttccttttttgattttcttatccggctgctcccctatcagacctcatcttttttaattttattttttgtttacctccctccattcattcacatgctcatctgagaagacttaagttcttccagctttggacaataactgcttttagaaactgtaaagtagttacaagagaacagttgcccaagactcagaatttttaaaaaaaaaaatggagcatgtgtattatgtggccaatgtcttcactctaacttggttatgagactaaaaccattcctcactgctctaacatgctgaagaaatcatctgagggggagggagatggatgctcagttgtcacatcaaaggatacagcattattctagcagcatccattcttgtttaagccttccactgttagagatttgaggttacatgatatgctttatgctcataactgatgtggctggagaattggtattgaatttatagcatcagcagaacagaaaatgtgatgtattttatgcatgtcaataaaggaatgacctgttcttgttctacagagaatggaaattggaagtcaaacaccctttgtattccaaaatagggtctcaaacattttgtaattttcatttaaattgttaggaggcttggagctattagttaatctatcttccaatacactgtttaatatagcactgaataaatgatgcaagttgtcaatggatgagtgatcaactaatagctctgctagtaattgatttatttttcttcaataaagttgcataaaccaatgagttagctgcctggattaatcagtatgggaaacaatcttttgtaaatgcaaagctgttttttgtatatactgttgggatttgcttcattgtttgacatcaaatgatgatgtaaagttcgaaagagtgaatattttgccatgttcagttaaagtgcacagtctgttacaggttgacacattgcttgacctgatttatgcagaattaataagctatttggatagtgtagctttaatgtgctgcacatgatactggcagccctagagttcatagatggacttttgggacccagcagttttgaaatgtgtttatggagtttaagaaatttattttccaggtgcagcccctgtctaactgaaatttctcttcaccttgtacacttgacagctgaaaaaaaacaacatgggagtaataatgggtcaaaatttgcaaaataaagtactgttttggtgtgggagttgtcatgaggctgtgttgaagtgacttatctatgtgggatattgagtatccattgaaatggatttgttcagccatttacattaatgagcatttaaatgcaacagatatcatttcaggtgacttaacatgaatgaataaaagtcaatgctattgga

SEQ ID NO: 137580 - DNA, 2227 bp, Artificial Sequence
  derived and/or modified sequence
ccaaccaccggcataagcattcaggggcgttgctttcctggcagtggcccgccccagttcgagccggtgccttactgcgtctcgcgagaacttatgcattttggaggcggaaccccgtcaggaaaagcgcacaaaactgctcttaagtcattgcagagctaccgcttcggttagccagccacgaagttctcgcgagagtcgtctcctcgataccaagcgcctgtgtctggcagagctggtgtgagacgagacaatcctgccccgccgccgggataatcaagagttttggccggacctttgagcatacaccgagagagtgaggagccagacgacaagcacacactatggcgctgaaacggattaataaggaacttagtgatttggcccgtgaccctccagcacaatgttctgcaggtccagttggggatgatatgtttcattggcaagccacaattatgggacctaatgacagcccatatcaaggcggtgtattctttttgacaattcattttcctacagactaccccttcaaaccacctaaggttgcatttacaacaagaatttatcatccaaatattaacagtaatggcagcatttgtctcgatattctaagatcacagtggtcgcctgctttaacaatttctaaagttcttttatccatttgttcactgctatgtgatccaaacccagatgaccccctagtgccagagattgcacggatctataaaacagacagagataagtacaacagaatatctcgggaatggactcagaagtatgccatgtgatgctaccttaaagtcagaataacctgcattatagctggaataaactttaaattactgttccttttttgattttcttatccggctgctcccctatcagacctcatcttttttaattttattttttgtttacctccctccattcattcacatgctcatctgagaagacttaagttcttccagctttggacaataactgcttttagaaactgtaaagtagttacaagagaacagttgcccaagactcagaatttttaaaaaaaaaaatggagcatgtgtattatgtggccaatgtcttcactctaacttggttatgagactaaaaccattcctcactgctctaacatgctgaagaaatcatctgagggggagggagatggatgctcagttgtcacatcaaaggatacagcattattctagcagcatccattcttgtttaagccttccactgttagagatttgaggttacatgatatgctttatgctcataactgatgtggctggagaattggtattgaatttatagcatcagcagaacagaaaatgtgatgtattttatgcatgtcaataaaggaatgacctgttcttgttctacagagaatggaaattggaagtcaaacaccctttgtattccaaaatagggtctcaaacattttgtaattttcatttaaattgttaggaggcttggagctattagttaatctatcttccaatacactgtttaatatagcactgaataaatgatgcaagttgtcaatggatgagtgatcaactaatagctctgctagtaattgatttatttttcttcaataaagttgcataaaccaatgagttagctgcctggattaatcagtatgggaaacaatcttttgtaaatgcaaagctgttttttgtatatactgttgggatttgcttcattgtttgacatcaaatgatgatgtaaagttcgaaagagtgaatattttgccatgttcagttaaagtgcacagtctgttacaggttgacacattgcttgacctgatttatgcagaattaataagctatttggatagtgtagctttaatgtgctgcacatgatactggcagccctagagttcatagatggacttttgggacccagcagttttgaaatgtgtttatggagtttaagaaatttattttccaggtgcagcccctgtctaactgaaatttctcttcaccttgtacacttgacagctgaaaaaaaacaacatgggagtaataatgggtcaaaatttgcaaaataaagtactgttttggtgtgggagttgtcatgaggctgtgttgaagtgacttatctatgtgggatattgagtatccattgaaatggatttgttcagccatttacattaatgagcatttaaatgcaacagatatcatttcaggtgacttaacatgaatgaataaaagtcaatgctattgga

SEQ ID NO: 137581 - DNA, 2575 bp, Artificial Sequence
  derived and/or modified sequence
accaagtgaggaaactgggggacgctgtggggaggggcgtggggctggatcgcgcagcggctgcttcctttaccttcctcccatggtctccttccggttctcgatgcttctctgagcctaagggtttccgccactcgttcaccctccccccagctcatgatcctcctccctcccccgccctcctggtccaatctccgatctgtttagtaagaaggtgctgttccgagaagaaggaaaagggcttgacacgtattcactcggccccggacgtgggaagcaagccgtctggcttcggcctcacatcggtcttgtgctcgggacggcggcgttggcggactgatccgcggcggtgaagagaggccgggaagttaaacttgtagccaccacctccgctcttcccgtcaccctcgcccccacttcgggccgaaagcacggtacagaggctgttggtggctttgccacgccaccccacccaccccggatcgcggctgtcttaagggacctggattcatcaggggctcttcggggcctgtgcgagtgctgatctgctccgtttttgcaaaaggcgcctgtgtctggcagagctggtgtgagacgagacaatcctgccccgccgccgggataatcaagagttttggccggacctttgagcatacaccgagagagtgaggagccagacgacaagcacacactatggcgctgaaacggattaataaggaacttagtgatttggcccgtgaccctccagcacaatgttctgcaggtccagttggggatgatatgtttcattggcaagccacaattatgggacctaatgacagcccatatcaaggcggtgtattctttttgacaattcattttcctacagactaccccttcaaaccacctaaggttgcatttacaacaagaatttatcatccaaatattaacagtaatggcagcatttgtctcgatattctaagatcacagtggtcgcctgctttaacaatttctaaagttcttttatccatttgttcactgctatgtgatccaaacccagatgaccccctagtgccagagattgcacggatctataaaacagacagagataagtacaacagaatatctcgggaatggactcagaagtatgccatgtgatgctaccttaaagtcagaataacctgcattatagctggaataaactttaaattactgttccttttttgattttcttatccggctgctcccctatcagacctcatcttttttaattttattttttgtttacctccctccattcattcacatgctcatctgagaagacttaagttcttccagctttggacaataactgcttttagaaactgtaaagtagttacaagagaacagttgcccaagactcagaatttttaaaaaaaaaaatggagcatgtgtattatgtggccaatgtcttcactctaacttggttatgagactaaaaccattcctcactgctctaacatgctgaagaaatcatctgagggggagggagatggatgctcagttgtcacatcaaaggatacagcattattctagcagcatccattcttgtttaagccttccactgttagagatttgaggttacatgatatgctttatgctcataactgatgtggctggagaattggtattgaatttatagcatcagcagaacagaaaatgtgatgtattttatgcatgtcaataaaggaatgacctgttcttgttctacagagaatggaaattggaagtcaaacaccctttgtattccaaaatagggtctcaaacattttgtaattttcatttaaattgttaggaggcttggagctattagttaatctatcttccaatacactgtttaatatagcactgaataaatgatgcaagttgtcaatggatgagtgatcaactaatagctctgctagtaattgatttatttttcttcaataaagttgcataaaccaatgagttagctgcctggattaatcagtatgggaaacaatcttttgtaaatgcaaagctgttttttgtatatactgttgggatttgcttcattgtttgacatcaaatgatgatgtaaagttcgaaagagtgaatattttgccatgttcagttaaagtgcacagtctgttacaggttgacacattgcttgacctgatttatgcagaattaataagctatttggatagtgtagctttaatgtgctgcacatgatactggcagccctagagttcatagatggacttttgggacccagcagttttgaaatgtgtttatggagtttaagaaatttattttccaggtgcagcccctgtctaactgaaatttctcttcaccttgtacacttgacagctgaaaaaaaacaacatgggagtaataatgggtcaaaatttgcaaaataaagtactgttttggtgtgggagttgtcatgaggctgtgttgaagtgacttatctatgtgggatattgagtatccattgaaatggatttgttcagccatttacattaatgagcatttaaatgcaacagatatcatttcaggtgacttaacatgaatgaataaaagtcaatgctattgg

SEQ ID NO: 137582 - DNA, 3990 bp, Artificial Sequence
  derived and/or modified sequence
gttcaccctccccccagctcatgatcctcctccctcccccgccctcctggtccaatctccgatctgtttagtaagaaggtgctgttccgagaagaaggaaaagggcttgacacgtattcactcggccccggacgtgggaagcaagccgtctggcttcggcctcacatcggtcttgtgctcgggacggcggcgttggcggactgatccgcggcggtgaagaggcaggaggagggggaggggcggagcgtggcagctggcagtagttccgtcagagcggacatcttgtggctgtgtcgtgcgcgtgagccccgtagggccggggaggcaccagctgccgcgcggggaggaggccgaggccgcagcttgagggaggccccggcccctctgcgcctgtgtctggcagagctggtgtgagacgagacaatcctgccccgccgccgggataatcaagagttttggccggacctttgagcatacaccgagagagtgaggagccagacgacaagcacacactatggcgctgaaacggattaataaggaacttagtgatttggcccgtgaccctccagcacaatgttctgcaggtccagttggggatgatatgtttcattggcaagccacaattatgggacctaatgacagcccatatcaaggcggtgtattctttttgacaattcattttcctacagactaccccttcaaaccacctaaggttgcatttacaacaagaatttatcatccaaatattaacagtaatggcagcatttgtctcgatattctaagatcacagtggtcgcctgctttaacaatttctaaagttcttttatccatttgttcactgctatgtgatccaaacccagatgaccccctagtgccagagattgcacggatctataaaacagacagagataagtacaacagaatatctcgggaatggactcagaagtatgccatgtgatgctaccttaaagtcagaataacctgcattatagctggaataaactttaaattactgttccttttttgattttcttatccggctgctcccctatcagacctcatcttttttaattttattttttgtttacctccctccattcattcacatgctcatctgagaagacttaagttcttccagctttggacaataactgcttttagaaactgtaaagtagttacaagagaacagttgcccaagactcagaatttttaaaaaaaaaaatggagcatgtgtattatgtggccaatgtcttcactctaacttggttatgagactaaaaccattcctcactgctctaacatgctgaagaaatcatctgagggggagggagatggatgctcagttgtcacatcaaaggatacagcattattctagcagcatccattcttgtttaagccttccactgttagagatttgaggttacatgatatgctttatgctcataactgatgtggctggagaattggtattgaatttatagcatcagcagaacagaaaatgtgatgtattttatgcatgtcaataaaggaatgacctgttcttgttctacagagaatggaaattggaagtcaaacaccctttgtattccaaaatagggtctcaaacattttgtaattttcatttaaattgttaggaggcttggagctattagttaatctatcttccaatacactgtttaatatagcactgaataaatgatgcaagttgtcaatggatgagtgatcaactaatagctctgctagtaattgatttatttttcttcaataaagttgcataaaccaatgagttagctgcctggattaatcagtatgggaaacaatcttttgtaaatgcaaagctgttttttgtatatactgttgggatttgcttcattgtttgacatcaaatgatgatgtaaagttcgaaagagtgaatattttgccatgttcagttaaagtgcacagtctgttacaggttgacacattgcttgacctgatttatgcagaattaataagctatttggatagtgtagctttaatgtgctgcacatgatactggcagccctagagttcatagatggacttttgggacccagcagttttgaaatgtgtttatggagtttaagaaatttattttccaggtgcagcccctgtctaactgaaatttctcttcaccttgtacacttgacagctgaaaaaaaacaacatgggagtaataatgggtcaaaatttgcaaaataaagtactgttttggtgtgggagttgtcatgaggctgtgttgaagtgacttatctatgtgggatattgagtatccattgaaatggatttgttcagccatttacattaatgagcatttaaatgcaacagatatcatttcaggtgacttaacatgaatgaataaaagtcaatgctattggattgttttttgtttgacaagtgctatctgtgccactgatttaacttctgtagtaacaagggcattaccattcttcacctttcctaattctgatcccatagttttacatttttcctgtttattttgattttgttcactgctttatttcttaaagttctagcacatctgtgactcctccacttccacatttttgcactgcttacacttacgtgcaatcttattccttgtctgcacacacatgtggaaagctagaaataaatgttaaaacttactttttataaacattttaatatgtagtttggacatgatttattgacttaaggttcttctctaaactggaagtgaaatgcatgccttctgaagatgttctggctttgttaattctgtaatcatttcattggggaaaaaaccagctacgcagtttttccaatgagtgaattttttcattttgtgttttgcttaaaacggctccttcagggtagatgtcatactgcataacttttttggattcaaattatgaatgagaaattagttaacattctgctccacaaggtaagaaaaactgctctttggctctattttcaaaattacttctgagatgcatatagtctcaaaataacagctttagtaggcatatcacttcttgaaagccaaacatgagtgtaagacacttttatgaaacacggtggatccctaactggctttcaaattgacctttatagccttagacaacccttaggtatttacggagatgacttctttgattgtcataacaattagtggatgtgtccagttctctgtatctttgacttgatgctttatacatcatttcatttgttgcttctaagggaataagccatagaggcttctccaggtttaaaagaacagtaaagtacctggaaaaccaacatttttgaatgtatggacactggacatgagatatgtacaatgaaatcttaaaagaatctaagaatttgccctctttgccccactccacccagtaatttgacattactagtgccatgtataggacccaactgagtattagaatcagttttgactatgtctttgtatttcctaaatcttttaatgcataaaccgaattagggtccagttggcctgttaatggtaaatttacattttaaatgactcagtttgtttttcctgggcgagtttgcaatgtgataatcagattttttaaaactgattaatttgctttcttgtgtgggtgtactcacattttaaagtatgaaccacagttaactagtggtctcaggggtagtgaaacactcacttttttttttgtttgtttttttttgtttgttgaaatggcttagttgaagtatacttaaggtactgatcatgctgtgttagtaatttgggcggggaggggggtaactcagccatgttttgtgttggcataacaaaactgttaatgattgttgattacacttttaagtgaatttgtcttttatgaggaacccagtgcaagtcactaaatattgtctaatagtgacatctgcataagacttgtaatagctgaagttaattgagcttaaaggaattgttaccattaaagtctgtgtttaaagaca

SEQ ID NO: 137583 - DNA, 599 bp, Artificial Sequence
  derived and/or modified sequence
acaaaactgctcttaagtcattgcagagctaccgcttcggttagccagccacgaagttctcgcgagagtcgtctcctcgataccaataagaaggtgctgttccgagaagaaggaaaagggcttgacacgtattcactcggccccggacgtgggaagcaagccgtctggcttcggcctcacatcggtcttgtgctcgggacggcggcgttggcggactgatccgcggcggtgaagaggcgcctgtgtctggcagagctggtgtgagacgagacaatcctgccccgccgccgggataatcaagagttttggccggacctttgagcatacaccgagagagtgaggagccagacgacaagcacacactatggcgctgaaacggattaataaggaacttagtgatttggcccgtgaccctccagcacaatgttctgcaggtccagttggggatgatatgtttcattggcaagccacaattatgggacctaatgacagcccatatcaaggcggtgtattctttttgacaattcattttcctacagactaccccttcaaaccacctaaggttgcatttacaacaagaatttatcatccaaatatta

SEQ ID NO: 137584 - DNA, 547 bp, Artificial Sequence
  derived and/or modified sequence
agcgaggccctcctcggaatctcgtgtgaaggtggccctcctcttgggcctttaacgtctgtagatgctggagaccagcagaaaggatactgtgtgcgatgagataagcatgtgagaatgctttctaaccgaaagtgcctttcaaaaagctggtgtgagacgagacaatcctgccccgccgccgggataatcaagagttttggccggacctttgagcatacaccgagagagtgaggagccagacgacaagcacacactatggcgctgaaacggattaataaggaacttagtgatttggcccgtgaccctccagcacaatgttctgcaggtccagttggggatgatatgtttcattggcaagccacaattatgggacctaatgacagcccatatcaaggcggtgtattctttttgacaattcattttcctacagactaccccttcaaaccacctaaggttgcatttacaacaagaatttatcatccaaatattaacagtaatggcagcatttgtctcgatattctaagatcacagtggtcgcctgctt

SEQ ID NO: 137585 - DNA, 604 bp, Artificial Sequence
  derived and/or modified sequence
gcattttggaggcggaaccccgtcaggaaaagcgcacaaaactgctcttaagtcattgcagagctaccgcttcggttagccagccacgaagttctcgcgagagtcgtctcctcgataccaaaggccgggaagttaaacttgtagccaccacctccgctcttcccgtcaccctcgcccccacttcgggccgaaagcacggtacagaggctgttggtggctttgccacgccaccccacccaccccggatcgcggctgtcttaagggacctggattcatcaggggctcttcggggcctgtgcgagtgctgatctgctccgtttttgcaaaaggcgcctgtgtctggcagagctggtgtgagacgagacaatcctgccccgccgccgggataatcaagagttttggccggacctttgagcatacaccgagagagtgaggagccagacgacaagcacacactatggcgctgaaacggattaataaggaacttagtgatttggcccgtgaccctccagcacaatgttctgcaggtccagttggggatgatatgtttcattggcaagccacaattatgggacctaatgacagcccatatcaaggcggtgta

SEQ ID NO: 137586 - protein, 193 aa, Artificial Sequence
  derived and/or modified sequence
MSDDDSRASTSSSSSSSSNQQTEKETNTPKKKESKVSMSKNSKLLSTSAKRIQKELADITLDPPPNCSAGPKGDNIYEWRSTILGPPGSVYEGGVFFLDITFTPEYPFKPPKVTFRTRIYHCNINSQGVICLDILKDNWSPALTISKVLLSICSLLTDCNPADPLVGSIATQYMTNRAEHDRMARQWTKRYAT

SEQ ID NO: 137587 - DNA, 582 bp, Artificial Sequence
  derived and/or modified sequence
atgagcgacgacgattctagagcgagcacatcctcatccagctcatcttcctcaaaccaacagactgaaaaagaaactaacacccccaagaagaaagagtcaaaagtgtctatgtccaagaactccaaactcctttccacctcggcaaagcggatccaaaaggagctggctgatattaccctagatcctcctccgaattgtagcgctggccccaaaggagacaacatttacgagtggaggtcgaccatccttgggcccccgggatcagtgtatgagggcggtgtattttttctcgacattacgtttacacctgagtacccatttaagccccctaaggtgacttttcgcacccggatctaccattgcaatatcaattcacagggagtcatttgcctggacatcttgaaagacaactggagccccgctctcacaatatccaaagttctcctgtccatttgcagcctattaacagactgtaatcctgccgaccccctagtgggctctattgcgacgcagtatatgaccaaccgcgcagagcacgacaggatggcccgacagtggactaaacgatatgctacttag

SEQ ID NO: 137588 - DNA, 582 bp, Artificial Sequence
  derived and/or modified sequence
atgtctgatgatgacagccgggccagcaccagcagcagcagcagcagcagcagcaaccagcagacagagaaggagaccaacacccccaagaagaaggagagcaaggtgtccatgagcaagaacagcaagctgctgagcaccagcgccaagaggatccagaaggagctggccgacatcaccctggaccccccacccaactgcagcgctggccccaagggggacaacatctatgagtggaggagcaccatcctgggccccccaggctctgtgtatgaaggaggagtcttcttcctggacatcaccttcaccccagagtaccccttcaagccacccaaggtgaccttccgcacccgcatctaccactgcaacatcaacagccagggcgtcatctgcctggacatcctgaaggacaactggagccctgccctgaccatcagcaaggtgctgctgagcatctgcagcctgctgacagactgcaacccagctgaccccctggtgggcagcatcgccacccagtacatgaccaacagagctgagcatgacaggatggcccggcagtggaccaagagatatgccacctag

SEQ ID NO: 137589 - DNA, 582 bp, Artificial Sequence
  derived and/or modified sequence
atgagcgacgacgacagccgggccagcaccagcagcagcagcagcagcagttctaaccaacagactgaaaaggaaaccaacactcctaagaaaaaagagtcaaaagtgtctatgtcaaaaaatagcaaactgctatctacttctgccaaaaggattcagaaagaattagccgatataacactggatccacctcccaactgctcggccgggccgaaaggggacaacatctatgagtggcggtctacaatcctcggtcctccaggctctgtctacgaagggggtgtatttttcctcgatataacctttaccccagagtatccatttaaaccacccaaagtgacatttcgcactaggatctatcattgtaacataaattctcaaggggtgatctgtttggacatattaaaagacaattggagcccagccctgaccatctcaaaagtactgctgtccatttgttcactgctgactgactgcaaccccgccgatccattggtgggatcaattgccacacaatatatgaccaatcgcgcagaacatgatagaatggcaagacaatggaccaagaggtacgcaacatag

SEQ ID NO: 137590 - DNA, 582 bp, Artificial Sequence
  derived and/or modified sequence
atgagcgacgacgatagcagagctagcaccagttccagctcatctagctcctccaatcagcaaactgaaaaggaaaccaacacccctaaaaaaaaggagtctaaagtgagtatgtccaagaatagcaagctgctgagcacaagtgctaaacggatacagaaggagttggccgacattacgctggacccccctccgaattgcagcgcgggtcccaaaggcgataacatttatgagtggcggtccacaatcctcggcccacctgggtccgtgtatgagggcggtgtattctttctggacattaccttcactccagagtaccccttcaaacctcctaaagttacattccgcacgcggatttaccactgcaatattaattctcaaggcgtgatttgtctcgacattcttaaagataattggtcccctgccctgacgatttctaaagtgctgttatccatttgcagcctcctcacggactgcaatcctgctgatccgctcgtggggtctatagctacccagtatatgacaaacagggctgagcatgacaggatggcgaggcagtggacaaaaagatacgccacatag

SEQ ID NO: 137591 - DNA, 1511 bp, Artificial Sequence
  derived and/or modified sequence
ggcggcggcggaggagtggtgtgtgtgcgagcgtgtgtggctgggggaagccattgcctgtttaatagttgctgttgctgcacttccgcttctctcccagcgagagagagacacgagtggccaggcccagccgcagccgcagcagcagccgccgcggcggcacggaggagccagacacaaagagaggggctgtttgcggggtggggtggggggttcgctatgtcggatgacgattcgagggccagcaccagctcctcctcatcttcgtcttccaaccagcaaaccgagaaagaaacaaacacccccaagaagaaggagagtaaagtcagcatgagcaaaaactccaaactcctctccaccagcgccaagagaattcagaaggagctggcggacatcactttagaccctccacctaattgcagtgctggtcccaaaggcgataacatctatgaatggagatcaaccattctagggcctccaggatccgtgtatgagggtggtgtattctttctcgatatcacttttacaccagaatatcccttcaagcctccaaaggttacatttcggacaagaatctatcattgtaatattaacagtcaaggtgttatttgcttggacatattgaaagataattggagtccagcactaaccatttctaaagtcctcctttctatctgctcacttcttacagactgtaatcctgccgaccccttggtgggaagtattgccactcagtatatgaccaacagagcagaacatgacagaatggccagacagtggaccaagagatacgctacataaattggggtttcacaattcttacattatttgtctgtcacagaagagagctgcttatgattttgaaggggtcagggagggtgggagttggtaaagagtagggtatttctataacagatattattcagtcttatttcctaagattttgttgtaacttaaggtatcttgctacagtagacagaattggtaatagcaacttttaaaattgtcattagttctgcaatattagctgaaatgtagtacagaaaagaatgtacatttagacatttgggttcagttgcttgtagtctgtaaatttaaaacagcttaatttggtacaggttacacatatggccatttatgtaaagtccctctaagactacatactttttgtttaaaacaaaattggaatttgttttcccttcttggaagggaacattgatatttaacagagtttttagagattgtcatctcatatatataaaatggacacgtggctataaaacaccatataagagatgagtagtgcgttttattttatatgccaatctactttgtttaaaaaaggtctgaatcaggacttgtgaaaacctgtagtgaaataccttaagctgttaactaactgtaaggcgtggaataggagttgctcagtggattggttctatgttgtggactacttaagtctgcatttgttactgtgctaataaacaatattaaaaaccacctaataaaca

SEQ ID NO: 137592 - DNA, 582 bp, Artificial Sequence
  derived and/or modified sequence
atgagcgacgacgacagcagagccagcaccagcagcagcagcagcagcagcagcaaccagcagaccgagaaggagaccaacacccccaagaagaaggagagcaaggtgagcatgagcaagaacagcaagctgctgagcaccagcgccaagagaatccagaaggagctggccgacatcaccctggaccccccccccaactgcagcgccggccccaagggcgacaacatctacgagtggagaagcaccatcctgggcccccccggcagcgtgtacgagggcggcgtgttcttcctggacatcaccttcacccccgagtaccccttcaagccccccaaggtgaccttcagaaccagaatctaccactgcaacatcaacagccagggcgtgatctgcctggacatcctgaaggacaactggagccccgccctgaccatcagcaaggtgctgctgagcatctgcagcctgctgaccgactgcaaccccgccgaccccctggtgggcagcatcgccacccagtacatgaccaacagagccgagcacgacagaatggccagacagtggaccaagagatacgccacctag

SEQ ID NO: 137593 - protein, 170 aa, Artificial Sequence
  derived and/or modified sequence
MTELQSALLLRRQLAELNKNPVEGFSAGLIDDNDLYRWEVLIIGPPDTLYEGGVFKAHLTFPKDYPLRPPKMKFITEIWHPNVDKNGDVCISILHEPGEDKYGYEKPEERWLPIHTVETIMISVISMLADPNGDSPANVDAAKEWREDRNGEFKRKVARCVRKSQETAFE

SEQ ID NO: 137594 - DNA, 513 bp, Artificial Sequence
  derived and/or modified sequence
atgaccgagctgcagagcgccctgctgctgagaagacagctggccgagctgaacaagaaccccgtggagggcttcagcgccggcctgatcgacgacaacgacctgtacagatgggaggtgctgatcatcggcccccccgacaccctgtacgagggcggcgtgttcaaggcccacctgaccttccccaaggactaccccctgagaccccccaagatgaagttcatcaccgagatctggcaccccaacgtggacaagaacggcgacgtgtgcatcagcatcctgcacgagcccggcgaggacaagtacggctacgagaagcccgaggagagatggctgcccatccacaccgtggagaccatcatgatcagcgtgatcagcatgctggccgaccccaacggcgacagccccgccaacgtggacgccgccaaggagtggagagaggacagaaacggcgagttcaagagaaaggtggccagatgcgtgagaaagagccaggagaccgccttcgagtag

SEQ ID NO: 137595 - DNA, 513 bp, Artificial Sequence
  derived and/or modified sequence
atgacagagctgcagtctgccttgctgctccgcaggcagctcgcagaactgaacaagaatccagtagagggtttcagtgccggactcatcgacgataatgatctctatcgctgggaggttcttattattggcccacctgacaccctctacgaaggtggggtgttcaaggcacatctcacttttccaaaggattaccccctaaggccaccaaagatgaaatttataaccgagatctggcaccccaatgtcgataagaatggggacgtgtgtatcagcattttgcacgaacccggagaggacaaatacggatatgagaagcccgaggagaggtggctccccatccacaccgtcgagaccatcatgatcagtgtaatcagcatgctggctgaccctaatggagattccccagccaacgtcgacgcagctaaggaatggagagaagatcgcaacggagagttcaaacgcaaagtcgctcggtgtgtaaggaagagccaggagacagctttcgagtag

SEQ ID NO: 137596 - DNA, 513 bp, Artificial Sequence
  derived and/or modified sequence
atgacagagctgcagagcgccctgctgctgcggcggcagctggccgagctgaacaagaaccctgtggagggcttctctgctggcctgattgatgacaatgacctgtaccgctgggaggtgctgatcatcggccccccagacaccctgtatgagggcggcgtcttcaaggcccacctgaccttccccaaggactaccccctgcggccccccaagatgaagttcatcacagagatctggcaccccaacgtggacaagaatggagatgtgtgcatcagcatcctgcacgagcctggagaggacaagtatggctatgagaagccagaggagcgctggctgcccatccacacagtggagaccatcatgatcagcgtcatctccatgctggccgaccccaacggggacagccctgccaacgtggatgctgccaaggagtggagagaagatagaaatggagagttcaagaggaaggtggcccgctgtgtgaggaagagccaggagacagcctttgaatag

SEQ ID NO: 137597 - DNA, 513 bp, Artificial Sequence
  derived and/or modified sequence
atgaccgagctgcagagcgccctgctgctgcggcggcagctggccgaactgaacaagaatcccgttgaggggttttcagctggcctgatcgatgacaacgacctttatcgttgggaggtactgatcattggccctccagataccctgtacgagggaggcgtgtttaaggcccacctgacatttcccaaggactaccccctccgtccaccaaagatgaagtttatcactgaaatttggcacccgaacgtagataagaatggggacgtgtgtatctccattctgcacgaacccggcgaagacaaatacggatacgaaaagccagaagaaagatggctgcccatccatactgtggagacgataatgataagtgtgatcagtatgcttgctgatccaaatggtgactcccccgccaatgttgacgccgccaaggagtggagagaggatcgcaatggcgaattcaagcgcaaagtagctaggtgcgtacggaaaagccaggagacagccttcgagtag

SEQ ID NO: 137598 - DNA, 513 bp, Artificial Sequence
  derived and/or modified sequence
atgacggaactgcagtccgccttgctgttgcgtagacagctggcagaactcaataagaaccccgtggaaggcttttcagccggactcattgatgacaacgacttatataggtgggaggtgctaatcataggcccacctgacaccctttatgagggtggggtgtttaaggcccacctgaccttcccgaaagattatccgctgagaccaccgaagatgaaattcatcacagagatctggcaccccaatgtggacaaaaacggagacgtttgtataagcatcctccacgagccaggcgaagacaaatacgggtatgagaagcctgaggaaagatggttgcctatccacacagtggagacaatcatgatttctgtgatctcaatgctagcagaccctaatggcgactccccagccaacgtcgacgctgctaaagagtggcgggaggatcgtaacggtgagttcaagcgcaaagtcgcgaggtgtgttcggaagtctcaggagacagctttcgaatag

SEQ ID NO: 137599 - DNA, 4208 bp, Artificial Sequence
  derived and/or modified sequence
gtctcagcgcgcctgcgccgagcggccctgcgcgcagtgaggcagtggcgggggaaggcaccggtggggccgacgggcgggttgaaggagggaagcgggcgagcgaagtcccagtgcgcgccgcggcagcccgggcaccctccccttccgggcgtgagtcgctgtgaaaagagctgaagcgagcggactcgcaccggcagcgaggcgccgctcccgccgcctcagcccggccttcctcggctccggcgctccggtcgcggggcccgggttcctcggcacaccccgctccagccgcccccagagcctgtccccagcccttcggaagccccggcgccagcccgggccctcggcagggaggatgacggagctgcagtcggcactgctactgcgaagacagctggcagaactcaacaaaaatccagtggaaggcttttctgcaggtttaatagatgacaatgatctctaccgatgggaagtccttattattggccctccagatacactttatgaaggtggtgtttttaaggctcatcttactttcccaaaagattatcccctccgacctcctaaaatgaaattcattacagaaatctggcacccaaatgttgataaaaatggtgatgtgtgcatttctattcttcatgagcctggggaagataagtatggttatgaaaagccagaggaacgctggctccctatccacactgtggaaaccatcatgattagtgtcatttctatgctggcagaccctaatggagactcacctgctaatgttgatgctgcgaaagaatggagggaagatagaaatggagaatttaaaagaaaagttgcccgctgtgtaagaaaaagccaagagactgcttttgagtgacatttatttagcagctagtaacttcacttatttcagggtctccaattgagaaacatggcactgtttttcctgcactctacccacctattgctggacttctgttgtacaagttggcaaacactggctggaactgggctgcaataaaacatgccagttatcaatgctgacaagagcctaacaagtgccaacttacagatgattacgcattttgaattctaatgaactgttttaaccttcaggaagaattgtaaagacctgtacatagcacaacatgatccggataatatatatactgttcatgtacatccacaaatacaccttgtaccaaataatgctttcttgtagtagaataagaatcgtgtaaattctaagagattttagcaggttttctttcctattcattgtttcttatcagtttaaaaggattcctttaagcatgtcagatgaaaagcaattaggattaaaagtttccatttaatttcccttaaacccttgaggcttcattaaactcttttcacttactaaacttttgtatcttctttgttttgacacactcccctttgcttttatctcttacctgccagaatgttctcaaatgatttagttcaaatactgaaatacttaatgagcaattacttgatttttaatgatgacttcgaaggagtcatcactaggtgctttgtcctttttgtattctagttgcacccacctcttggattggatatagcaataacatttattggccgttgtgagctcttgatcccagtcattacccctgagaactaaaaatagatggttcttaattcaacttactgaaaatttccccaaacaatagcaaatctgacttttccctcttcagttgcctggtattaaggttggataaatgaagcatgcacagctacaggctttctacttaacttctgggtttgctattacaaatcctatttactctcatacccttctccttagtccttcatatttctctgcctctattcttctatactgcagatttttctcacctattgtacaaagaaattgcgatgtatattttcatgtaatttgattttggaattctgtcaccttatgtagtgagttcttccaaaatataattttttttcaataattgtcaagttgttggcttttattgtattgaatgaaggctataatactgagtgccagagaagtggtttaggaaaatctcaggttgattccttatgcaaatgaacttttaatacttgaaaatcacatggccatggcagtatatgtatttggttctatctagattcttctgtgaatctaaaagcattacaggggtaaatgctttgctatttgacgtatagatcccgtcactaacaatagtacacttggatgtgattaatgtttgagcttcaatatatttcatatcatacagttttctaaaacaacttcagcaaatggtaaaatgaacatgtgcagtgttaaaggcaggccttaggctccttcatgtttgttgtgaggttgtgtgtgggaagtagtctttggcttataagggatagaacttgagacagtagcagatgggacatggtgtttgattgtgagaatcagtgagaattcgtgcatctctgctctgtggggtttggagaaatgctttggcagaagagtgaaagaactcctgccaagagcccagacctctacaaacgttgtatgtccttttttaagcagaaataaaatggttgaggatgtagtcacagtagagagtgatttttttctaagtccctgtcctctactctgaagcgttataaaaacctgtaaacattatacaaacccacaaaccttatagaaactcgtaagtgtgttgtgactggaaattgattcattagaacccagttttctttaagaactttgtgacttggttttttttttccttttccaaagactgtaaaaatagttgccccaaaatgtcagcactgcacaccctccagggacttggaatacaatcctttttacttttttttttttttttttaagaaactgggtctctctgtcacccaggctggagtgcagtggcaacgatcatagctaactgcagctttgacctcctgggctcaagtgatcctcctgcctcagcctcctgagtagctaggactacaggtgtatgccaccatgcctggctaatacaaaaaaattcttttaagagatgggatccctcccttttaaaatcagaacttgttcacatggtggttgcttgtggcaaaacggagttcaaattttgctctcctattgctataattctgctagcaatctgttgaggtgaaacttgggatctgactcttcagcaagcagcaaatgacctagtaactcagggacaactatttttgaactttaagtgccactttaatgcagttagtttgataaaaccatgtgggttttttttttagggctagctctacgggagtggaagtgagagccaggcatgagtgcgtctccacatgcttttccacctgccctgagtgtgttacatactgaaacaggcctacatagatgttacaacttcccttcctctgtcggagatgtcatctgtgcctttctcagtgttcatctgataatgtaaatttaaatgcctctacatttgatacgaaacccacattcaggtgacactgaacgaggtggcttttgtcccaccagtgcctcatcagtgtgaggcgattcctctctgctttaggaaaatgatttttccccctaaacttgtgccaaccatcaacaacatctccatagatcttatggattgtagaactgttggctgtttcctaaatttattccaagttctcgtagaggcatatagatttcagtctgtgcttgtatgggatagatgatctgagtggctttctggcctcttttttgagtttaaaatccatatgaggttgacgtgtcatactaaggtaacatgtttgtgaggttattccactagtactgtgatcacgtgggtgtcagtatctttaacggccttcattcttggttgtgagattttatttgatatgcccactcaccctcgacgaatctgcccgctttgggctgtggtgcctgtgtatctttgcccgtctggtctccagttggtggaattaccttttttgtactgccacttctcagcatctttgaaatttgacataatgttgcttcatttcagtttttttagttctgtaatttgttgattgtatttaactatgtgagttctgttgtgatgtttactgtattgtaaagcacctcattcatgtgatgagtgctctataaatcaataaatgatgacttagaggctgtatcacgagctattttggttttaggatgcaggtctcaaaagcaa

SEQ ID NO: 137600 - protein, 137 aa, Artificial Sequence
  derived and/or modified sequence
MNEENFFEWEALIMGPEDTCFEFGVFPAILSFPLDYPLSPPKMRFTCEMFHPNIYPDGRVCISILHAPGDDPMGYESSAERWSPVQSVEKILLSVVSMLAEPNDESGANVDASKMWRDDREQFYKIAKQIVQKSLGL

SEQ ID NO: 137601 - protein, 165 aa, Artificial Sequence
  derived and/or modified sequence
MAGTALKRLMAEYKQLTLNPPEGIVAGPMNEENFFEWEALIMGPEDTCFEFGVFPAILSFPLDYPLSPPKMRFTCEMFHPNIYPDGRVCISILHAPGDDPMGYESSAERWSPVQSVEKILLSVVSMLAEPNDESGANVDASKMWRDDREQFYKIAKQIVQKSLGL

SEQ ID NO: 137602 - DNA, 498 bp, Artificial Sequence
  derived and/or modified sequence
atggccggcaccgccctgaagagactgatggccgagtacaagcagctgaccctgaacccccccgagggcatcgtggccggccccatgaacgaggagaacttcttcgagtgggaggccctgatcatgggccccgaggacacctgcttcgagttcggcgtgttccccgccatcctgagcttccccctggactaccccctgagcccccccaagatgagattcacctgcgagatgttccaccccaacatctaccccgacggcagagtgtgcatcagcatcctgcacgcccccggcgacgaccccatgggctacgagagcagcgccgagagatggagccccgtgcagagcgtggagaagatcctgctgagcgtggtgagcatgctggccgagcccaacgacgagagcggcgccaacgtggacgccagcaagatgtggagagacgacagagagcagttctacaagatcgccaagcagatcgtgcagaagagcctgggcctgtag

SEQ ID NO: 137603 - DNA, 498 bp, Artificial Sequence
  derived and/or modified sequence
atggccggtaccgctctgaaacggctcatggccgaatataagcagctgacacttaacccgccagaagggattgtagccgggcctatgaatgaagaaaacttttttgagtgggaggcccttataatggggcccgaggacacttgtttcgaattcggagtttttcctgctatcctgagcttcccactggattaccctctgagccccccaaaaatgcgtttcacctgcgaaatgtttcacccgaatatctacccggacggccgggtctgcatctccattttacatgctcctggtgatgatcctatggggtatgagtcttctgctgagaggtggtctccagtgcagtcagtggaaaagatcctgctgtcagtggtgtccatgctggccgagccaaatgatgagtccggcgctaacgtcgacgctagcaagatgtggcgcgatgatcgcgagcagttttacaaaattgccaagcagatcgttcagaagagtctgggcctgtag

SEQ ID NO: 137604 - DNA, 498 bp, Artificial Sequence
  derived and/or modified sequence
atggccggcacagccctgaagaggctgatggccgagtacaagcagctgaccctgaaccccccagagggcatcgtggccggccccatgaatgaggagaacttctttgagtgggaggccctgatcatgggccctgaggacacctgctttgaatttggagtcttccctgccatcctgtccttccccctggactaccccctgagcccccccaagatgaggttcacctgtgagatgttccaccccaacatctacccagatggccgggtgtgcatcagcatcctgcacgcccctggagatgaccccatgggctatgagagcagcgctgagcgctggagccctgtgcagagcgtggagaagatcctgctgtctgtggtgtccatgctggccgagcccaatgatgagagcggggccaacgtggatgccagcaagatgtggagagatgaccgggagcagttctacaagatcgccaagcagatcgtgcagaagagcctgggcctgtag

SEQ ID NO: 137605 - DNA, 498 bp, Artificial Sequence
  derived and/or modified sequence
atggccggcaccgccctgaagcggctgatggccgagtacaagcagttaactctcaatccccccgaaggaatagtggccggaccaatgaatgaggaaaatttctttgaatgggaggcactgatcatgggcccagaagacacttgtttcgagttcggggtatttcctgctatcttgtcatttcccctggactatccgctgtcccctccgaagatgaggttcacctgcgagatgtttcaccccaacatctaccccgacggtagagtgtgtattagtattctgcatgcccccggcgatgaccccatgggatacgaatctagcgccgaacgctggagtcccgttcagtccgtggagaagatcctcctgtctgtcgtttccatgctggccgagccaaatgatgaatctggtgctaatgtcgatgcttctaagatgtggcgagatgatagggagcagttttacaagatcgcgaagcagatagtgcagaaaagcctcggattgtag

SEQ ID NO: 137606 - DNA, 498 bp, Artificial Sequence
  derived and/or modified sequence
atggcgggaaccgccctcaaaaggctaatggccgagtacaagcagctcacactgaatcctcccgaaggaattgttgctgggcctatgaatgaagagaacttttttgaatgggaagccctcattatgggtcctgaggatacttgcttcgagtttggggtgtttcccgctatactgtcattcccactggactatcccctgtcccccccaaaaatgcgattcacctgtgaaatgttccatcctaatatctaccctgatggacgggtctgtatctccattctgcatgcacctggggatgatccaatgggttacgagtcatctgcagagaggtggtctccagtacaatctgtggaaaaaattctactgagtgtggtctcgatgttggcagagccaaatgatgagagcggcgctaatgtggatgccagcaagatgtggcgggatgaccgagagcagttctacaaaatagccaagcagatcgtgcagaagtctctgggactgtag

SEQ ID NO: 137607 - DNA, 721 bp, Artificial Sequence
  derived and/or modified sequence
tcgctcggcgcagctgttgcggggccatggcggggaccgcgctcaagaggctgatggccgagtacaaacccttgagaacgtgcagtgagagcttgaggaagaaggcctgacttgctgctgcggaattaggagggaaaagtgtatgcgttaaaaggggaaaggctcgttggtggagctttgaaagaattaacactgaatcctccggaaggaattgtagcaggccccatgaatgaagagaacttttttgaatgggaggcattgatcatgggcccagaagacacctgctttgagtttggtgtttttcctgccatcctgagtttcccacttgattacccgttaagtcccccaaagatgagatttacctgtgagatgtttcatcccaacatctaccctgatgggagagtctgcatttccatcctccacgcgccaggcgatgaccccatgggctacgagagcagcgcggagcggtggagtcctgtgcagagtgtggagaagatcctgctgtcggtggtgagcatgctggcagagcccaatgacgaaagtggagctaacgtggatgcgtccaaaatgtggcgcgatgaccgggagcagttctataagattgccaagcagatcgtccagaagtctctgggactgtgagacctggcctcgcacaggcgcgcacacaccgccaagcagctcagcattctcccccggcacacttagtgacagtgatgctctg

SEQ ID NO: 137608 - DNA, 3106 bp, Artificial Sequence
  derived and/or modified sequence
acaagaccaggaccctgaggcctctggaagtgccgggaccgaaccaaccccgcagagcgactaaggcgagggcaggagccaagagaatcgtagccgcggtcgcgggttgagctcccaccacccggacagcgcgcctcggcgatcgcgcacgcgccacgccccggaagagttcctgggcccgcgacggtggcccggaagcagtccccggtgtcggggcaggaggcacgcgcgcggctgaggcgaggtcgctcggcgcagctgttgcggggccatggcggggaccgcgctcaagaggctgatggccgagtacaaacaattaacactgaatcctccggaaggaattgtagcaggccccatgaatgaagagaacttttttgaatgggaggcattgatcatgggcccagaagacacctgctttgagtttggtgtttttcctgccatcctgagtttcccacttgattacccgttaagtcccccaaagatgagatttacctgtgagatgtttcatcccaacatctaccctgatgggagagtctgcatttccatcctccacgcgccaggcgatgaccccatgggctacgagagcagcgcggagcggtggagtcctgtgcagagtgtggagaagatcctgctgtcggtggtgagcatgctggcagagcccaatgacgaaagtggagctaacgtggatgcgtccaaaatgtggcgcgatgaccgggagcagttctataagattgccaagcagatcgtccagaagtctctgggactgtgagacctggcctcgcacaggcgcgcacacaccgccaagcagctcagcattctcccccggcacacttagtgacagtgatgctctgtgctggtaccaaacaaggcagacttgcaagaaccatggcatcttttttttttttcaaacctttcctacttcaaacaggcttctcttctgaaatgatgacttaatgtcgaatattgacagcttactgcagttttacagtattcctcacaaagggcttcaggtagattatcagagctgtcagcactacctctccccgctgaaaccagcagttcatggcttcctgtggattccctccctccctggagtgttgagggggttgtacctgccagacttccaggggacgatggaatacccagaacgctccttctgaagaaatggggccctgtagctgcagcacaggggaagggcccggcaccctttctgggtccttcctggttccctgtgggccccatgaggagtccattacttcctttcttccttcatattttacaggcagatgcttttcttataatctaattacatcttttcatttgttatatattacaaaccatcacacttagaaatacttccaggaaatgcttttttgaagtgtgaattaataagaaatggggtaaatagaaaagaaatttattgctgattggccaggtgcggtggttcgtgcctgtaatcccagctctttgggaggccaaggcaggtagatcacaaggtcaggaaattgagaccatcctggctaatacagtgaaaccccatgtctgctaaaattacaaaaaattagctgggcgtggtggtgcacgcctgtagtctcagctactcaggaggctgaggcaggagaatcgcttgaacccgggaggcagaggtagcagtgagctgaagtcccgccactgcactccagcctgggcaacagagcgagactcagtctcaaaaagaaaaaagaaatttattgctgatcacaaggacagacagttttttcccgaccatactcatcaaagatttacgtttgtatattagtaactagtgcattactagagcaggtgcaggtgaggtctttaaagtttcaatgaaagtttcttctggatctacagaaaaaatttttttttttcaatctaaaaactggaaattctagggtttttgtacattttggatgcactgggaatttattagcacaaaatcattctttgcaactcaaaattcagaagggactctaccatatcttagctcagagcacagaggagtgccttatccccacacttgactgggctgtggaggtgggcatgtgggcccctgggcccaggctggggacagagcccttgttttgtgacttaggattttgatgtggttcccatgttctctaacagggccagctgagcagcacaggccaggaggccacagtgtaagcaataacagatctgccacatgcagaagcaaatatcaggcctgtcgcacacgggcggcatttaaataggaatttctatttttgaaataagggatggtctatgaggcatacagtagatttgatgtgatccttttctccctcccttccataatggatcgtggtctgtgtgactgaacccacacagagtgtcatgggtgacagtttctggttgaagtagctccacgcctggcttctgtggacagcagattcttttccttctcacaaggggctcatttaaaatttggaggctgggtgctgtggctcacgcctgcaatcccagcactttgggagactgaggcgggcggatcatgaggtcaggagatcgcgaccatcctggctaacagtgaaaccctgtctccactaaaaatacaaaaaattagccgggcgtggtggcgggcgcctgtagtcccagctactctgaagactgaggcaggagaatggcgtgaacccaggaggcggagcttgcagtgagctgagatcacgccactgcactccagcctgggcaacagagtgagactctgtctcaaaaaaaaaaaaaaaaaaaatggaacgcagggcaagaactcgtatttggaaggagatgggggaaaggagcggtattatacctatgttgtatttgcaggcaaatgagatggagccctctctgtaaagaagagtcatttgtgcaagtagacggggtctgtgggtgcaggccctggaggggcacacaattgcctggaggcttctgtgagatcgggagagggaggagaggcagtctcttgacaaaataaagtatttttattcatttgtatttattaaatgaaaaaacaatcccatggtgtccctgttgtgtggtggaacctaatgactgttgaaataaagttctgtgttttccctgccctgca

SEQ ID NO: 137609 - protein, 183 aa, Artificial Sequence
  derived and/or modified sequence
MSSPSPGKRRMDTDVVKLIESKHEVTILGGLNEFVVKFYGPQGTPYEGGVWKVRVDLPDKYPFKSPSIGFMNKIFHPNIDEASGTVCLDVINQTWTALYDLTNIFESFLPQLLAYPNPIDPLNGDAAAMYLHRPEEYKQKIKEYIQKYATEEALKEQEEGTGDSSSESSMSDFSEDEAQDMEL

SEQ ID NO: 137610 - DNA, 552 bp, Artificial Sequence
  derived and/or modified sequence
atgagcagccccagccccggcaagagaagaatggacaccgacgtggtgaagctgatcgagagcaagcacgaggtgaccatcctgggcggcctgaacgagttcgtggtgaagttctacggcccccagggcaccccctacgagggcggcgtgtggaaggtgagagtggacctgcccgacaagtaccccttcaagagccccagcatcggcttcatgaacaagatcttccaccccaacatcgacgaggccagcggcaccgtgtgcctggacgtgatcaaccagacctggaccgccctgtacgacctgaccaacatcttcgagagcttcctgccccagctgctggcctaccccaaccccatcgaccccctgaacggcgacgccgccgccatgtacctgcacagacccgaggagtacaagcagaagatcaaggagtacatccagaagtacgccaccgaggaggccctgaaggagcaggaggagggcaccggcgacagcagcagcgagagcagcatgagcgacttcagcgaggacgaggcccaggacatggagctgtag

SEQ ID NO: 137611 - DNA, 552 bp, Artificial Sequence
  derived and/or modified sequence
atgagcagcccaagccccggaaagaggcgcatggacacagacgtggtcaagcttatagaatccaagcacgaagttaccatattgggcggactgaacgaattcgttgtcaagttctacggcccacagggaacaccctacgaaggaggagtgtggaaagtaagggttgacctgcccgacaaatacccgttcaagagtcctagcattggcttcatgaataagattttccatccgaatatcgatgaagcctctggaaccgtgtgccttgatgtcatcaatcaaacttggacagccctctacgatttgaccaatatttttgagtcctttttaccccaattactcgcatatcctaatcctatcgatccattgaatggagatgcagccgcgatgtacctccatcggcctgaagaatacaagcagaaaattaaggaatacatccaaaaatatgccaccgaagaagccttgaaggagcaggaagaggggaccggcgacagcagctctgaaagctctatgtctgacttctccgaagacgaggcccaggacatggagttatag

SEQ ID NO: 137612 - DNA, 552 bp, Artificial Sequence
  derived and/or modified sequence
atgagcagccccagccctgggaagaggaggatggacacagatgtggtgaagctgattgagagcaagcatgaggtgaccatcctgggcggcctgaatgaatttgtggtgaagttctacggcccccagggcaccccctatgagggcggcgtgtggaaggtgcgggtggacctgcctgacaagtaccccttcaagagccccagcatcggcttcatgaacaagatcttccaccccaacattgatgaggccagcggcaccgtgtgcctggatgtgatcaaccagacctggacagccctgtatgacctgaccaacatctttgagagcttcctgccccagctgctggcctaccccaaccccatcgaccccctgaatggagatgctgctgccatgtacctgcacaggcctgaggagtacaagcagaagatcaaggagtacatccagaagtatgccacagaggaggccctgaaggagcaggaggagggcactggagacagcagcagcgagagctccatgtctgacttctctgaagatgaggcccaggacatggagctgtag

SEQ ID NO: 137613 - DNA, 552 bp, Artificial Sequence
  derived and/or modified sequence
atgagcagccccagccccggcaagcggcggatggacaccgacgtggtgaagctaatcgagtctaagcatgaggtcaccattcttggagggctgaacgagtttgtggtgaaattctatggccctcaaggaacgccttacgagggaggtgtgtggaaagtcagggtggatcttcccgataagtatcccttcaagtcgccttctatagggttcatgaataaaatcttccatcccaatattgacgaagccagcggtaccgtctgtctggatgttataaaccagacatggaccgcactctacgaccttacaaatattttcgagagttttctcccacaacttctggcctatccaaatccaattgatccgttgaacggcgacgccgccgcaatgtacttgcaccgcccggaggaatacaagcaaaagatcaaagaatacatccagaaatacgccaccgaagaagccttgaaggagcaggaggagggtactggcgactcaagcagtgaatcatccatgagtgatttctccgaagacgaagctcaggacatggaactctag

SEQ ID NO: 137614 - DNA, 552 bp, Artificial Sequence
  derived and/or modified sequence
atgagttctccctcacctggcaaacgtcggatggacacggacgtggtcaagctaatagaaagcaaacacgaggtgactattctgggcggactgaacgaatttgtggtgaagttttatggcccacaaggcacaccctacgaggggggagtttggaaggtccgcgtggatctcccagacaagtatccctttaaaagcccctccattgggtttatgaataaaatcttccacccgaacattgatgaggcaagcggtacagtctgcttggatgtgattaatcagacatggacagcactctacgatttgacaaacatattcgaaagctttctccctcagcttttggcttatccaaaccctatcgatccgctcaacggggatgcagctgccatgtacttgcatcgtcccgaagagtacaaacagaagatcaaggagtacatacagaagtacgcaacggaggaggcactgaaggagcaggaggagggcaccggtgattcgagctcagagagtagcatgtcagatttttctgaggatgaggcccaagacatggaactctag

SEQ ID NO: 137615 - DNA, 5151 bp, Artificial Sequence
  derived and/or modified sequence
ggggtagggaggccgactgagcaggagtcgtccgcttatagtggaggctgctaggagccggtcagagggtgagtggggagcaggcgagcgagccacagcaggcaggagggagcgtcgcgcggcgcagaggagcgccggggcagggccgcggcggaaccacagccggagaggggcagcccgagccgggcgccgcagggtccccacccccacccggccggacagtgcccggtgttcccccgtgcggggggcggcggcggcggctgacgggaccgccgggaccgcgggggtgttgccacctccaccgaggagccggcgcggccgcgggctcctcagagccggggccccgggcccgtgacagacgggccgaggaagggagagaggcggcggcgacaccatgtcatctcccagtccgggcaagaggcggatggacacggacgtggtcaagctcatcgagagtaaacatgaggttacgatcctgggaggacttaatgaatttgtagtgaagttttatggaccacaaggaacaccatatgaaggcggagtatggaaagttagagtggacctacctgataaataccctttcaaatctccatctataggattcatgaataaaattttccatcccaacattgatgaagcgtcaggaactgtgtgtctagatgtaattaatcaaacttggacagctctctatgatcttaccaatatatttgagtccttcctgcctcagttattggcctatcctaaccccatagatcctctcaatggtgacgctgcagccatgtacctccaccgaccagaagaatacaagcagaaaattaaagagtacatccagaaatacgccacggaggaggcgctgaaagaacaggaagagggtaccggggacagctcatcggagagctctatgtctgacttttccgaagatgaggcccaggatatggagttgtagtagaaaaagcacctgcttttcagaaagactattatttcctaaccatgagaagcagactataatattcatatttaaacaaagcaattttttttattactaaacaaggtttttatgaataatagcattgatatatatatattatatatcaccctttagatcttgatttcttggtcatttctcaacctgaggtgcatagcatattcccacattccatttggtagcaatatgcggtctgaatgcatgcattcatgagtccatgtggccaagtcagcctgtgtgctactgaactgtcgaaggaaatagccgctctgataggtagatgtgagtaaaaagaacaggaaaaaattgcttcttttattggtttccaaagaaacaaaccaaaccaaccagctcttggatgtgaagataaaatagtgcttttttgaaatggagaggaaaaacttggggaggaagaggcctgctgtgggggcatcggagccagccatgtaagaatcagagctgctccttcctgtgaatcctaggtggccctatgtcttctgtggagttacagtataaagcagggagctaattaagagtattaaaacttaaaaccattttttgactctgattttaagtacatttttatatgtcagttgctgcccttcacactaccaggccctgcagccacagtgttctgttggagaaacttggggaagtgttttctgaaccagttctttttcttggggtagagcgtgaaatccagacctgtttttgaaaggacagcacaggaggagaaaagtgactgggacgatgcttcctctcatccaaaacacatgcagagtcacatcctcatcctagtgtttggcagtttgagaccgctaccctgaacttaagagctttaaatatgagggttgtgtttctgggggggttatttttttggtgtgtgtgtgtgtgtattgtgcttagaaaggttgcagatttcatcttcacctaccaagaggcggccgcctccttggacaagccgctcatggaccattagacttgagaagacgacccacgtggtgactgcaaagccctgggtacttgccttcatgttctggtttggttttccctttttctgctgctcttggcagcagcctggtcatcatctgcttgtgggagtgggaaatgggtattttagacccaacacaggttctaaatttaaaacaaataataattggaacaaataaaggttcttgtacccagagtgattctacatgggaaaaacaaaccagcttttttcagagagtgaccgaataggaagaagggattcagaaatatgatgtagtagaacatgccctgcaggaagaaaatgttttctctcctgcgtatgttaagaggaaatcagtttaaaatgcctgctaatcaaatgtcgactcagctaaccatatgtccaggttgctgcagagtttctttcaaatctgagtgttgcctgctgaactcggaggggagtttggagaaattttagacagcagctctgtgttctttttttgccgcagccaataagataatagcagaattagccaatcctaaaaccttctaaagacgatttttgagcatcccactgggattatttaatttttctttttgacgtgtgtttttagtttagaagtgctgtattccacaaggtttaagtcagtgaggttggaagataccctatcttttttattcaaaaagcacaatcaatcttttgtttgaaaatctatataaagtacaacttgcttttagcatgattattttcctaaataaaaagacaaagaatttacttactttatgttaattacgggcatgaagcaaaaggttttctttaaaaaaaaaaaaaagtgcagtgatgtagggctgtggttagttaaccgtactgagttatccatctagcatctgtggcttgctggaagggtagtattaactatttaacatgtaatggtgtacttcactcttacctagcacgctgtcttctcattgctttgggggagggagggtctctctgctggcactgtctaacttgcttacctgctgactttgcagtttgcttgtgctatgacatttattgtaggtgctatttagggtaggcttaaagtgctgggtggtgatttgagttcaaacaataaaaaattgtattttttcaatattgtataaacaatagtgttctaattaccttaaaaaaaaataatgaccagttaagaattgcttttgatcttgtcaaaaaactgaatagaccccagtttcgggaaggtgtgtgagcagtgccatgactctgccccttacctaatcccacatctctctaatgataagacattggctcgcctctgaccagagccccagcaccagagagcggaagatgcagaattgtcaaatgacctgctgggggaggttgtaggagtttagcagatttgagtgtggctgcagagagagagagtgtgtgtatgtgtgcacatgtgtgagagtgtgagcgagagtgtgtgtgtgtccatctaagtgtgtgtgatgaaggtgggataaggctcctctgttagtgctggaagctcctgtaattgccgcatggatcccactgtgccctcttgttctgtgcaagtctgtcctgtctgggcactaaccttggtcccatgcatgtttatgttctgggtggggctttgcctctccactgggaaactgacttttgctgggttgaacagagtcccttatgctttttgtcctctccctgcgcctgggagaggtgggagtaggagcccaaacacacaggtacagaaagatctggaagaaggcctggcagtgaatccaaggactctgggcccccaacaatagatggtagcgtaagtctggagcagcggtgtttcaccaccaaatgcctttccaggctgcccttccaacactcaggagagcatccagatccctgggcagaggctctacattcttggctttagaggtggtggcagcggcagcaggtcagagccacttctggcggtttccctcccctttttagtgcccatagtttttggatcctcccttgagttttaccagcacaagccattctttgcccctgttcacataactgagctcaagctcttgccaaacaccaacaagcaagatggttgcaacctggcaacattgaatccaccacccttgggctccctctggaagccccagcaccggggggcttttgggcacagggtcagtggtagccatcttagacactgacatttggctttgtcgtcaatttcatcaccctccttgaggttactgtgcagtttcaaccagcattttatcctagtgaggtcattatcaggagttgccatatcatctctccagtacctaacatttctcatccacttcaaaagctgttctgactgccagctggctgatctaagctcctgaggaatgtctcctctcaaaggaatttttccctccaaaggccccctgaagtcctagttggcattggcctggcacatgctttatgttaggcctcccgttgggatggctgagaatcatgaaagacagatcctccgctagcctctgtgggtcaagtttctggacaccaagtctctgggaactagtgtttgattttaaatggcatgtggcccttccttgtttcagtgacttagaaaagtaaaagccatttaaaaaagttagcaagattttttatcgacttcccaactgggcttccagccttgttgaatgaaatcatctatctctgattgggcgcaacgaactgcatttctttggacttctgaatccatgtttgtgctttctctggcccgtgaacacctcggcgattctgttagggatgggatgagtgggaggaagccctttgagaagggggagccggccctgtcatgcgcaggttttccactcatctgaggaagagccagggctctgaatttagcctaacactcatcttggctgtgggcttgggaagaaatggccattatttacagattgtatttggtacatattgtgtgatacttgaaaagataaaagggactgccagcccctaactgaaatctgaagctttttatcgcttatttttcctcgccctgtctcctcccttccacctttctccttgcattgtgatgatctagtaggcacgtctgtcaacaggacacatgcctcctctgactataacctcttaatagttgtgtataatgaaaactgtaaacttttttaaataaacgtgtatataccttggcaaa

SEQ ID NO: 137616 - protein, 158 aa, Artificial Sequence [sequence omitted]

SEQ ID NO: 137617 - DNA, 477 bp, Artificial Sequence
  derived and/or modified sequence
atgagcggcatcgccctgagcagactggcccaggagagaaaggcctggagaaaggaccaccccttcggcttcgtggccgtgcccaccaagaaccccgacggcaccatgaacctgatgaactgggagtgcgccatccccggcaagaagggcaccccctgggagggcggcctgttcaagctgagaatgctgttcaaggacgactaccccagcagcccccccaagtgcaagttcgagccccccctgttccaccccaacgtgtaccccagcggcaccgtgtgcctgagcatcctggaggaggacaaggactggagacccgccatcaccatcaagcagatcctgctgggcatccaggagctgctgaacgagcccaacatccaggaccccgcccaggccgaggcctacaccatctactgccagaacagagtggagtacgagaagagagtgagagcccaggccaagaagttcgcccccagctag

SEQ ID NO: 137618 - DNA, 477 bp, Artificial Sequence
  derived and/or modified sequence
atgtcggggatcgccttaagcaggctagctcaggagagaaaggcctggaggaaggaccaccctttcggtttcgtggcagttcccactaaaaaccccgatggaacaatgaatttgatgaactgggagtgtgctatacccggaaagaagggtaccccatgggaagggggactctttaaactccgaatgctcttcaaggacgactaccccagctcaccccccaagtgtaagttcgagccacccctgtttcatcctaacgtatacccctccggaaccgtctgtctcagtatattagaagaggacaaagattggcgccccgccatcaccatcaaacaaattttgctgggaatacaggagctgttgaacgagcccaacatccaggatccagctcaagccgaagcatatactatttactgtcagaatcgtgtggagtatgaaaaaagggttcgcgcccaggccaaaaaattcgctcccagctag

SEQ ID NO: 137619 - DNA, 477 bp, Artificial Sequence
  derived and/or modified sequence
atgtcaggcatcgctttgagtagactggcccaggagcgcaaagcctggaggaaagaccatccgttcgggtttgtagcagtcccgaccaaaaatcccgatggcaccatgaacctgatgaattgggagtgcgctatccctggaaaaaaaggcactccttgggaagggggactttttaagctaaggatgctgtttaaggacgattatccgtctagccctcctaagtgtaaatttgagcccccgctctttcacccaaacgtttaccctagcgggactgtttgcttgagcatactggaagaggacaaagactggcggcctgccataacaataaaacagatactactcggtattcaggagcttctgaatgagcctaatatccaagacccggctcaggctgaagcctacacaatctactgccagaaccgcgttgaatacgaaaagcgggtgcgagcccaggccaagaagttcgccccgagttag

SEQ ID NO: 137620 - DNA, 477 bp, Artificial Sequence
  derived and/or modified sequence
atgtccggtatcgcgttatccagactggctcaggaaagaaaggcatggagaaaggatcatccatttggctttgtggcggtgcccaccaagaaccccgacggaaccatgaacttgatgaactgggagtgtgccataccggggaagaaaggaacaccatgggagggcggactcttcaagctcagaatgttgtttaaagacgactacccatctagccccccgaagtgcaaattcgagcctccgctgtttcatccgaatgtgtatcctagtgggacagtatgtctttctatccttgaggaggataaggactggagacccgccatcaccatcaaacagattttactgggaattcaggagttgttgaacgaacctaatattcaggatcccgcccaggcggaggcttacaccatttattgccaaaatcgcgttgaatacgagaagagagttcgggcccaagctaaaaaatttgctccatcatag

SEQ ID NO: 137621 - DNA, 477 bp, Artificial Sequence
  derived and/or modified sequence
atgtctggcattgccttgtcaagactggcgcaggagcggaaagcttggcggaaagatcacccctttggttttgtcgccgtgccaacaaaaaatcccgatggcactatgaacctgatgaattgggagtgcgctatcccaggtaagaagggtacaccatgggaaggcgggttatttaaattaagaatgttgtttaaggatgactatccgtcctcacctcccaagtgcaaatttgagccgcctctcttccaccccaatgtctacccaagcggtaccgtttgtttgtcaatacttgaggaggacaaagactggaggcccgccatcacaataaaacagatcttacttggaatacaggagctgctcaacgagcccaatatccaggatcccgctcaagcagaggcatacacgatctattgccaaaaccgcgttgaatacgaaaagcgcgtgagagcgcaggcaaaaaaattcgccccctcttag

SEQ ID NO: 137622 - DNA, 477 bp, Artificial Sequence
  derived and/or modified sequence
atgagcggaattgccctgtcaagactggcccaggagaggaaagcatggcgtaaagatcacccttttggatttgtggccgttcctaccaagaatcccgacggcaccatgaacctgatgaattgggagtgtgcgatcccaggcaagaaggggaccccatgggagggcggccttttcaaactgcggatgctgttcaaggatgactaccccagttccccccccaaatgtaagtttgagccgcctctgtttcacccgaacgtgtatccttctggcacggtctgcctgagcatactcgaggaggacaaagattggaggcccgcaattacaatcaagcagatccttctgggcatccaagagctgctcaatgaaccaaacattcaagacccagcacaggcagaggcatataccatctactgtcagaaccgggtggagtatgagaaacgcgtcagggcccaggcgaaaaaattcgctccaagctag

SEQ ID NO: 137623 - DNA, 477 bp, Artificial Sequence
  derived and/or modified sequence
atgagcggaatagccctgagccggctggcccaggagcgcaaagcctggagaaaggaccatccatttggcttcgtcgctgtgccgactaagaacccagatggcacaatgaatctaatgaactgggaatgcgccatccccggaaagaaaggaaccccctgggagggcgggttatttaaactgcggatgttgttcaaagacgattacccgagcagccctcctaaatgcaaattcgagccacccctctttcacccaaatgtctatccgtcaggaaccgtgtgcctgagtatccttgaggaagataaggattggagaccggccatcaccatcaagcagatactcctgggcattcaggaactgctgaatgagccaaacattcaggaccctgcccaagcagaggcctatactatttattgtcagaacagagtagaatacgagaagcgggtgcgcgctcaagcaaaaaaattcgccccgtcttag

SEQ ID NO: 137624 - DNA, 477 bp, Artificial Sequence
  derived and/or modified sequence
atgagcggcatcgccctgagccggctggcccaggagaggaaggcctggaggaaggaccaccccttcggctttgtggccgtgcccaccaagaacccagatggcaccatgaacctgatgaactgggagtgtgccatccctgggaagaagggcaccccctgggagggcggcctcttcaagctgaggatgctgttcaaggatgactaccccagcagcccccccaagtgcaagtttgagcccccactcttccaccccaacgtgtaccccagcggcaccgtgtgcctgagcatcctggaggaggacaaggactggaggcctgccatcaccatcaagcagatcctgctgggcatccaggagctgctgaatgagcccaacatccaggaccctgcccaggccgaggcctacaccatctactgccagaacagagtggagtatgagaagagggtgcgggcccaggccaagaagtttgcccccagctag

SEQ ID NO: 137625 - DNA, 477 bp, Artificial Sequence
  derived and/or modified sequence
atgagcggcatcgccctgagccggctggcccaggagcggaaggcctggcgcaaagatcaccctttcggattcgttgccgtgccgacgaaaaatccggacgggacaatgaacctcatgaattgggaatgtgcgatacccggcaagaaaggcacgccctgggagggtgggttgtttaaactgcgaatgctgtttaaagatgattacccctcctctccaccaaaatgcaagttcgaaccccccctgtttcatcccaatgtgtacccatctggcacggtgtgtttgtctatcctggaggaagacaaagattggcggcccgccattacgattaagcagatattgctaggcatccaagagctgctcaacgagcctaatattcaggacccagcccaagctgaggcttacactatatattgtcagaaccgggtggagtacgaaaaacgggtgcgagcccaggctaaaaaattcgcccctagctag

SEQ ID NO: 137626 - DNA, 477 bp, Artificial Sequence
  derived and/or modified sequence
atgagcggcatcgccctgagccggctggcccaggagcggaaggcctggaggaaggaccacccatttggcttcgttgctgttcccaccaaaaatcccgatggcacaatgaacctcatgaactgggagtgcgcaatcccagggaagaagggcacaccatgggagggaggcctgttcaaactaagaatgctgttcaaggatgactacccaagcagtccgccaaagtgcaagttcgaaccgcccttatttcatccaaacgtctacccctctggcaccgtatgtcttagtattttggaggaggacaaggattggagacccgctatcactataaaacagattctgctcgggatccaagaactgttaaatgagccaaacattcaggacccagctcaggcagaagcttatacaatttattgccaaaacagagtggagtatgaaaaacgcgtgcgtgcccaggctaagaaatttgcacctagttag

SEQ ID NO: 137627 - DNA, 477 bp, Artificial Sequence
  derived and/or modified sequence
atgagcggcatcgccctgagccggctggcccaggagcggaaggcctggcgtaaggatcatcccttcggcttcgtggccgtgccaactaaaaacccagatggcactatgaacctgatgaactgggaatgcgcaatcccagggaagaaaggtacgccttgggagggagggctttttaagttaaggatgctgtttaaggatgattatccctcatccccaccaaagtgcaagttcgagcctccattgtttcacccaaacgtgtatccgagtggcacggtgtgcctttcgattcttgaggaggacaaagattggcgacccgcaataactattaagcagatactcttagggatacaagaacttctgaacgaacccaatatacaggaccccgcacaggccgaggcgtatacgatctattgtcagaatcgcgtcgagtacgagaagagagtgcgcgcccaggcgaaaaaatttgcaccatcttag

SEQ ID NO: 137628 - DNA, 477 bp, Artificial Sequence
  derived and/or modified sequence
atgagcggcatcgccctgagccggctggcccaggagcggaaggcctggcggaaggaccatcctttcggctttgtggccgtccctacaaagaatccggacggcacaatgaatctgatgaactgggagtgcgctatccccggcaaaaaaggaacaccatgggaagggggcctgttcaagctcaggatgctatttaaagatgactatccatcgagtccgcctaagtgtaaatttgaaccgccattgtttcaccctaacgtgtacccaagtggaacagtttgcctctccattctcgaagaggacaaagactggcgcccagccattaccataaagcagatactcctgggaatccaggagcttttaaatgagcctaacatacaagatcccgctcaggcggaggcctacacaatatactgccagaacagagtggagtacgagaagagagtccgagctcaggcaaagaagtttgcgcctagttag

SEQ ID NO: 137629 - DNA, 477 bp, Artificial Sequence
  derived and/or modified sequence
atgagcggcatcgccctgagccggctggcccaggagcggaaggcctggaggaaggaccacccctttgggttcgtcgctgtcccgactaaaaacccagatggaactatgaatctaatgaattgggaatgcgctatccccggcaaaaaagggacgccatgggagggagggctgtttaagctgaggatgctcttcaaggacgattacccatcgtcccctcccaagtgcaagttcgagccccccctgtttcaccccaacgtttatccatctggtacggtgtgtctgtcaatcctggaggaggacaaagattggcgccctgcaataactattaaacaaattctattgggtatccaggagctcctgaatgagcccaatatccaagatccagctcaggccgaagcctacaccatctactgccagaaccgtgttgagtatgaaaagcgggtgcgggcgcaagccaagaaattcgcacccagttag

SEQ ID NO: 137630 - DNA, 477 bp, Artificial Sequence
  derived and/or modified sequence
atgagcggcatcgccctgagccggctggcccaggagcggaaggcctggcgcaaggaccacccatttggctttgtggcagtgcccacgaaaaaccccgatgggacaatgaaccttatgaactgggagtgcgccatccctggcaagaaaggaacaccctgggaggggggactatttaaacttaggatgctgtttaaagacgactatccatcctcaccacccaaatgcaaatttgaaccccccctttttcaccctaatgtatacccaagtgggacggtctgcctgtccattcttgaagaagataaagactggcggcccgctattacaattaaacaaatcttgttggggattcaggaattactgaatgaacctaatatccaggatccagcacaggccgaggcgtacactatttactgtcagaaccgagtcgaatatgagaagcgcgtgagggcacaggcaaagaagttcgcaccatcatag

SEQ ID NO: 137631 - DNA, 477 bp, Artificial Sequence
  derived and/or modified sequence
atgtcgggtatcgcactctctcgcctggctcaggaaagaaaggcctggcggaaggaccacccattcggattcgtcgccgttccgaccaagaatccggacggcacgatgaacttaatgaactgggaatgtgccatccctggaaagaaagggacaccgtgggaggggggattgtttaagctgcggatgttgttcaaagacgactacccaagcagccctcccaagtgtaagtttgaacctcctctgttccatcctaatgtctaccctagcgggaccgtgtgtctttccattttggaagaagataaggattggcgtccagccattacgattaagcagatcttacttggcatccaggaacttctgaatgagccaaacatccaggatcccgcacaggccgaagcttatactatttactgtcagaaccgagtcgagtacgaaaagagagtccgggctcaggcaaagaagttcgcgcctagctag

SEQ ID NO: 137632 - DNA, 477 bp, Artificial Sequence
  derived and/or modified sequence
atgtctggaattgcattgtctcggttggctcaggagcgtaaagcctggcgcaaggatcatcccttcggattcgtggctgtccccactaagaatcccgacggcacaatgaacttgatgaactgggaatgtgccatccctggaaagaaaggcacgccatgggaagggggtttgtttaaactgaggatgctgttcaaggacgattatcctagcagccctcccaagtgcaagtttgagccccctttgtttcacccgaacgtatacccctccggcacggtgtgcctcagcatcttagaggaagacaaagactggcgtcctgcaattaccataaagcaaatcctgcttggtatccaggagcttttgaatgagcccaacatccaagatcccgcacaggcggaggcgtatactatttactgccagaaccgtgtggaatacgagaaacgcgtgagggcccaggcgaaaaagtttgccccaagttag

SEQ ID NO: 137633 - DNA, 477 bp, Artificial Sequence
  derived and/or modified sequence
atgtccgggatcgctctgtccagactggcgcaggaacgaaaggcctggcggaaagatcatcccttcggttttgtggctgtgccaacaaagaatcccgatggcacaatgaatctaatgaattgggagtgtgctattccagggaaaaagggaaccccatgggaagggggactgtttaaactgcgtatgctgttcaaagacgattatcctagctccccgccaaagtgcaagttcgaacctccgttgtttcacccgaatgtgtatccttctggcaccgtatgtttaagcatcctcgaggaagataaggattggcggcctgctatcacgataaagcagattctgctgggaatccaggagttactgaatgagccaaatatacaggatcctgcccaggcagaggcatatacgatctattgtcagaacagagtagagtatgaaaaaagagtgagagcccaggccaaaaaatttgcgccttcctag

SEQ ID NO: 137634 - DNA, 477 bp, Artificial Sequence
  derived and/or modified sequence
atgtccggcatcgcactgtcgcgactggcccaggagagaaaggcgtggcgtaaagaccacccctttggctttgtcgccgtgccgactaagaatcctgatggcactatgaatttgatgaactgggagtgtgccattcctggcaaaaagggcaccccctgggaggggggactttttaaattgagaatgctttttaaggacgattacccttcttcacctccaaaatgcaagtttgagcctcctttgtttcaccccaatgtgtatccaagcggaaccgtgtgtctgtcgattcttgaggaggacaaagactggcggccagccatcaccatcaaacagatcttactcggcatccaagaactgctcaacgagcccaacattcaggaccccgctcaggccgaagcgtacaccatctactgtcagaaccgtgtggagtacgagaagcgagtcagggcacaagctaagaagtttgctccgtcgtag

SEQ ID NO: 137635 - DNA, 477 bp, Artificial Sequence
  derived and/or modified sequence
atgtctggcatagccctttctcggctagcccaggaaagaaaagcctggcgtaaagatcaccctttcgggttcgtggccgtgcctaccaagaacccagacggcacaatgaaccttatgaattgggagtgtgccattccaggcaagaaagggacaccatgggagggtgggctgtttaaactgagaatgttatttaaggacgactaccctagctcaccccctaaatgtaagttcgagcccccactcttccaccctaacgtctatccaagtggtacagtctgcctctctatccttgaggaagacaaggattggcggccagccattactatcaagcaaatcctgttagggattcaggagctgctaaacgaacctaacattcaggacccagctcaggcagaagcctacactatctactgtcagaaccgagtagagtacgaaaaacgggtgcgtgctcaggcaaaaaaattcgcacctagctag

SEQ ID NO: 137636 - DNA, 477 bp, Artificial Sequence
  derived and/or modified sequence
atgtcgggcattgcactaagcagattggcccaagagagaaaggcttggcgcaaagatcaccccttcggcttcgtggcggtgccgacaaaaaacccggacggaaccatgaacctgatgaattgggagtgcgccatcccaggcaagaagggcaccccgtgggaagggggtctgttcaaactgcgcatgttgtttaaggatgactacccttcctcaccccctaagtgtaagtttgagcctcccctgttccatccaaatgtttatccttccgggactgtatgcctttctatcctggaggaagacaaggactggcggccagccattactattaaacagattctactagggattcaggagctgttgaatgagcccaatatacaagaccccgctcaagccgaagcttacaccatttactgtcagaatcgggtggagtacgagaagagggtgcgcgctcaggccaagaagttcgctccctcttag

SEQ ID NO: 137637 - DNA, 2822 bp, Artificial Sequence
  derived and/or modified sequence
agcgtcaccgtcctgcgacgcttcagaggatccttaggcctcagtggtctttgacccccggccccaggacctgaccccaaggaaacctccgggacctgtggctggagagggactttgaacatgtcggggatcgccctcagcagactcgcccaggagaggaaagcatggaggaaagaccacccatttggtttcgtggctgtcccaacaaaaaatcccgatggcacgatgaacctcatgaactgggagtgcgccattccaggaaagaaagggactccgtgggaaggaggcttgtttaaactacggatgcttttcaaagatgattatccatcttcgccaccaaaatgtaaattcgaaccaccattatttcacccgaatgtgtacccttcggggacagtgtgcctgtccatcttagaggaggacaaggactggaggccagccatcacaatcaaacagatcctattaggaatacaggaacttctaaatgaaccaaatatccaagacccagctcaagcagaggcctacacgatttactgccaaaacagagtggagtacgagaaaagggtccgagcacaagccaagaagtttgcgccctcataagcagcgaccttgtggcatcgtcaaaaggaagggattggtttggcaagaacttgtttacaacatttttgcaaatctaaagttgctccatacaatgactagtcacctgggggggttgggcgggcgccatcttccattgccgccgcgggtgtgcggtctcgattcgctgaattgcccgtttccatacagggtctcttccttcggtcttttgtatttttgattgttatgtaaaactcgcttttattttaatattgatgtcagtatttcaactgctgtaaaattataaacttttatacttgggtaagtcccccaggggcgagttcctcgctctgggatgcaggcatgcttctcaccgtgcagagctgcacttggcctcagctggctgtatggaaatgcaccctccctcctgccgctcctctctagaaccttctagaacctgggctgtgctgcttttgagcctcagaccccaggtcagcatctcggttctgcgccacttcctttgtgtttatatggcgttttgtctgtgttgctgtttagagtaaataaactgtttatataaaggttttggttgcattattatcattgaaagtgagaggaggcggcctcccagtgcccggccctccccacccacctgcagccccaccgcgggccaggaccaggctctccatctgcttcggatgcacgcaggctgtgaggctctgtcttgccctggatctttgtaaacagggctgtgtacaaagtgctgctgaggtttctgtgctccccgcatctgcgggctgtagagcgctgggcagctaagatctgcataggtcgggattggcatcgagaccctggcaactgcaccggtgccagctgtcttgggggccacaaggccaggtccagaccagggctgggggctgcctgaggactcctatccgggcagcctgctggcgggggttcccctcttcagtggccaggtcacagggatggagctgcgctgtgcatagggtgccacctcaggtgtctgtcccttgtgtcctcaggaggcagccttgctaccacccgtggcaaacgccaggtgctttttctgggagagcccacagccgtggccctccagggcttccccgacccttagcgccaggtagagggccctgggcagcctgtgtctggaattcttcgtcctgaggccacctgagtgtggtctgtcctggggaggctgtgcgcctcagcagccgtcctgacgctgagccctctgcaaaggttgggccggccaggcctcttggggctgcctgagccactgcaggaagtggcctggctgggaagttgggtgccggtcacctcccagcaggaaggcacagtggacagagatgggaagccctgggggacacagcccggtgctcccagccctccaacctctggctcccaacccagtctccccatcctagcgagcttggccctcctcagtttcgtttcaagccttggggctggagctggccctgctgccctggcaccccccggtggctggagctgggtccccgtggcccaagtgcagggtcccaagagggcagggcggggctccccaaaggagcaaagaatgcagggagggcggtccagggccctgggaaggggagctcggcaccctccaggtccgtgtgggactccagccgctgttggctgggaatcgaagttagaggtgacttccaaaggccccccgagccggcagtgccccccaccacccctccagcgactctgcggtgccagtgccttgttggcttttccggctacgcaccctgcagtcactgagctctcggtctgacgtctgatgtttgtggtttgtttataacacggggccttacctggggaattcagctggtttgaatatttgtagcccgctcccagaatgtcttattttgtaatgactgaactacatttagtaatagttacacatgtatatggttaatacatatggaaattcaatatattttgtagttaacgtattctgaagtaacggatgtttctcgccaatcgtagtgacttcagctaacgaaatgttcttttgtagtaccacggtcctcggcctaacgaaggacgtgaaccttgtaagaggagagctctgaaacgcggtcacctttgtttagtggaagggaaagtgtgttcccggcatgaggtgcctcggaattagtaaagaattgtgggcaatggattaaccactgtatctaagaatccaccattaaagcatttgcacagac

SEQ ID NO: 137638 - DNA, 2967 bp, Artificial Sequence
  derived and/or modified sequence
gtcaccgtcctgcgacgcttcagaggatccttaggcctcagtggtctttgacccccggccccaggacctgaccccaaggaaacctccgggacctgtggctggagaggtgaccgccaggcatccggggagcctttggagatctcggcttcctttttcccccgctgcttgccggcgtgtcctcgggtggacgcgggcagcccgaaggggagtttacagacgctccctcacatcggggacgcggctcctttaagggcggactttgaacatgtcggggatcgccctcagcagactcgcccaggagaggaaagcatggaggaaagaccacccatttggtttcgtggctgtcccaacaaaaaatcccgatggcacgatgaacctcatgaactgggagtgcgccattccaggaaagaaagggactccgtgggaaggaggcttgtttaaactacggatgcttttcaaagatgattatccatcttcgccaccaaaatgtaaattcgaaccaccattatttcacccgaatgtgtacccttcggggacagtgtgcctgtccatcttagaggaggacaaggactggaggccagccatcacaatcaaacagatcctattaggaatacaggaacttctaaatgaaccaaatatccaagacccagctcaagcagaggcctacacgatttactgccaaaacagagtggagtacgagaaaagggtccgagcacaagccaagaagtttgcgccctcataagcagcgaccttgtggcatcgtcaaaaggaagggattggtttggcaagaacttgtttacaacatttttgcaaatctaaagttgctccatacaatgactagtcacctgggggggttgggcgggcgccatcttccattgccgccgcgggtgtgcggtctcgattcgctgaattgcccgtttccatacagggtctcttccttcggtcttttgtatttttgattgttatgtaaaactcgcttttattttaatattgatgtcagtatttcaactgctgtaaaattataaacttttatacttgggtaagtcccccaggggcgagttcctcgctctgggatgcaggcatgcttctcaccgtgcagagctgcacttggcctcagctggctgtatggaaatgcaccctccctcctgccgctcctctctagaaccttctagaacctgggctgtgctgcttttgagcctcagaccccaggtcagcatctcggttctgcgccacttcctttgtgtttatatggcgttttgtctgtgttgctgtttagagtaaataaactgtttatataaaggttttggttgcattattatcattgaaagtgagaggaggcggcctcccagtgcccggccctccccacccacctgcagccccaccgcgggccaggaccaggctctccatctgcttcggatgcacgcaggctgtgaggctctgtcttgccctggatctttgtaaacagggctgtgtacaaagtgctgctgaggtttctgtgctccccgcatctgcgggctgtagagcgctgggcagctaagatctgcataggtcgggattggcatcgagaccctggcaactgcaccggtgccagctgtcttgggggccacaaggccaggtccagaccagggctgggggctgcctgaggactcctatccgggcagcctgctggcgggggttcccctcttcagtggccaggtcacagggatggagctgcgctgtgcatagggtgccacctcaggtgtctgtcccttgtgtcctcaggaggcagccttgctaccacccgtggcaaacgccaggtgctttttctgggagagcccacagccgtggccctccagggcttccccgacccttagcgccaggtagagggccctgggcagcctgtgtctggaattcttcgtcctgaggccacctgagtgtggtctgtcctggggaggctgtgcgcctcagcagccgtcctgacgctgagccctctgcaaaggttgggccggccaggcctcttggggctgcctgagccactgcaggaagtggcctggctgggaagttgggtgccggtcacctcccagcaggaaggcacagtggacagagatgggaagccctgggggacacagcccggtgctcccagccctccaacctctggctcccaacccagtctccccatcctagcgagcttggccctcctcagtttcgtttcaagccttggggctggagctggccctgctgccctggcaccccccggtggctggagctgggtccccgtggcccaagtgcagggtcccaagagggcagggcggggctccccaaaggagcaaagaatgcagggagggcggtccagggccctgggaaggggagctcggcaccctccaggtccgtgtgggactccagccgctgttggctgggaatcgaagttagaggtgacttccaaaggccccccgagccggcagtgccccccaccacccctccagcgactctgcggtgccagtgccttgttggcttttccggctacgcaccctgcagtcactgagctctcggtctgacgtctgatgtttgtggtttgtttataacacggggccttacctggggaattcagctggtttgaatatttgtagcccgctcccagaatgtcttattttgtaatgactgaactacatttagtaatagttacacatgtatatggttaatacatatggaaattcaatatattttgtagttaacgtattctgaagtaacggatgtttctcgccaatcgtagtgacttcagctaacgaaatgttcttttgtagtaccacggtcctcggcctaacgaaggacgtgaaccttgtaagaggagagctctgaaacgcggtcacctttgtttagtggaagggaaagtgtgttcccggcatgaggtgcctcggaattagtaaagaattgtgggcaatggattaaccactgtatctaagaatccaccattaaagcatttgcacagac

SEQ ID NO: 137639 - DNA, 2977 bp, Artificial Sequence
  derived and/or modified sequence
gcgggcaacggggagcgctcggcggcgcgggaggcgctcggggccgggcggcaggagcggcgcgcgaggcaggcgtgcagagggcagccccgcgttaggccccgccccgcgcgccccgcccgcgccagggtcctcggagctgctctggctgcgcgcggagcgggctccggagggaagtcccgagacaaagggaagcgccgccgccgccgccccgctcggtcctccacctgtccgctacgctcgccggggctgcggccgcccgagggactttgaacatgtcggggatcgccctcagcagactcgcccaggagaggaaagcatggaggaaagaccacccatttggtttcgtggctgtcccaacaaaaaatcccgatggcacgatgaacctcatgaactgggagtgcgccattccaggaaagaaagggactccgtgggaaggaggcttgtttaaactacggatgcttttcaaagatgattatccatcttcgccaccaaaatgtaaattcgaaccaccattatttcacccgaatgtgtacccttcggggacagtgtgcctgtccatcttagaggaggacaaggactggaggccagccatcacaatcaaacagatcctattaggaatacaggaacttctaaatgaaccaaatatccaagacccagctcaagcagaggcctacacgatttactgccaaaacagagtggagtacgagaaaagggtccgagcacaagccaagaagtttgcgccctcataagcagcgaccttgtggcatcgtcaaaaggaagggattggtttggcaagaacttgtttacaacatttttgcaaatctaaagttgctccatacaatgactagtcacctgggggggttgggcgggcgccatcttccattgccgccgcgggtgtgcggtctcgattcgctgaattgcccgtttccatacagggtctcttccttcggtcttttgtatttttgattgttatgtaaaactcgcttttattttaatattgatgtcagtatttcaactgctgtaaaattataaacttttatacttgggtaagtcccccaggggcgagttcctcgctctgggatgcaggcatgcttctcaccgtgcagagctgcacttggcctcagctggctgtatggaaatgcaccctccctcctgccgctcctctctagaaccttctagaacctgggctgtgctgcttttgagcctcagaccccaggtcagcatctcggttctgcgccacttcctttgtgtttatatggcgttttgtctgtgttgctgtttagagtaaataaactgtttatataaaggttttggttgcattattatcattgaaagtgagaggaggcggcctcccagtgcccggccctccccacccacctgcagccccaccgcgggccaggaccaggctctccatctgcttcggatgcacgcaggctgtgaggctctgtcttgccctggatctttgtaaacagggctgtgtacaaagtgctgctgaggtttctgtgctccccgcatctgcgggctgtagagcgctgggcagctaagatctgcataggtcgggattggcatcgagaccctggcaactgcaccggtgccagctgtcttgggggccacaaggccaggtccagaccagggctgggggctgcctgaggactcctatccgggcagcctgctggcgggggttcccctcttcagtggccaggtcacagggatggagctgcgctgtgcatagggtgccacctcaggtgtctgtcccttgtgtcctcaggaggcagccttgctaccacccgtggcaaacgccaggtgctttttctgggagagcccacagccgtggccctccagggcttccccgacccttagcgccaggtagagggccctgggcagcctgtgtctggaattcttcgtcctgaggccacctgagtgtggtctgtcctggggaggctgtgcgcctcagcagccgtcctgacgctgagccctctgcaaaggttgggccggccaggcctcttggggctgcctgagccactgcaggaagtggcctggctgggaagttgggtgccggtcacctcccagcaggaaggcacagtggacagagatgggaagccctgggggacacagcccggtgctcccagccctccaacctctggctcccaacccagtctccccatcctagcgagcttggccctcctcagtttcgtttcaagccttggggctggagctggccctgctgccctggcaccccccggtggctggagctgggtccccgtggcccaagtgcagggtcccaagagggcagggcggggctccccaaaggagcaaagaatgcagggagggcggtccagggccctgggaaggggagctcggcaccctccaggtccgtgtgggactccagccgctgttggctgggaatcgaagttagaggtgacttccaaaggccccccgagccggcagtgccccccaccacccctccagcgactctgcggtgccagtgccttgttggcttttccggctacgcaccctgcagtcactgagctctcggtctgacgtctgatgtttgtggtttgtttataacacggggccttacctggggaattcagctggtttgaatatttgtagcccgctcccagaatgtcttattttgtaatgactgaactacatttagtaatagttacacatgtatatggttaatacatatggaaattcaatatattttgtagttaacgtattctgaagtaacggatgtttctcgccaatcgtagtgacttcagctaacgaaatgttcttttgtagtaccacggtcctcggcctaacgaaggacgtgaaccttgtaagaggagagctctgaaacgcggtcacctttgtttagtggaagggaaagtgtgttcccggcatgaggtgcctcggaattagtaaagaattgtgggcaatggattaaccactgtatctaagaatccaccattaaagcatttgcacagac

SEQ ID NO: 137640 - DNA, 3109 bp, Artificial Sequence
  derived and/or modified sequence
cagggtcctcggagctgctctggctgcgcgcggagcgggctccggagggaagtcccgagacaaagggaagcgccgccgccgccgccccgctcggtcctccacctgtccgctacgctcgccggggctgcggccgcccgaggctgccctgaggatctgtgtttggtgaaaaggagccaaattcacctgcagggcaggcggctctagcagcttcagaagcctggtgccctggcgacactggacctgccttggcttctttgatcccaaccccacccccgatttctgctctgctgactggggaagtcatcgtgccacccagaacctgagtgcgggcctctcagagctccttcgtccgtgggtctgccggggactgggccttgtctccctaacgagtgccagggactttgaacatgtcggggatcgccctcagcagactcgcccaggagaggaaagcatggaggaaagaccacccatttggtttcgtggctgtcccaacaaaaaatcccgatggcacgatgaacctcatgaactgggagtgcgccattccaggaaagaaagggactccgtgggaaggaggcttgtttaaactacggatgcttttcaaagatgattatccatcttcgccaccaaaatgtaaattcgaaccaccattatttcacccgaatgtgtacccttcggggacagtgtgcctgtccatcttagaggaggacaaggactggaggccagccatcacaatcaaacagatcctattaggaatacaggaacttctaaatgaaccaaatatccaagacccagctcaagcagaggcctacacgatttactgccaaaacagagtggagtacgagaaaagggtccgagcacaagccaagaagtttgcgccctcataagcagcgaccttgtggcatcgtcaaaaggaagggattggtttggcaagaacttgtttacaacatttttgcaaatctaaagttgctccatacaatgactagtcacctgggggggttgggcgggcgccatcttccattgccgccgcgggtgtgcggtctcgattcgctgaattgcccgtttccatacagggtctcttccttcggtcttttgtatttttgattgttatgtaaaactcgcttttattttaatattgatgtcagtatttcaactgctgtaaaattataaacttttatacttgggtaagtcccccaggggcgagttcctcgctctgggatgcaggcatgcttctcaccgtgcagagctgcacttggcctcagctggctgtatggaaatgcaccctccctcctgccgctcctctctagaaccttctagaacctgggctgtgctgcttttgagcctcagaccccaggtcagcatctcggttctgcgccacttcctttgtgtttatatggcgttttgtctgtgttgctgtttagagtaaataaactgtttatataaaggttttggttgcattattatcattgaaagtgagaggaggcggcctcccagtgcccggccctccccacccacctgcagccccaccgcgggccaggaccaggctctccatctgcttcggatgcacgcaggctgtgaggctctgtcttgccctggatctttgtaaacagggctgtgtacaaagtgctgctgaggtttctgtgctccccgcatctgcgggctgtagagcgctgggcagctaagatctgcataggtcgggattggcatcgagaccctggcaactgcaccggtgccagctgtcttgggggccacaaggccaggtccagaccagggctgggggctgcctgaggactcctatccgggcagcctgctggcgggggttcccctcttcagtggccaggtcacagggatggagctgcgctgtgcatagggtgccacctcaggtgtctgtcccttgtgtcctcaggaggcagccttgctaccacccgtggcaaacgccaggtgctttttctgggagagcccacagccgtggccctccagggcttccccgacccttagcgccaggtagagggccctgggcagcctgtgtctggaattcttcgtcctgaggccacctgagtgtggtctgtcctggggaggctgtgcgcctcagcagccgtcctgacgctgagccctctgcaaaggttgggccggccaggcctcttggggctgcctgagccactgcaggaagtggcctggctgggaagttgggtgccggtcacctcccagcaggaaggcacagtggacagagatgggaagccctgggggacacagcccggtgctcccagccctccaacctctggctcccaacccagtctccccatcctagcgagcttggccctcctcagtttcgtttcaagccttggggctggagctggccctgctgccctggcaccccccggtggctggagctgggtccccgtggcccaagtgcagggtcccaagagggcagggcggggctccccaaaggagcaaagaatgcagggagggcggtccagggccctgggaaggggagctcggcaccctccaggtccgtgtgggactccagccgctgttggctgggaatcgaagttagaggtgacttccaaaggccccccgagccggcagtgccccccaccacccctccagcgactctgcggtgccagtgccttgttggcttttccggctacgcaccctgcagtcactgagctctcggtctgacgtctgatgtttgtggtttgtttataacacggggccttacctggggaattcagctggtttgaatatttgtagcccgctcccagaatgtcttattttgtaatgactgaactacatttagtaatagttacacatgtatatggttaatacatatggaaattcaatatattttgtagttaacgtattctgaagtaacggatgtttctcgccaatcgtagtgacttcagctaacgaaatgttcttttgtagtaccacggtcctcggcctaacgaaggacgtgaaccttgtaagaggagagctctgaaacgcggtcacctttgtttagtggaagggaaagtgtgttcccggcatgaggtgcctcggaattagtaaagaattgtgggcaatggattaaccactgtatctaagaatccaccattaaagcatttgcacagac

SEQ ID NO: 137641 - DNA, 1137 bp, Artificial Sequence
  derived and/or modified sequence
gcctgctttttctcaggctgccctgaggatctgtgtttggtgaaaaggagccaaattcacctgcagggcaggcggctctagcagcttcagaagcctggtgccctggcgacactggacctgccttggcttctttgatcccaaccccacccccgatttctgctctgctgactggggaagtcatcgtgccacccagaacctgagtgcgggcctctcagagctccttcgtccggactttgaacatgtcggggatcgccctcagcagactcgcccaggagaggaaagcatggaggaaagaccacccatttggtttcgtggctgtcccaacaaaaaatcccgatggcacgatgaacctcatgaactgggagtgcgccattccaggaaagaaagggactccgtgggaaggaggcttgtttaaactacggatgcttttcaaagatgattatccatcttcgccaccaaaatgtaaattcgaaccaccattatttcacccgaatgtgtacccttcggggacagtgtgcctgtccatcttagaggaggacaaggactggaggccagccatcacaatcaaacagatcctattaggaatacaggaacttctaaatgaaccaaatatccaagacccagctcaagcagaggcctacacgatttactgccaaaacagagtggagtacgagaaaagggtccgagcacaagccaagaagtttgcgccctcataagcagcgaccttgtggcatcgtcaaaaggaagggattggtttggcaagaacttgtttacaacatttttgcaaatctaaagttgctccatacaatgactagtcacctgggggggttgggcgggcgccatcttccattgccgccgcgggtgtgcggtctcgattcgctgaattgcccgtttccatacagggtctcttccttcggtcttttgtatttttgattgttatgtaaaactcgcttttattttaatattgatgtcagtatttcaactgctgtaaaattataaacttttatacttgggtaagtcccccaggggcgagttcctcgctctgggatgcaggcatgcttctcaccgtgcagagctgcacttggcctcagctggctgtatggaaatgcaccctccctcctgccgctcctctctaga

SEQ ID NO: 137642 - DNA, 1842 bp, Artificial Sequence
  derived and/or modified sequence
gggaagcgagagctgtgagtcctcaagtcgcagctgggctgctccacgtgggagtggagggtggaggaacgtgtggagtttcggagtccagcccagtgcggagacagccttgaaaccgtggttggcgggcgctccactccgctctgggctcgaaccctgcctgaccatagctgtgccccccactttctccctgtctggcccctggctccccccccctcacttagaggagggcacggggaagggcaaacggtccagagggcgggcggcctgcgggctcctctgcatcatgtgaggagggcgtggggaaggacatcccggtggggcccggtctggggctgcctccagcccgggctgcctgtcttggacttagtcgtggacctggaggccagtgcccggctggcccctgtcaccctctcgctgtgacgccagcgcctgctgactggaggacccaggttccttcgcctgctttttctcaggctgccctgaggatctgtgtttggtgaaaaggagccaaattcacctgcagggcaggcggctctagcagcttcagaagcctggtgccctggcgacactggacctgccttggcttctttgatcccaaccccacccccgatttctgctctgctgactggggaagtcatcgtgccacccagaacctgagtgcgggcctctcagagctccttcgtccgtgggtctgccggggactgggccttgtctccctaacgagtgccaggtgaggctgcggcggctccgacgcaggtggagctgctgacctggcccctttctgcggctgcgagggactttgaacatgtcggggatcgccctcagcagactcgcccaggagaggaaagcatggaggaaagaccacccatttggtttcgtggctgtcccaacaaaaaatcccgatggcacgatgaacctcatgaactgggagtgcgccattccaggaaagaaagggactccgtgggaaggaggcttgtttaaactacggatgcttttcaaagatgattatccatcttcgccaccaaaatgtaaattcgaaccaccattatttcacccgaatgtgtacccttcggggacagtgtgcctgtccatcttagaggaggacaaggactggaggccagccatcacaatcaaacagatcctattaggaatacaggaacttctaaatgaaccaaatatccaagacccagctcaagcagaggcctacacgatttactgccaaaacagagtggagtacgagaaaagggtccgagcacaagccaagaagtttgcgccctcataagcagcgaccttgtggcatcgtcaaaaggaagggattggtttggcaagaacttgtttacaacatttttgcaaatctaaagttgctccatacaatgactagtcacctgggggggttgggcgggcgccatcttccattgccgccgcgggtgtgcggtctcgattcgctgaattgcccgtttccatacagggtctcttccttcggtcttttgtatttttgattgttatgtaaaactcgcttttattttaatattgatgtcagtatttcaactgctgtaaaattataaacttttatacttgggtaagtcccccaggggcgagttcctcgctctgggatgcaggcatgcttctcaccgtgcagagctgcacttggcctcagctggctgtatggaaatgcaccctccctcctgccgctcctctctagaaccttctagaacctgggctgtgctgcttttgagcctcagaccccaggtcagcatctcggttctgcgccacttcctttgtgtttatatggcgttttgtctgtgttgctgtttagagtaaataaactgtttatataaa

SEQ ID NO: 137643 - protein, 154 aa, Artificial Sequence [sequence omitted]

SEQ ID NO: 137644 - DNA, 465 bp, Artificial Sequence
  derived and/or modified sequence
atggccgccagcagaagactgatgaaggagctggaggagatcagaaagtgcggcatgaagaacttcagaaacatccaggtggacgaggccaacctgctgacctggcagggcctgatcgtgcccgacaaccccccctacgacaagggcgccttcagaatcgagatcaacttccccgccgagtaccccttcaagccccccaagatcaccttcaagaccaagatctaccaccccaacatcgacgagaagggccaggtgtgcctgcccgtgatcagcgccgagaactggaagcccgccaccaagaccgaccaggtgatccagagcctgatcgccctggtgaacgacccccagcccgagcaccccctgagagccgacctggccgaggagtacagcaaggacagaaagaagttctgcaagaacgccgaggagttcaccaagaagtacggcgagaagagacccgtggactag

SEQ ID NO: 137645 - DNA, 465 bp, Artificial Sequence
  derived and/or modified sequence
atggctgccagccgacgcttgatgaaggagttagaggaaattagaaaatgcggcatgaagaattttcggaacatccaagtggacgaggcaaacctcctgacctggcaaggcctaatagtacctgacaatcctccatacgacaaaggggcgtttcggatagaaataaatttccccgctgaatacccttttaagccacccaagatcaccttcaaaaccaaaatctaccatccaaacatcgacgagaagggtcaggtgtgtctacccgtgataagtgctgagaactggaaaccagcaaccaagactgaccaagtcatccagtccctgatcgctctggttaatgaccctcagccagaacacccgctgagagcagacttggctgaagaatacagtaaggacaggaagaaattctgcaagaatgctgaggagttcactaagaaatatggcgaaaagcgaccagtcgactag

SEQ ID NO: 137646 - DNA, 465 bp, Artificial Sequence
  derived and/or modified sequence
atggccgccagccggcggctgatgaaggagctggaggagatcagaaaatgtggcatgaagaacttcaggaacatccaggtggatgaggccaacctgctgacctggcagggcctgattgtgcctgacaaccccccctatgacaagggggccttcagaattgagatcaacttccctgctgagtaccccttcaagccacccaagatcaccttcaagaccaagatctaccaccccaacattgatgagaagggccaggtgtgcctgcccgtcatctctgctgagaactggaagccagccaccaagacagaccaggtgatccagagcctgattgccctggtgaatgacccccagcctgagcaccccctgcgggctgacctggccgaggagtacagcaaggacaggaagaagttctgcaagaatgctgaggagttcaccaagaagtatggagagaagaggcctgtggactag

SEQ ID NO: 137647 - DNA, 465 bp, Artificial Sequence
  derived and/or modified sequence
atggccgccagccggcggctgatgaaggagctggaggagatccggaaatgcgggatgaagaattttaggaacatccaagtagacgaggccaacctcttgacctggcaaggattgatagtacccgataatcccccttacgataaaggggcttttaggatagaaatcaactttcccgccgagtatccttttaagccacctaagatcactttcaagaccaaaatctaccatcccaatatcgatgagaaaggtcaggtatgtctgcccgtgatttctgccgaaaattggaaaccagccaccaagacagaccaggtaattcagagcctcatcgccttggttaacgacccccagccagagcaccccctaagggcggacctcgccgaggagtattccaaggatcgaaagaagttttgcaagaatgcggaagagtttacaaagaaatatggagagaagagaccagttgattag

SEQ ID NO: 137648 - DNA, 465 bp, Artificial Sequence
  derived and/or modified sequence
atggcggcatcccggaggctgatgaaggagctcgaggagattcgcaagtgcggcatgaagaatttccgcaacatccaggtggatgaggctaacctgttgacttggcagggcctgattgtccctgacaacccaccttatgacaagggggcatttcgtattgaaattaactttcccgctgagtatcccttcaaaccgcctaaaattacctttaaaacgaagatctatcatcccaacattgacgaaaagggacaagtgtgcctgcccgtgatcagcgccgagaattggaagcccgctacaaaaaccgaccaggtgattcaatcccttatagccctggttaacgatcctcaaccagagcatcccttgagggccgacctggccgaagagtattcaaaggaccgaaagaagttctgcaaaaacgccgaagaattcaccaagaaatacggggaaaagagacccgtggattag

SEQ ID NO: 137649 - DNA, 3028 bp, Artificial Sequence
  derived and/or modified sequence
aaacgctgaggcccagtctgtgcggttcacttgcgttcctccacgcgccccccagcacagtgggaagcacacagtaggtgctccgctctgctcctgtgccccgccccgcggcccctcccccgctccaggaagtgcgggggctccagccgcccggccggccgcgatgcattctggggaaggagcagcaccaaatccaagatggcggccagcaggaggctgatgaaggagcttgaagaaatccgcaaatgtgggatgaaaaacttccgtaacatccaggttgatgaagctaatttattgacttggcaagggcttattgttcctgacaaccctccatatgataagggagccttcagaatcgaaatcaactttccagcagagtacccattcaaaccaccgaagatcacatttaaaacaaagatctatcacccaaacatcgacgaaaaggggcaggtctgtctgccagtaattagtgccgaaaactggaagccagcaaccaaaaccgaccaagtaatccagtccctcatagcactggtgaatgacccccagcctgagcacccgcttcgggctgacctagctgaagaatactctaaggaccgtaaaaaattctgtaagaatgctgaagagtttacaaagaaatatggggaaaagcgacctgtggactaaaatctgccacgattggttccagcaagtgtgagcagagaccccgtgcagtgcattcagacaccccgcaaagcaggactctgtggaaattgacacgtgccaccgcctggcgttcgcttgtggcagttactaactttctacagttttcttaatcaaaagtggtctaggtaacctgtaaagaaaggattaaaaatttaagatgttctagttctgctctctttgttttaaaaatcactgcttcaatctacttcaaaagaatggtgtttcttttcttgtccaattttatccaaaatcttcaagttacatttaacccataaggtttaaaaaaaaggaaaaaaaacggttgtggttccctttcttccctacccttgccactcccactttctggcaccgagtttatttttcacttacttacttccccagaccccgggctcgcctccacaaaggagaaaagactgccctggcggtcctggtggcttttcttagcatgtgtggcactgttgcccagtgtgggagttggtttaaattctcctgactccagtttataacatccttttaaaaaatttaaaaacaaacagccacacccctcctccagtccttctcctcagttcttgtgtgaaactccagctgatgttaccacagtaacatcagttaattgggcaagccctgatgtcagtgtgtgtaactgacctctggcctggcctgcacagagaagccctataatcacaggtctgtggtggccccgaaatggggggcctgctagtcaggaggatgctgtgcacactgtgtgtgatgaatctcgccagaaaggctcctgaggtcccaggttggcacttctccctgcagccattgtagaagatctgctggtccttgcaggcaaagctacagccagaatgtccgtttgaaactcctagctcatctgtcaccgagcttcatccgaatgtgccacggagcttgctctccacttcctccgtgcagtggccctgccacagccctccctcggcacactttgaccctttgtaggattggaattagcaggactcggctatttaaagcaccagtctggggtcgcctgggcccctgctgaccccctcctccagagcagccagcccagcccgggaacaagacggacttcctctcccttcggactcacagcctttgcagagtcaagctccacttgaagctcactcagtaatatcctttcaatgtgttttatattgttttgactgcctttttttgtagaaataaaaattgaccttagaatttatcgtcagataaacttgtaaagatttgaatattaatgtcttttcaaggcaaatgggattgtccccgcactagtagagaatccatgtcgctctgacaccccaaggaagccgacgatccaaatgccgtgtgtcaccaaccccgcttctgccactggcggcttcccttcttggctcttgggggggactagatcctgtggagaagatgacttaaactttgctttttgttttaattttaattctataacttgagatctttccggggcctacaggcgtgtaagacagcttggtctggtctgtgcagaagtggggagtgatgggcaggttcggcagcctaacattgttcaggcgcatggcccctgcggtgtgtacacgaactcggcttcttttgtcctaggtacgccaagggcaggtttctggagactcccttgtgcccgggatggcaagggcaccgggctggcgtttccacatctgtcttcattagcagaaaagtgatgatggattttatttcactcacactccagtttgtaataaaatgccaaattctgtcagctatccaaacaagccaccatttgttcttgttgcttctctggatccagaaatgttgccattcttggaaactgtcccattgcttcgtatttctgccaacgtagctctgcctgcctgtcaacccctcactgcactctgctcatcacgggaggatacctgtgtgccggcagcccctcagggactctcagccctggcactggcaccccagggttggccccgtcagcagaggcttggctttcgagccagtgggtgtctctcctttgggcctgggcggcttgctcctgccagccatgccttcagggtaggctctgagcaagctggcgaacagccctggctgctccaaaaccaaaaagctgggtcctctggaggaggggcgagctgtggagcagccacccactgctgccccaagctcactcaggaattcacacccgcctggtttcttgaagtgtgctgggtccttccctctgctccctactccccaccacggcagagaataggctttctaagatgctgcgatcccgttctgctgcccgtaataaaaatgctctcagacactg

SEQ ID NO: 137650 - protein, 152 aa, Artificial Sequence
  derived and/or modified sequence
MAGLPRRIIKETQRLLAEPVPGIKAEPDESNARYFHVVIAGPQDSPFEGGTFKLELFLPEEYPMAAPKVRFMTKIYHPNVDKLGRICLDILKDKWSPALQIRTVLLSIQALLSAPNPDDPLANDVAEQWKTNEAQAIETARAWTRLYAMNNI

SEQ ID NO: 137651 - DNA, 459 bp, Artificial Sequence
  derived and/or modified sequence
atggcagggctccccagaaggataataaaagagacccagagacttctggctgaaccagtccctggcataaaggccgaaccggatgaatccaacgctaggtactttcacgtggtgatcgccggtcctcaggacagcccttttgagggcggcactttcaagctggaactttttctcccagaggaatatcctatggctgcgcctaaagttcgcttcatgaccaagatctatcatcctaatgttgataagctggggcgcatttgcctcgatatcttgaaagacaagtggtctcccgctctgcagattcggaccgtactcctctccatccaagctctgttgagtgctcctaatcccgacgacccattggcaaatgacgtggcagagcagtggaaaactaatgaagcccaagccatagaaacggcaagagcttggacccgtctatatgccatgaacaatatttag

SEQ ID NO: 137652 - DNA, 459 bp, Artificial Sequence
  derived and/or modified sequence
atggccggcctgccccggcgcatcatcaaggagacccagaggctgctggccgagcctgtgcccggcatcaaggccgagccagatgagagcaatgcccgctacttccacgtggtgattgctggcccccaggacagcccctttgaaggaggcaccttcaagctggagctgttcctgcctgaggagtaccccatggccgcccccaaggtgcgcttcatgaccaagatctaccaccccaacgtggacaagctgggccgcatctgcctggacatcctgaaggacaagtggagccctgccctgcagatcagaacagtgctgctgagcatccaggccctgctgagcgcccccaacccagatgaccccctggccaatgatgtggccgagcagtggaagaccaatgaggcccaggccattgaaacagcccgggcctggacccggctgtatgccatgaacaacatctag

SEQ ID NO: 137653 - DNA, 459 bp, Artificial Sequence
  derived and/or modified sequence
atggccggcctgccccggcggatcatcaaggagacccagcggctgctggccgagccagtcccaggcattaaggctgagcctgatgaatcgaacgcccggtattttcacgtcgtgattgccggcccacaggattccccgttcgagggaggcacctttaaactggagctgtttctaccagaagaatacccaatggcagctccaaaagtgcggtttatgactaaaatctaccaccctaacgtggataagctgggcagaatctgcctagacattctcaaagacaagtggagcccagctctgcagatacggaccgtgcttctctcaattcaggcactcctttccgctcctaaccccgatgatcctttagcgaacgacgtggccgagcagtggaagactaacgaagctcaggcaattgaaacagccagggcctggaccaggttgtacgccatgaacaatatttag

SEQ ID NO: 137654 - DNA, 459 bp, Artificial Sequence
  derived and/or modified sequence
atggcgggactgccccgacggatcataaaggaaacgcagagactgcttgccgaacctgtcccaggtattaaagcagaacctgacgagtctaacgccagatacttccacgtggtgatagcaggcccacaggattctcccttcgagggaggcacttttaaactcgagctctttctcccagaggaatatcctatggctgcgcctaaagtccgcttcatgactaaaatttatcaccctaatgtggacaagctcgggcgaatttgtctggatattcttaaggacaagtggagccctgccctacagatccgcacagttctgctctctatccaagcattactgtctgcacctaatccagatgacccactggcgaatgacgtggcagaacaatggaaaactaacgaggcccaggccatagaaacagcccgagcctggacaaggttgtacgccatgaacaacatttag

SEQ ID NO: 137655 - DNA, 3671 bp, Artificial Sequence
  derived and/or modified sequence
ggttaagagagacgcgcgcgcagtcgcgcgcgggtcgtgccgtaccaccgtcgcgggcaggctcggccacgagcgccagagccccgcgcctcccctcgcggcctgtcccaagtccctgccccgcaacagagcgtcacttccgccatccccggcagcggttggggcggggcgcacgggggagggggccaggtcggagggaagcccgcccgtgcccgagcccgcgcccgagcagggactacatttcccgaggggcctcggcggcggctgcggcgacgggcgcggcaacgtcccccggaagtggagcccgggacttccactcgtgcgtgaggcgagaggagccggagacgagaccagaggccgaactcgggttctgacaagatggccgggctgccccgcaggatcatcaaggaaacccagcgtttgctggcagaaccagttcctggcatcaaagccgaaccagatgagagcaacgcccgttattttcatgtggtcattgctggccctcaggattccccctttgagggagggacttttaaacttgaactattccttccagaagaatacccaatggcagcccctaaagtacgtttcatgaccaaaatttatcatcctaatgtagacaagttgggaagaatatgtttagatattttgaaagataagtggtccccagcactgcagatccgcacagttctgctatcgatccaggccttgttaagtgctcccaatccagatgatccattagcaaatgatgtagcggagcagtggaagaccaacgaagcccaagccatagaaacagctagagcatggactaggctatatgccatgaataatatttaaattgatacgatcatcaagtgtgcatcacttctcctgttctgccaagacttcctcctctttgtttgcatttaatggacacagtcttagaaacattacagaataaaaaagcccagacatcttcagtcctttggtgattaaatgcacattagcaaatctatgtcttgtcctgattcactgtcataaagcatgagcagaggctagaagtatcatctggattgttgtgaaacgtttaaaagcagtggcccctccctgcttttattcatttcccccatcctggtttaagtataaagcactgtgaatgaaggtagttgtcaggttagctgcaggggtgtgggtgtttttattttattttattttattttatttttgaggggggaggtagtttaattttatgggctcctttcccccttttttggtgatctaattgcattggttaaaagcagctaaccaggtctttagaatatgctctagccaagtctaactttatttagacgctgtagatggacaagcttgattgttggaaccaaaatgggaacattaaacaaacatcacagccctcactaataacattgctgtcaagtgtagattccccccttcaaaaaaagcttgtgaccattttgtatggcttgtctggaaacttctgtaaatcttatgttttagtaaaatattttttgttattctactttgcctttgtacagtttattttactgtgtttatttcattttcccaatttgacaatcgtattttaaaattgaaactgatggaacattctttcttggtcttcaccatctgacaaattgaatggcaagaggtggattttgccagtttcttttcactgatgcagatttgtgttaagatagtactgaatggagtatttataaactggccctgagcatgcataaagcatcagtatctgacctttttttaaccttctaggaatttgaaataaatgtgtttgtgttgtctgattagatgatcattggtgtcttgccacaatgtttaaaaattactgtacaggaaagtcacagcaaagatagcagttgtgactgacatgtaggactttcacagttgtgccacatttttgcctaaaatttgggttatgacatttttcttggttcttatctgaaaatttcatctgtaacctttcatgtgtgttaagaaacactgatctgatcatttgggatttgctgaggcatttgtgagtcttccttataaacctgatgagcagatctcaactatctagcttgtgtgtcatcagaaaggtttatccctttgagagtatcaagtcctcagttaatgattcttgctttcatccctccagtatttgctgtgggagctcgttttattctttaatttggaattcagtaatttttcttctttattgacgaattcctcccctcacaaaactgttctttcccacctctctccatatctaattcctgattcttgttatttttaagtcataaatgtagccagtcataaatacataaatgttaaccttcgggttgcaaccttgtctcttgcagtttaaggtaatggatattgtagcccatttgaattttcttcactcttattctcgtaattctggagtttcttcagattgtggtgtattttattgtgctcctatgtaagatgaagaattaactattaaaattacattttcaacatacaaaagcttttgatgactggtaactggtatccttccaaataaatgcattgcttggtaacaaatgttagcttaattcagaatgaaatagttaacaaccctaatattgtaaaatttgaaaactgatagcagctgtcatttataacaattcttgggctgtttaaagggtacatttgactatagctaaggaaattgaatctcactttaaaaatgaaccacacaaaacttcaagaaacgaaatagaaatcaacatttactgcccgtaatattgctcatggttatagctagtatcacatagtgatttacaaaccatgaaattccagatttaaatctgttgcactacaaaaatgtctaaatgatgtctgctaaatttgtgagttatagaagtacagaaataagtcattttcatttcaaatgcagtgaatttctaatttcatggtatcatatttttttcctttgcagttttggtaagactcccccattactttgctaagacttgctttctcaaccagtgggatgaaacgagtgccagtgtgttgactgagccttcttaggacttaaggggctctgggagaggccaaggcagcagttgaaaactgcagcttcacctggcctttgggcctgttttccctggcccacacagtgtggctggttaaaacattctgaatttgatgccaacatttttaaaaattgggagatttgcatgaaaatccagaattcgggtaacttttgaatgatctgaagatctggcaacagtagacctgacccacctttgtgcacgggacttaactgagaggatctgagtagcagacaccctaagagcatgtcattgtcttctcaccagttactctccagttggctagagtcccctccgagcacacctgctagtccttcccccttgtaagcctttgactttgtaatccctgggctaaaggaaacacattattcaacaaaagtgtttcatgtttgcccactagttgttggggatgattaggtggtgagtgaatggcatggggctttcctttggggaccatatactctaatggggaagggggacagacaaatagttgtaactctgtcatggaaaagagaagtaacttggacagacttttggattcaggccagatgaacatctccaggcagagggaacagcagcatctgcaaagtc

SEQ ID NO: 137656 - DNA, 459 bp, Artificial Sequence
  derived and/or modified sequence
atggccggcctgcccagaagaatcatcaaggagacccagagactgctggccgagcccgtgcccggcatcaaggccgagcccgacgagagcaacgccagatacttccacgtggtgatcgccggcccccaggacagccccttcgagggcggcaccttcaagctggagctgttcctgcccgaggagtaccccatggccgcccccaaggtgagattcatgaccaagatctaccaccccaacgtggacaagctgggcagaatctgcctggacatcctgaaggacaagtggagccccgccctgcagatcagaaccgtgctgctgagcatccaggccctgctgagcgcccccaaccccgacgaccccctggccaacgacgtggccgagcagtggaagaccaacgaggcccaggccatcgagaccgccagagcctggaccagactgtacgccatgaacaacatctag

SEQ ID NO: 137657 - protein, 145 aa, Artificial Sequence
  derived and/or modified sequence
MAVSTGVKVPRNFRLLEELEEGQKGVGDGTVSWGLEDDEDMTLTRWTGMIIGPPRTNYENRIYSLKVECGPKYPEAPPSVRFVTKINMNGINNSSGMVDARSIPVLAKWQNSYSIKVVLQELRRLMMSKENMKLPQPPEGQTYNN

SEQ ID NO: 137658 - DNA, 438 bp, Artificial Sequence
  derived and/or modified sequence
atggccgtgagcaccggcgtgaaggtgcccagaaacttcagactgctggaggagctggaggagggccagaagggcgtgggcgacggcaccgtgagctggggcctggaggacgacgaggacatgaccctgaccagatggaccggcatgatcatcggcccccccagaaccaactacgagaacagaatctacagcctgaaggtggagtgcggccccaagtaccccgaggccccccccagcgtgagattcgtgaccaagatcaacatgaacggcatcaacaacagcagcggcatggtggacgccagaagcatccccgtgctggccaagtggcagaacagctacagcatcaaggtggtgctgcaggagctgagaagactgatgatgagcaaggagaacatgaagctgccccagccccccgagggccagacctacaacaactag

SEQ ID NO: 137659 - DNA, 438 bp, Artificial Sequence
  derived and/or modified sequence
atggctgtgtccacgggggtgaaggtgccccgaaacttccgcctgttggaggagttagaggaaggccaaaaaggcgtaggcgatggcacagtttcctgggggttggaggacgatgaagatatgacgcttacaaggtggacagggatgataatcggtcctcctcgcactaattatgaaaaccggatttattctcttaaggtcgaatgcgggccaaagtatcccgaggctccgcccagtgtgaggtttgtgactaaaataaatatgaatggtatcaataactcctctggtatggttgacgcaaggtcgatccccgtgttagcaaagtggcagaacagctatagtattaaagttgtgttgcaggaactgcgtaggctgatgatgtctaaggaaaacatgaaattgccccagccccctgagggccagacctataataactag

SEQ ID NO: 137660 - DNA, 438 bp, Artificial Sequence
  derived and/or modified sequence
atggctgtgtccactggagtgaaggtgcccaggaacttccggctgctggaggagctggaggagggccagaagggcgtgggagatggcaccgtgtcctggggcctggaggatgatgaggacatgaccctgacccgctggacaggcatgatcatcggcccccccaggaccaactatgaaaatcgcatctacagcctgaaggtggagtgtggccccaagtacccagaggcccctccttctgtgcgctttgtgaccaagatcaacatgaatggcatcaacaacagcagcggcatggtggatgcccggagcatccctgtgctggccaagtggcagaacagctacagcatcaaggtggtgctgcaggagctgcggcggctgatgatgagcaaggagaacatgaagctgccccagcccccagagggccagacctacaacaactag

SEQ ID NO: 137661 - DNA, 438 bp, Artificial Sequence
  derived and/or modified sequence
atggccgtgagcaccggcgtgaaggtgccccggaacttccggctgctggaagagctagaggaggggcagaaaggagtgggggatggcacagtgagttggggtctcgaagatgatgaggatatgaccctgacccggtggacaggcatgatcatcggcccaccccgtacgaattatgaaaaccggatctactctttgaaggtcgaatgtggccccaagtatcctgaagccccaccaagtgtcagatttgtgacaaagatcaacatgaatgggatcaacaacagttcagggatggtggacgcaagatccatcccagtacttgccaaatggcagaatagctattcaattaaagtagtgctgcaggaattaaggcgactcatgatgtccaaagaaaacatgaagctgcctcagccccctgaagggcagacctacaataattag

SEQ ID NO: 137662 - DNA, 438 bp, Artificial Sequence
  derived and/or modified sequence
atggcagtctccactggcgtgaaggtgccacgcaatttcagacttctcgaggaactcgaagaaggccagaagggggttggggatggcactgtttcctggggactggaagatgatgaggatatgacactcacccggtggaccggaatgataataggccctccaaggacaaactatgaaaacaggatctactcactcaaggtggaatgcggtcctaagtacccagaagcccctccgagcgtcagattcgtgactaaaatcaatatgaacggcatcaataacagcagcggcatggtcgacgctcggtcgattcccgtcctggcgaagtggcaaaactcctattccatcaaggtcgtccttcaagagctgcgtcggctgatgatgtcaaaggaaaatatgaagctgcctcagccccctgaaggccagacctacaacaactag

SEQ ID NO: 137663 - DNA, 3616 bp, Artificial Sequence
  derived and/or modified sequence
gacgcgcgacggttcgtgcgtgcgtgcgggcggctgcgtcgggctgcaggagaagatggcggtctccacaggagttaaagttcctcgtaattttcgcttgttggaagaacttgaagaaggacaaaaaggagtaggcgacggtacagttagctggggccttgaagatgatgaagatatgacacttacaaggtggacaggcatgattattgggccaccaaggacaaattatgaaaacagaatatatagcctgaaagtagaatgtggacctaaatacccagaagctcctccgtcagttagatttgtaacaaaaattaatatgaacggaataaataattccagtgggatggtggatgcccggagcataccagtgttagcaaaatggcaaaattcatatagcattaaagttgtacttcaagagctaagacgtctaatgatgtccaaagaaaatatgaagcttccacagccaccagaaggacaaacatacaacaattaattttagtggatctcaaacttgtcttaaatcaacaaccttctactcatgttaatgtcttgattaaatatcacaatgcaaaatacacattaagtaaaagaattccagctggtaaacatgacctggacatttgtaagaatatatttaatatatgtacacccattatgttttcaggtaacaggaggaaaaatgcagcacaattttttttctcttgaaaggcactgtcatttaaacataaacctggagtactcgaaatagaattcaggtttacaagatgaaagcgtgtggagaagtgtcagatggcagtggaagcatgtgtgtttctaaaaagtaaaaatctcaagaaaacagaaatggcatgctttacccatcttacttagtgaaagagagctgcagttgaaattgtttaaaaagtagcaggtacaatgaatattgtcacagatgtgttaatttttgaagcaatgtgggtgctgactactagtagtatcaaaaatatgttcaggattgttttgatacctgtatttataataaaaaatgttggggggagttgatgaattcctgttaaaagctgttcttgtgtgttacatgtaacagacatggtaaatatttgtttacagtctttgtttaacaaaccatgcatttaagtttaagtgaagtcaacaaaaaggaaataggtgtatggatatgtgattttgagattaaagttagtcttaaaatgtaaataaaatgtgaaacgtgtcctcagagactgtgccatttctattatgttgatgtatatgtacagtaccttgccagggaagcaaaaattggaattattgtagcttttcatgtatacacacttttatttaccctattttgtgtacttcttgtgaattataatttgcagactatttcagaaaagaaattatctagtttaatttcttctttggacaaggagtcctaggtattatattttgagtttgatttcaccagaaataataatattaaaaagatctttgcattctggcagttcttttaggattataggttgcaaattatccaaatatatatcccattttttaaagcataatatcttttttagttgtttttctgtgaagcttttggttaataaatagggtcaactaattggagacttttctcttccaattagggcttttaatactaacaaggataactttattcattcctcgtattctctactctaacaaatatgaactctgaagttgaaaagtcatttatgttccgctttcaccaaagtgacgtgaggctttaggtcactgtttcacttcaaagtactggatccaaagctttgttgaaaatgctgtttgatgaattcactgaagaatatagaaaggtggtcaggtaaagtctacttttattttgtcaagcttaataatttgtgtcatactttaccccagtatatataggcaaaccaaaaccttatcaaatattaaattagttgtttaaactttgcttataaagtattggccatgtggtggctcatgccgctaatcccagcactttgggaggctgagacgggcagatcacttgaggtcaggagcttgagaccagcctggccaacatgatgaaaccctgtctctactaaaaatacaaaaaattagccaggtgtggtggtgggtacttgtagtcccagctactcgggaggctgggcaggagaactacttgaaactggcagacagaggttgcagtgccgagagcgcaccactgctccagcctgggcaacagagcaagactccatctcaaaaaaaaaaaaaaaaagaaaaatattaataattgaccttggctgtatattaaaatagttacttttatagtagagcacatttctcaaacatgccctgaaaggcttttatcaagctcatataaagttaaagctttgagctaccttttcttggccaataaagtcactgacagtttatgtaaacattaatttcaacatggctgttgcattttaattatcaaaaatgtttaaaatgctttaagatgacacatagagaacatacacatacatacaaattagtgcatttgtaatttgttaaatttgaaatgaactattaccttgaaatatagtctttaaaaatttttaatggttaaagattaaattgaatgaaactgtagtctaatggtaactgatgatctgaatccgtctctctgataacctcctttccattttgaaaatgtgtcttattatacatggaagctagtaactacgtgaatgctgttggcaggatgagggtctgggtacctcagtctcttgtcctgtttccttcccccaaatccaccattgtgaagttgccaaccccctgccgccttcccctgccaagtacatgttgtcagagtcagccctataatgttcatttcccctcttgtttgtgggattatggatctctgcagaaatctgcatgccaattaacccatttctaaagcagaatccattttgcatgtcacaatcaagatgtacttggcaatctaagacacactgggagactgtaagaggaattaatatagaaaagctcttaattataataacatttggaagaaatttttcctttgttttgtaaagtggctaaggttgtaggagtgtgtggtatttattaccttttaaatgaactgtaaatttgccttagaaatttgtttaaaaggctagcaagtgagacccttgaggatgatcatatactaataaagattaccaaaagaaacttcttgtcctgttaggtcagtgttatgatttaatggttttaattacttaaccaattttaagaattgacaatttttaaaaatatttttttctaccattctaaagtaatgtcttttgttgtgggtttatgtgtaactacaggattttggaacataaacattttgaaggatagtcaatggtatttagtcttggatataaaaatagagaaaatttatagctttatgttattaaaataatttatcacacagagtgatttgaggttttcgcagagtagatttgtttgactcatggtttattagtctggattacttaagaacaatatgttgattttaatgttaattcccactaaatatataatattgataaatacatgtgaaattaatattgtttggaaaatgtagaggacacag

SEQ ID NO: 137664 - protein, 124 aa, Artificial Sequence
  derived and/or modified sequence
MRQAGRAALLAALLLLVQLCPGSSQRSPEAAGVQDPSLRWSPGARNQGGGARALLLLLAERFPRRAGPGRLGLGTAGERPRRDNPSLSIDLTFHLLRTLLELARTQSQRERAEQNRIIFDSVGK

SEQ ID NO: 137665 - DNA, 375 bp, Artificial Sequence
  derived and/or modified sequence
atgagacaggccggcagagccgccctgctggccgccctgctgctgctggtgcagctgtgccccggcagcagccagagaagccccgaggccgccggcgtgcaggaccccagcctgagatggagccccggcgccagaaaccagggcggcggcgccagagccctgctgctgctgctggccgagagattccccagaagagccggccccggcagactgggcctgggcaccgccggcgagagacccagaagagacaaccccagcctgagcatcgacctgaccttccacctgctgagaaccctgctggagctggccagaacccagagccagagagagagagccgagcagaacagaatcatcttcgacagcgtgggcaagtag

SEQ ID NO: 137666 - DNA, 375 bp, Artificial Sequence
  derived and/or modified sequence
atgcgtcaggcaggacgggctgccctgctggccgccctgctgttgctcgtccagctgtgcccaggctcaagtcaaagatcaccagaggctgctggtgttcaggatccttctctcaggtggtctccaggagcaagaaaccagggcgggggggcccgggcgctgttactattattggcagaacggtttcctcgaagagctggacctggccgtctgggcctgggcacagcgggggagcggcccaggcgtgacaatcctagcctgtctatcgatctgacctttcacctcctccggacattgctggagctagccagaacacaatctcagcgtgagcgtgcggagcagaacagaatcattttcgacagcgtgggtaaatag

SEQ ID NO: 137667 - DNA, 375 bp, Artificial Sequence
  derived and/or modified sequence
atgaggcaggccggccgggccgccctgctggccgccctgctgctgctggtgcagctgtgccccggcagcagccagaggagccctgaggccgccggcgtgcaggaccccagcctgcgctggagccctggggccaggaaccagggcggcggggcccgggccctgctgctgctgctggccgagcgcttcccccggcgggccggccctggccgcctgggcctgggcacagctggggagcggccccggcgggacaaccccagcctgagcattgacctgaccttccacctgctgcggaccctgctggagctggcccggacccagagccagcgggagcgggcagagcagaaccgcatcatctttgattctgtgggcaagtag

SEQ ID NO: 137668 - DNA, 375 bp, Artificial Sequence
  derived and/or modified sequence
atgcggcaggccggccgggccgccctgctggccgccctgctgctgctggtgcagttgtgtcccgggtcatctcaacgcagcccagaggcagctggagtgcaggatccgtcactgaggtggtcacctggcgctcgcaatcaagggggtggggcccgagccctgctcctgctgctggccgagagatttcccaggagggccggacccgggaggctcgggctgggcacagccggggagcggccccgcagggacaacccttccttaagtatcgaccttacttttcatcttttacggacactcctggaactggccaggacgcagagtcagcgcgaacgcgccgagcagaatcgtataatcttcgattcagttggaaaatag

SEQ ID NO: 137669 - DNA, 375 bp, Artificial Sequence
  derived and/or modified sequence
atgcggcaggccggaagagcagcactcttggcggctcttctgctgctcgtccaactgtgcccagggtcttcccagcgctcccccgaggcagccggagttcaggaccctagcctgcgctggtctccgggagctaggaatcagggaggcggtgctagggccttacttctgctgctggccgaacgctttcctaggcgagcaggtcccggacgcctcggcctggggaccgcaggtgaacgcccacgaagggataacccatctctgagtattgacttgacattccaccttctacgaaccctcttggagctcgcacgaactcagtcccagagggagcgcgctgagcagaaccggattatcttcgattctgtggggaagtag

SEQ ID NO: 137670 - DNA, 795 bp, Artificial Sequence
  derived and/or modified sequence
tgcgtccagtgctgcttccagcgctagccccaggggcacgaaggctggtgtagggaggtgcgcccctccgggggcccgccagccgtcagactcgaagctgtggctgtcattgcttctacaatcagtgcatgttcttcgctgacgtcagtcggagctgtcctggcactatataaggctggcgacagccccgggacagaccctgtgttccccaaggcgtcttcagcctgccccgagggacagagactggagctcaatcttggaccgtacagacgctcgccgacaacctggccggcggcaccatgaggcaggcgggacgcgcagcgctgctggccgcgctgctgctcctggtacagctgtgccctgggagcagccagaggagccccgaggcggccggggtccaggacccgagtctgcgctggagccccggggcacggaaccagggtggcggggcccgcgcgctcctcttgctgctggcggagcgcttcccgcgccgcgcggggcccggccgattgggactcgggacggcaggcgagcggccgcggcgggacaacccttctctgtccattgacctcacctttcacctgctgcggaccctgctggagctggcgcggacgcagagccagcgggagcgcgccgagcagaaccgcatcatattcgactcggtgggcaagtgatggcccggtttggggctgcgaaaacgttgacccctttcccccaccccagagttgggatgcggggcagagccaccagggcactgtctgcgtgactattttttaataaaagtactgaagaccc

SEQ ID NO: 137671 - protein, 309 aa, Artificial Sequence
  derived and/or modified sequence
MVGFKATDVPPTATVKFLGAGTAACIADLITFPLDTAKVRLQIQGESQGPVRATASAQYRGVMGTILTMVRTEGPRSLYNGLVAGLQRQMSFASVRIGLYDSVKQFYTKGSEHASIGSRLLAGSTTGALAVAVAQPTDVVKVRFQAQARAGGGRRYQSTVNAYKTIAREEGFRGLWKGTSPNVARNAIVNCAELVTYDLIKDALLKANLMTDDLPCHFTSAFGAGFCTTVIASPVDVVKTRYMNSALGQYSSAGHCALTMLQKEGPRAFYKGFMPSFLRLGSWNVVMFVTYEQLKRALMAACTSREAPF

SEQ ID NO: 137672 - protein, 33 aa, Artificial Sequence
  derived and/or modified sequence
MVGFKATDVPPTATVKFLGAGTAACIADLITFP

SEQ ID NO: 137673 - DNA, 930 bp, Artificial Sequence
  derived and/or modified sequence
atggtgggcttcaaggccaccgacgtgccccccaccgccaccgtgaagttcctgggcgccggcaccgccgcctgcatcgccgacctgatcaccttccccctggacaccgccaaggtgagactgcagatccagggcgagagccagggccccgtgagagccaccgccagcgcccagtacagaggcgtgatgggcaccatcctgaccatggtgagaaccgagggccccagaagcctgtacaacggcctggtggccggcctgcagagacagatgagcttcgccagcgtgagaatcggcctgtacgacagcgtgaagcagttctacaccaagggcagcgagcacgccagcatcggcagcagactgctggccggcagcaccaccggcgccctggccgtggccgtggcccagcccaccgacgtggtgaaggtgagattccaggcccaggccagagccggcggcggcagaagataccagagcaccgtgaacgcctacaagaccatcgccagagaggagggcttcagaggcctgtggaagggcaccagccccaacgtggccagaaacgccatcgtgaactgcgccgagctggtgacctacgacctgatcaaggacgccctgctgaaggccaacctgatgaccgacgacctgccctgccacttcaccagcgccttcggcgccggcttctgcaccaccgtgatcgccagccccgtggacgtggtgaagaccagatacatgaacagcgccctgggccagtacagcagcgccggccactgcgccctgaccatgctgcagaaggagggccccagagccttctacaagggcttcatgcccagcttcctgagactgggcagctggaacgtggtgatgttcgtgacctacgagcagctgaagagagccctgatggccgcctgcaccagcagagaggcccccttctag

SEQ ID NO: 137674 - DNA, 102 bp, Artificial Sequence
  derived and/or modified sequence
atggtgggcttcaaggccaccgacgtgccccccaccgccaccgtgaagttcctgggcgccggcaccgccgcctgcatcgccgacctgatcaccttcccctag

SEQ ID NO: 137675 - DNA, 930 bp, Artificial Sequence
  derived and/or modified sequence
atggtgggctttaaagccactgacgtgccgccgaccgctaccgttaaattcctgggagctgggacagcggcctgtattgctgatctgatcacttttcctctggacacagccaaagtgcggttgcaaattcagggggagagtcaaggacctgtccgcgcaacagcctccgcacaatacagaggggtaatgggaacaatattgaccatggttcgtacagaaggacccaggtctctttataacggtcttgttgcaggtttgcagcggcagatgagttttgcctccgttagaattgggctgtacgactcggttaagcagttctatacaaagggaagcgagcatgcttccatcggaagcaggctgctggccgggtctacaacaggcgccctggccgtcgccgtcgcccagcccaccgatgtggttaaagttcggtttcaggcccaggccagggcgggtggcggtcgccgctaccagtcaaccgtcaacgcctataaaaccattgcgagagaagagggattccgcggcctgtggaagggaacatcccctaacgtggcacgaaatgctattgttaactgtgccgagttggtgacatacgacctcattaaggatgccctgctgaaagccaatcttatgactgatgacttgccttgccattttacatccgctttcggagccggcttctgcacgactgtgatcgcctcccccgtggacgtcgtgaaaacccggtacatgaattccgccctcggccagtactccagcgcgggtcactgtgcgctgaccatgctccagaaagagggaccccgggcgttttacaagggcttcatgccaagcttcctgaggctgggctcatggaacgtcgtgatgtttgtgacatatgagcagctgaaacgcgccctcatggctgcctgtacatcaagagaagccccgttttag

SEQ ID NO: 137676 - DNA, 102 bp, Artificial Sequence
  derived and/or modified sequence
atggtcggattcaaagcaaccgatgtcccacccaccgctactgtgaagttcctgggtgccgggacagcggcctgcatcgcggatttgatcacctttccttag

SEQ ID NO: 137677 - DNA, 930 bp, Artificial Sequence
  derived and/or modified sequence
atggtgggcttcaaggccacagatgtgcccccaacagccaccgtgaagttcctgggcgccggcacagctgcctgcatcgctgacctgatcaccttccccctggacacagccaaggtgcggctgcagatccagggcgagagccagggccctgtgcgggccacagccagcgcccagtacagaggagtgatgggcaccatcctgaccatggtgaggacagagggccccaggagcctgtacaacggcctggtggccggcctgcagaggcagatgagctttgcctctgtgagaattggcctgtatgacagcgtgaagcagttctacaccaagggcagcgagcacgccagcatcggcagccggctgctggccggcagcaccaccggggccctggccgtggccgtggcccagcccacagatgtggtgaaggtgcgcttccaggcccaggcccgggccggcggcggccgccgctaccagagcacagtgaatgcctacaagaccatcgcccgggaggagggcttccggggcctgtggaagggcaccagccccaacgtggccagaaatgccatcgtgaactgtgccgagctggtgacctatgacctgatcaaggatgccctgctgaaggccaacctgatgacagatgacctgccctgccacttcaccagcgccttcggggccggcttctgcaccaccgtgattgccagccctgtggatgtggtgaagacccgctacatgaacagcgccctgggccagtacagcagcgctggccactgtgccctgaccatgctgcagaaggagggcccccgggccttctacaagggcttcatgcccagcttcctgcggctgggctcctggaatgtggtgatgtttgtgacctatgagcagctgaagagggccctgatggccgcctgcaccagccgggaggcccccttctag

SEQ ID NO: 137678 - DNA, 102 bp, Artificial Sequence
  derived and/or modified sequence
atggtgggcttcaaggccacagatgtgcccccaacagccaccgtgaagttcctgggcgccggcacagctgcctgcatcgctgacctgatcaccttcccctag

SEQ ID NO: 137679 - DNA, 930 bp, Artificial Sequence
  derived and/or modified sequence
atggtgggcttcaaggccaccgacgtgccccccaccgccaccgtgaagttcctgggggccgggaccgcagcttgcatcgcagatctgattacattccctctggacacagccaaagtgcgccttcagatccagggcgaatcacagggaccggttcgagccaccgcgtctgcacaatatcgaggcgtaatgggtacgattttgacaatggtgcggaccgaaggccccaggtcactgtataacggcctggtggccgggcttcaacgccagatgtcattcgcatctgtacgcattggcctctatgattccgtgaagcagttctacacaaaaggcagcgaacacgctagcattggctcgaggttgcttgctgggtcaacaacaggtgcgttagccgttgccgtggcgcagcccactgatgtggtgaaggtgcgttttcaggcccaggcaagagctggcggcggaagaaggtatcagagcaccgtgaacgcctacaagacaatcgcgcgtgaagaggggttcaggggcctgtggaaggggacatcccccaatgtggctaggaatgctatcgtaaactgcgctgagctggttacatacgatctgattaaggatgcgcttctgaaggcgaatctgatgaccgatgatcttccctgccatttcacatcagctttcggcgccggattctgtaccactgtgatcgcctcgcccgtggacgtcgtcaaaactcggtacatgaatagcgctcttggtcagtattcctctgctggacattgcgctctgactatgctccagaaggagggccctcgcgctttttataaaggctttatgccttccttcctgaggctgggatcatggaatgttgtgatgtttgtgacttacgagcagttaaaaagggcgctgatggcggcatgtacatcacgggaggctcccttctag

SEQ ID NO: 137680 - DNA, 102 bp, Artificial Sequence
  derived and/or modified sequence
atggtgggcttcaaggccaccgacgtgccccccaccgccaccgtgaaattcctgggagccggaaccgctgcttgcatcgctgaccttatcactttcccatag

SEQ ID NO: 137681 - DNA, 930 bp, Artificial Sequence
  derived and/or modified sequence
atggtcggttttaaagctacggacgtgccccctactgccacagtgaagttcttgggcgctggaactgccgcatgcattgctgacctcatcaccttccctttagacactgccaaagtaaggctgcagattcaaggagaaagccagggacccgtgcgggctacggcttccgcccagtatcgaggagtaatggggactatcttaaccatggttagaactgaggggccacgctccttgtataacggcctggtggcagggctccaaaggcaaatgtcgtttgcatctgtgcgaattggtctctacgatagtgtgaagcagttttacacaaaaggctctgagcacgcgagcatagggtcacgtctgctggccggttccaccacaggcgcactggccgtggctgtcgcccagccgaccgacgttgttaaagtgcgttttcaggcccaggcacgcgcaggcggtggacggagatatcagagcacagtgaacgcttacaagacaattgccagggaggaggggtttcggggtctgtggaaaggaacatctccaaacgtagctagaaatgcgattgttaattgtgctgaactagtaacctatgacttaattaaagatgccttgctcaaggccaaccttatgaccgatgatctaccctgtcactttacgtctgcttttggggcaggattttgtacgacggtgatcgcaagcccggtggatgtggtgaaaacaaggtacatgaactcagcactgggccaatactcaagcgcgggacactgcgctctgaccatgttgcagaaggagggacccagggccttttataagggcttcatgccatcttttctgcggttggggtcctggaatgtggtcatgttcgtgacttatgagcagctgaagcgggctcttatggcagcctgtacttctcgggaggctcccttctag

SEQ ID NO: 137682 - DNA, 102 bp, Artificial Sequence
  derived and/or modified sequence
atggtgggatttaaagctactgacgttcctccgacagcaactgtgaaatttttgggggctggcaccgcagcgtgtatagcagacttgattactttcccctag

SEQ ID NO: 137683 - DNA, 2113 bp, Artificial Sequence
  derived and/or modified sequence
agccgcgcgctcgctcgcaggagggtgggtagtttgcccagcgtaggggggctgggcccataaaagaggaagtgcacttaagacacggccccgctggacgctgttagaaaccgtcctggctgggaaggcaagaggtgtgtgactggacaagacttgtttctggcggtcagtcttgccatcctcacagaggttggcggcccgagagagtgtgaggcagaggcggggagtggcaagggagtgaccatctcggggaacgaaggagtaaacgcggtgatgggacgcacggaaacgggagtggagaaagtcatggagagaaccctaggcggggcggtccccgcggaaaggcggctgctccagggtctccgcacccaagtaggagctggcaggcccggccccgccccgcaggccccaccccgggccccgcccccgaggcttaagccgcgccgccgcctgcgcggagccccactgcgaagcccagctgcgcgcgccttgggattgactgtccacgctcgcccggctcgtccgacgcgccctccgccagccgacagacacagccgcacgcactgccgtgttctccctgcggctcggacacatagtatgaccattaggtgtttcgtctcccacccattttctatggaaaaccaaggggatcgggccatgatagccactggcagctttgaagaacgggacacctttagagaagcttgatcttggaggcctcaccgtgagaccttacaaagccggattccggcagagttcctctatctcgtcttgttgctgattaaaggtgcccctgtctccagtttttctccatctcctgggacgtagcaggaaatcagcatcatggttgggttcaaggccacagatgtgccccctactgccactgtgaagtttcttggggctggcacagctgcctgcatcgcagatctcatcacctttcctctggatactgctaaagtccggttacagatccaaggagaaagtcaggggccagtgcgcgctacagccagcgcccagtaccgcggtgtgatgggcaccattctgaccatggtgcgtactgagggcccccgaagcctctacaatgggctggttgccggcctgcagcgccaaatgagctttgcctctgtccgcatcggcctgtatgattctgtcaaacagttctacaccaagggctctgagcatgccagcattgggagccgcctcctagcaggcagcaccacaggtgccctggctgtggctgtggcccagcccacggatgtggtaaaggtccgattccaagctcaggcccgggctggaggtggtcggagataccaaagcaccgtcaatgcctacaagaccattgcccgagaggaagggttccggggcctctggaaagggacctctcccaatgttgctcgtaatgccattgtcaactgtgctgagctggtgacctatgacctcatcaaggatgccctcctgaaagccaacctcatgacagatgacctcccttgccacttcacttctgcctttggggcaggcttctgcaccactgtcatcgcctcccctgtagacgtggtcaagacgagatacatgaactctgccctgggccagtacagtagcgctggccactgtgcccttaccatgctccagaaggaggggccccgagccttctacaaagggttcatgccctcctttctccgcttgggttcctggaacgtggtgatgttcgtcacctatgagcagctgaaacgagccctcatggctgcctgcacttcccgagaggctcccttctgagcctctcctgctgctgacctgatcacctctggctttgtctctagccgggccatgctttccttttcttccttctttctcttccctccttcccttctctccttccctctttccccacctcttccttccgctcctttacctaccaccttccctctttctacattctcatctactcattgtctcagtgctggtggagttgacatttgacagtgtgggaggcctcgtaccagccaggatcccaagcgtcccgtcccttggaaagttcagccagaatcttcgtcctgcccccgacagcccagcctagcccacttgtcatccataaagcaagctcaaccttggcgtc

SEQ ID NO: 137684 - DNA, 464 bp, Artificial Sequence
  derived and/or modified sequence
gggcagcagctgggtcttattcttctctggccttcacaacatcctgcaacccagctcaaggtcaggaatgtgacagactcatgtcatcatatctctgatgcccagagaagggataccatttgcctgagccttctcagtactgtttaatcagcctgtgagaactttccttgtgaaaggccctgtctgtgcctggggctgataaaacagcaagaacgaactgaggagctgggcagcagtgcaaagcaaatactaccagctttggtgcctattccggcagagttcctctatctcgtcttgttgctgattaaaggtgcccctgtctccagtttttctccatctcctgggacgtagcaggaaatcagcatcatggttgggttcaaggccacagatgtgccccctactgccactgtgaagtttcttggggctggcacagctgcctgcatcgcagatctcatcacctttcc

SEQ ID NO: 137685 - protein, 312 aa, Artificial Sequence
  derived and/or modified sequence
MVGLKPSDVPPTMAVKFLGAGTAACFADLVTFPLDTAKVRLQIQGENQAVQTARLVQYRGVLGTILTMVRTEGPCSPYNGLVAGLQRQMSFASIRIGLYDSVKQVYTPKGADNSSLTTRILAGCTTGAMAVTCAQPTDVVKVRFQASIHLGPSRSDRKYSGTMDAYRTIAREEGVRGLWKGTLPNIMRNAIVNCAEVVTYDILKEKLLDYHLLTDNFPCHFVSAFGAGFCATVVASPVDVVKTRYMNSPPGQYFSPLDCMIKMVAQEGPTAFYKGFTPSFLRLGSWNVVMFVTYEQLKRALMKVQMLRESPF

SEQ ID NO: 137686 - protein, 275 aa, Artificial Sequence
  derived and/or modified sequence
MVGLKPSDVPPTMAVKFLGAGTAACFADLVTFPLDTAKVRLQIQGENQAVQTARLVQYRGVLGTILTMVRTEGPCSPYNGLVAGLQRQMSFASIRIGLYDSVKQVYTPKGADNSSLTTRILAGCTTGAMAVTCAQPTDVVKVRFQASIHLGPSRSDRKYSGTMDAYRTIAREEGVRGLWKGTLPNIMRNAIVNCAEVVTYDILKEKLLDYHLLTDNFPCHFVSAFGAGFCATVVASPVDVVKTRYMNSPPGQYFSPLDCMIKMVAQEGPTAFYKG

SEQ ID NO: 137687 - protein, 96 aa, Artificial Sequence
  derived and/or modified sequence
MVGLKPSDVPPTMAVKFLGAGTAACFADLVTFPLDTAKVRLQIQGENQAVQTARLVQYRGVLGTILTMVRTEGPCSPYNGLVAGLQRQMSFASIRI

SEQ ID NO: 137688 - DNA, 939 bp, Artificial Sequence
  derived and/or modified sequence
atggtgggcctgaagcccagcgacgtgccccccaccatggccgtgaagttcctgggcgccggcaccgccgcctgcttcgccgacctggtgaccttccccctggacaccgccaaggtgagactgcagatccagggcgagaaccaggccgtgcagaccgccagactggtgcagtacagaggcgtgctgggcaccatcctgaccatggtgagaaccgagggcccctgcagcccctacaacggcctggtggccggcctgcagagacagatgagcttcgccagcatcagaatcggcctgtacgacagcgtgaagcaggtgtacacccccaagggcgccgacaacagcagcctgaccaccagaatcctggccggctgcaccaccggcgccatggccgtgacctgcgcccagcccaccgacgtggtgaaggtgagattccaggccagcatccacctgggccccagcagaagcgacagaaagtacagcggcaccatggacgcctacagaaccatcgccagagaggagggcgtgagaggcctgtggaagggcaccctgcccaacatcatgagaaacgccatcgtgaactgcgccgaggtggtgacctacgacatcctgaaggagaagctgctggactaccacctgctgaccgacaacttcccctgccacttcgtgagcgccttcggcgccggcttctgcgccaccgtggtggccagccccgtggacgtggtgaagaccagatacatgaacagcccccccggccagtacttcagccccctggactgcatgatcaagatggtggcccaggagggccccaccgccttctacaagggcttcacccccagcttcctgagactgggcagctggaacgtggtgatgttcgtgacctacgagcagctgaagagagccctgatgaaggtgcagatgctgagagagagccccttctag

SEQ ID NO: 137689 - DNA, 939 bp, Artificial Sequence
  derived and/or modified sequence
atggtgggactcaagccctccgacgtgcctcctaccatggccgtgaagtttctcggcgccgggaccgccgcctgtttcgccgacctggttacattcccgctggatacagcgaaggtgcgcctgcagattcaaggtgaaaatcaagccgtgcagaccgctcggttagtgcagtacagaggagtcctgggaactatactgaccatggttaggactgagggcccctgttcaccttataacggtctcgtggctggacttcagcgacagatgagtttcgccagtatccggattggattgtacgacagtgtgaaacaagtctatacaccaaaaggtgcggacaacagctcactgaccactcggatcctggctggctgtacaactggagccatggctgttacatgcgctcaacccacagatgtggtgaaggtacgctttcaggcttcaatccatctcggtccttctcggagtgaccgcaaatattcgggcactatggatgcctataggactattgcacgggaagagggcgtgcgaggcctgtggaaggggaccctcccaaatataatgcgaaacgctatcgtgaactgtgcagaggttgtgacttacgatatactcaaagaaaaactcctcgactatcaccttttgaccgacaattttccatgtcactttgttagcgcctttggagccggcttttgtgcaaccgttgtggcatcccccgtggacgtggtgaaaaccagatacatgaattccccccctggccagtactttagtccactggattgtatgatcaagatggtggcccaggagggcccaacggccttttacaagggttttacgcctagtttcctcagactgggatcatggaacgttgtaatgtttgtgacatacgagcagcttaaacgagcgcttatgaaggtgcaaatgcttagagaaagcccattctag

SEQ ID NO: 137690 - DNA, 939 bp, Artificial Sequence
  derived and/or modified sequence
atggtgggcctgaagcccagtgatgtgccccccaccatggctgtgaagttcctgggcgccggcacagctgcctgctttgctgacctggtgaccttccccctggacacagccaaggtgcggctgcagatccagggcgagaaccaggccgtgcagacagcccggctggtgcagtaccggggcgtgctgggcaccatcctgaccatggtgaggacagagggcccctgcagcccctacaacggcctggtggccggcctgcagaggcagatgagctttgccagcatccgcatcggcctgtatgattctgtgaagcaggtgtacacccccaagggagctgacaacagcagcctgaccacccgcatcctggccggctgcaccaccggggccatggctgtgacctgtgcccagcccacagatgtggtgaaggtgcgcttccaggccagcatccacctgggccccagcagaagtgacaggaagtacagcggcaccatggatgcctaccgcaccatcgcccgggaggagggcgtgcggggcctgtggaagggcaccctgcccaacatcatgagaaatgccatcgtgaactgtgccgaggtggtgacctatgacatcctgaaggagaagctgctggactaccacctgctgacagacaacttcccctgccactttgtgtctgcctttggagctggcttctgtgccaccgtggtggccagccctgtggatgtggtgaagacccgctacatgaacagccccccaggccagtacttcagccccctggactgcatgatcaagatggtggcccaggagggccccacagccttctacaagggcttcacccccagcttcctgcggctgggctcctggaatgtggtgatgtttgtgacctatgagcagctgaagagggccctgatgaaggtgcagatgctgcgggagagccccttctag

SEQ ID NO: 137691 - DNA, 939 bp, Artificial Sequence
  derived and/or modified sequence
atggtgggcctgaagcccagcgacgtgccccccaccatggccgtgaagttcctgggcgcaggtacagctgcctgttttgccgatctagtgacctttcccttagataccgctaaagttcggctccagatccagggagagaaccaagctgtacagaccgccaggctggtccagtacagaggggtgctgggtactattctgactatggtcagaaccgaaggcccttgcagcccttataacggcctggtcgccggattgcaacgccagatgtcattcgcctcaatccggataggactctacgactctgtgaaacaagtctataccccaaagggagccgataattcctccctcacgacccgtatccttgccggatgtaccaccggggcaatggccgtgacttgcgcacagccgacagacgttgtgaaagttaggttccaggcctccatccacctcggaccaagtaggagtgaccggaaatattccggaaccatggacgcgtacagaaccattgccagggaggagggggtcagaggtctctggaagggcacactgcccaacattatgcgaaacgccattgtgaattgcgctgaggttgtcacctatgacatcctgaaagagaagctgcttgattaccatctgctcacagacaattttccctgtcactttgttagcgcatttggtgctggattttgcgccaccgttgtagcctcccctgtggacgtcgtgaaaactcggtatatgaactcgccgccaggacagtatttctcacccttagactgcatgatcaaaatggtggcccaagaaggtcccacagccttctataagggctttacaccctcctttctgagactcggatcttggaacgtggttatgtttgtgacctatgaacagctgaaacgcgcattgatgaaagtgcagatgctccgagagtcaccgttttag

SEQ ID NO: 137692 - DNA, 939 bp, Artificial Sequence
  derived and/or modified sequence
atggttggactgaaaccctccgacgtgcctcctactatggccgtaaaattcctcggagccggaaccgccgcttgtttcgccgatctggtgactttccccctcgacactgctaaagtacgcctccagatccagggggaaaatcaagcagtgcaaacagctcgcctggtccagtacagaggcgtacttggtaccatcctgacaatggttcgcacggagggaccttgttctccatataacggactggttgctggactacagaggcaaatgtcattcgcctcaatcagaattggattgtatgatagtgtcaagcaggtgtatacgcctaagggggctgacaattcttcactgactactcggatcttggccggatgtactacaggcgctatggcggtcacatgcgcccagcctaccgacgtcgtgaaggtccggttccaggccagcattcacctgggtcctagccgtagcgaccgcaagtactctgggaccatggacgcgtacagaaccattgcccgagaggaaggggtccggggattgtggaagggaacacttcccaatataatgcgcaatgcaattgtcaactgcgctgaagttgtcacctacgatatccttaaggagaaactgctggactaccacctgcttaccgacaattttccctgtcatttcgtgagcgcttttggtgcaggtttctgcgctacggtagttgcgtcccccgtggatgttgtcaaaacaagatatatgaattcaccacctggccaatatttcagccccctcgactgcatgatcaagatggtggcccaagagggccctactgccttctacaagggatttactccctcatttctgcggttaggttcctggaacgtggtgatgtttgtcacatatgagcagttgaaaagagctctgatgaaggtgcaaatgcttagagagtcgcctttctag

SEQ ID NO: 137693 - DNA, 2623 bp, Artificial Sequence
  derived and/or modified sequence
atatttagcacatagtaggcacaaagaaatgacattattattaagagacctgggagagctgtgcccagcctatcgtgggaggccttgacctttggactcaaaagtggcagcaggtccacccccccatacacccttgtcaccaaggaagcgtccacagcttaaaggagctatattaaagcaccccaagtcaagaggactgaaccagatctggaactcactcacctcccctctcacctcactgccctcaccagccagcctcttgtcaagtgatcaggctgtcaaccaacttctctaggataaggtttcaggtcagcccgtgtgtataagaccagtgccaagccagaagcagcagagacaacagtgaatgacaaggaggggccatccaatccctgctgccacctcctgggatggagccctagggagcccctgtgctgcccctgccgtggcaggactcacagccccaccgctgcactgaagcccagggctgtggagcagcctctctccttggacctcctctcggccctaaagggactgggcagagccttccaggactatggttggactgaagccttcagacgtgcctcccaccatggctgtgaagttcctgggggcaggcacagcagcctgttttgctgacctcgttacctttccactggacacagccaaggtccgcctgcagatccagggggagaaccaggcggtccagacggcccggctcgtgcagtaccgtggcgtgctgggcaccatcctgaccatggtgcggactgagggtccctgcagcccctacaatgggctggtggccggcctgcagcgccagatgagcttcgcctccatccgcatcggcctctatgactccgtcaagcaggtgtacacccccaaaggcgcggacaactccagcctcactacccggattttggccggctgcaccacaggagccatggcggtgacctgtgcccagcccacagatgtggtgaaggtccgatttcaggccagcatacacctcgggccatccaggagcgacagaaaatacagcgggactatggacgcctacagaaccatcgccagggaggaaggagtcaggggcctgtggaaaggaactttgcccaacatcatgaggaatgctatcgtcaactgtgctgaggtggtgacctacgacatcctcaaggagaagctgctggactaccacctgctcactgacaacttcccctgccactttgtctctgcctttggagccggcttctgtgccacagtggtggcctccccggtggacgtggtgaagacccggtatatgaactcacctccaggccagtacttcagccccctcgactgtatgataaagatggtggcccaggagggccccacagccttctacaagggatttacaccctcctttttgcgtttgggatcctggaacgtggtgatgttcgtaacctatgagcagctgaaacgggccctgatgaaagtccagatgttacgggaatcaccgttttgaacaagacaagaaggccactggtagctaacgtgtccgaaaccagttaagaatggaagaaaacggtgcatccacgcacacatggacacagacccacacatgtttacagaactgttgtttacttgttgctgattcaagaaacagaagtagaagaggaggagggattctggtcttcactgccatgcctcaagaacacctttgttttgcactgacaagatggaaaataaattatattaatttttgaaacccattaggcatgcctaatatttaggcaagagaaaataaaccaagatagatccatttggacaaaatggaaggttggagacgtgtatccccgtgaaatctggttagataatgaatgataagcaggaaggatggcaagcacgggacaggaggggcccacaatggagtgggagatcagccacggagcctggagggatgccacccagcaacacagagctggcgactgcagctgcaccatcacacatgcatcatcagcctatttgtaatatgtctgccacagagagtcctttgggattctaggaaacccaaggaacaagagaaaaaactagagcctgtgctaaagaagccctgctgggcccatgtgaggctggggctcgtaaatattccctgacgacactgaagaatcaagagggcagcccccactttcctacaaaatggagggagccatcccttccctgtccacctcaccaggggtgctatgacatgcaagtgagaagctgggcatgaacgcactttataaaagcaaaagctctgtgtaaatctaactacaaggacaatgccttgggagagattttgtcgggacagagaggagttgccagggaagaaggtttgaaagatacggttgtctagaggtgagaccaaaggatccagagacttggggaccagaggtgacagtggatgacgtgaagccacaggagccccacccccatgcagcctcttccccaccccccccaccacgtgctcaatcatgagtacctcaaaggattgttgggcttgggggaaaagaggtggattcctgggcaagaacctaaagtagcaggactcggaattctcgggaaattattatgactcaataaaagaattcacaccttaggtgtgggagtaagaaca

SEQ ID NO: 137694 - protein, 91 aa, Artificial Sequence
  derived and/or modified sequence
MKLAVTLTLVTLALCCSSASAEICPSFQRVIETLLMDTPSSYEAAMELFSPDQDMREAGAQLKKLVDTLPQKPRESIIKLMEKIAQSSLCN

SEQ ID NO: 137695 - DNA, 276 bp, Artificial Sequence
  derived and/or modified sequence
atgaagctggccgtgaccctgaccctggtgaccctggccctgtgctgcagcagcgccagcgccgagatctgccccagcttccagagagtgatcgagaccctgctgatggacacccccagcagctacgaggccgccatggagctgttcagccccgaccaggacatgagagaggccggcgcccagctgaagaagctggtggacaccctgccccagaagcccagagagagcatcatcaagctgatggagaagatcgcccagagcagcctgtgcaactag

SEQ ID NO: 137696 - DNA, 276 bp, Artificial Sequence
  derived and/or modified sequence
atgaagctggctgtgaccctgacacttgtgacacttgccctgtgttgcagcagtgcctccgccgagatatgcccgtcttttcaacgcgtgatcgagactcttctaatggacactccttcttcttatgaagctgctatggaactattctcccccgaccaggatatgagagaagcaggcgctcagctgaagaagctggtggacactctgccacaaaagcctcgggagtctatcataaaactcatggaaaagattgcccaatcgagcctgtgcaattag

SEQ ID NO: 137697 - DNA, 276 bp, Artificial Sequence
  derived and/or modified sequence
atgaagctggccgtgaccctgaccctggtgaccctggccctgtgctgcagcagcgccagcgctgagatctgccccagcttccagagggtgattgagaccctgctgatggacacccccagcagctatgaggccgccatggagctgttctccccagaccaggacatgagggaggccggggcccagctgaagaagctggtggacaccctgccccagaagccccgggagagcatcatcaagctgatggagaagatcgcccagagcagcctgtgcaactag

SEQ ID NO: 137698 - DNA, 276 bp, Artificial Sequence
  derived and/or modified sequence
atgaagctggccgtgaccctgaccctggtgaccctggccctgtgctgtagcagcgcaagcgcagagatatgcccttcctttcagagggtgatcgaaactctgcttatggatactccatcctcatacgaggctgccatggagctgttctctcctgatcaggacatgagggaggccggcgcacaattgaaaaagctggtcgatactcttccccagaagcccagagagagcataatcaaactgatggaaaaaatcgctcaatctagtctttgcaactag

SEQ ID NO: 137699 - DNA, 276 bp, Artificial Sequence
  derived and/or modified sequence
atgaagctggcagtgacgctgaccttggtgaccctggccttgtgttgctcaagcgcctccgcggagatctgcccatcatttcagagggtcatagagactctccttatggacacgccatcttcgtacgaggccgctatggagctgttcagtcctgaccaagatatgagagaggcgggagcacagctcaaaaaactggtggataccctgccccaaaagccccgtgaaagcatcattaaacttatggagaaaatcgcccaatcttccttgtgtaattag

SEQ ID NO: 137700 - DNA, 441 bp, Artificial Sequence
  derived and/or modified sequence
actagcccaccagactcagagacggaaccagagacgggccagagcatccccctcctccaccatgaaactcgctgtcaccctcaccctggtcacactggctctctgctgcagctccgcttctgcagagatctgcccgagctttcagcgtgtcatcgaaaccctcctcatggacacaccctccagttatgaggctgccatggaacttttcagccctgatcaagacatgagggaggcaggggctcagctgaagaagctggtggacaccctcccccaaaagcccagagaaagcatcattaagctcatggaaaaaatagcccaaagctcactgtgtaattagcatttagaagctgaagatccccaactgctccagcctctgccgctgccatgctttgagtccacgcccaccagccttgctctcttcaataaaccacaagcatctca

SEQ ID NO: 137701 - protein, 394 aa, Artificial Sequence
  derived and/or modified sequence
MALLDLALEGMAVFGFVLFLVLWLMHFMAIIYTRLHLNKKATDKQPYSKLPGVSLLKPLKGVDPNLINNLETFFELDYPKYEVLLCVQDHDDPAIDVCKKLLGKYPNVDARLFIGGKKVGINPKINNLMPGYEVAKYDLIWICDSGIRVIPDTLTDMVNQMTEKVGLVHGLPYVADRQGFAATLEQVYFGTSHPRYYISANVTGFKCVTGMSCLMRKDVLDQAGGLIAFAQYIAEDYFMAKAIADRGWRFAMSTQVAMQNSGSYSISQFQSRMIRWTKLRINMLPATIICEPISECFVASLIIGWAAHHVFRWDIMVFFMCHCLAWFIFDYIQLRGVQGGTLCFSKLDYAVAWFIRESMTIYIFLSALWDPTISWRTGRYRLRCGGTAEEILDV

SEQ ID NO: 137702 - DNA, 1185 bp, Artificial Sequence
  derived and/or modified sequence
atggccctgctggacctggccctggagggcatggccgtgttcggcttcgtgctgttcctggtgctgtggctgatgcacttcatggccatcatctacaccagactgcacctgaacaagaaggccaccgacaagcagccctacagcaagctgcccggcgtgagcctgctgaagcccctgaagggcgtggaccccaacctgatcaacaacctggagaccttcttcgagctggactaccccaagtacgaggtgctgctgtgcgtgcaggaccacgacgaccccgccatcgacgtgtgcaagaagctgctgggcaagtaccccaacgtggacgccagactgttcatcggcggcaagaaggtgggcatcaaccccaagatcaacaacctgatgcccggctacgaggtggccaagtacgacctgatctggatctgcgacagcggcatcagagtgatccccgacaccctgaccgacatggtgaaccagatgaccgagaaggtgggcctggtgcacggcctgccctacgtggccgacagacagggcttcgccgccaccctggagcaggtgtacttcggcaccagccaccccagatactacatcagcgccaacgtgaccggcttcaagtgcgtgaccggcatgagctgcctgatgagaaaggacgtgctggaccaggccggcggcctgatcgccttcgcccagtacatcgccgaggactacttcatggccaaggccatcgccgacagaggctggagattcgccatgagcacccaggtggccatgcagaacagcggcagctacagcatcagccagttccagagcagaatgatcagatggaccaagctgagaatcaacatgctgcccgccaccatcatctgcgagcccatcagcgagtgcttcgtggccagcctgatcatcggctgggccgcccaccacgtgttcagatgggacatcatggtgttcttcatgtgccactgcctggcctggttcatcttcgactacatccagctgagaggcgtgcagggcggcaccctgtgcttcagcaagctggactacgccgtggcctggttcatcagagagagcatgaccatctacatcttcctgagcgccctgtgggaccccaccatcagctggagaaccggcagatacagactgagatgcggcggcaccgccgaggagatcctggacgtgtag

SEQ ID NO: 137703 - DNA, 1185 bp, Artificial Sequence
  derived and/or modified sequence
atggcgctgttggacctggctctggaaggcatggccgtgttcggcttcgtgctgttcttggtgctttggctgatgcatttcatggccattatttacacgaggttacacttaaataagaaggcaactgataagcagccatacagcaagctgccaggggtgagtctactgaaacctttgaagggggtcgatcccaacctgataaataatctcgagaccttctttgagctggactacccaaaatatgaagtgctgctgtgcgttcaggaccatgacgatccagccattgacgtttgcaaaaaattgctcggaaagtacccgaatgttgacgctcggctttttattgggggcaaaaaggtgggcatcaacccgaaaattaacaacctgatgccgggttatgaggtagcaaagtacgaccttatatggatttgtgactcaggtattcgggttattcctgacactttaacggatatggtgaatcaaatgacagagaaggtcggactggtgcatggccttccatatgtcgccgaccggcaagggttcgcggctaccttggagcaggtgtacttcggaacatcccaccctaggtattatatttcagcaaacgtgaccggctttaaatgtgtgacaggaatgtcatgtttgatgagaaaggatgttctggatcaggccggaggtctgatcgcctttgcccaatacatagccgaagactattttatggctaaagccatagccgataggggatggcggtttgctatgagcactcaggtggcaatgcagaatagtgggagctattccatctcacagttccagtcccgtatgatcaggtggactaagttacgaataaatatgctgcctgccaccatcatatgtgagccaatcagcgagtgtttcgtcgcttcgttgattatcggctgggctgcacatcacgtcttccgctgggacattatggtcttttttatgtgtcattgtctagcatggtttatttttgactatattcagttgcgcggcgtgcagggtgggactctgtgcttcagtaagcttgattacgcagtggcatggttcatacgcgaatctatgacaatctacatcttccttagtgcactgtgggatcccacaattagctggcggacaggccgctaccggctgagatgtgggggcacagccgaggaaattttagatgtctag

SEQ ID NO: 137704 - DNA, 1185 bp, Artificial Sequence
  derived and/or modified sequence
atggccctgctggacctggccctggagggcatggctgtgtttggatttgtgctcttcctggtgctgtggctgatgcacttcatggccatcatctacacccggctgcacctgaacaagaaggccacagacaagcagccctacagcaagctgcccggggtgtccctgctgaagcccctgaagggcgtggaccccaacctgatcaacaacctggagaccttctttgagctggactaccccaagtatgaggtgctgctgtgtgtgcaggaccatgatgatcctgccattgatgtgtgcaagaagctgctgggcaagtacccaaatgtggatgcccggctcttcatcggcggcaagaaggtgggcatcaaccccaagatcaacaacctgatgcctggctatgaggtggccaagtatgacctgatctggatctgtgacagcggcatccgggtcatcccagacaccctgacagacatggtgaaccagatgacagagaaggtgggcctggtgcacggcctgccctacgtggccgaccggcagggctttgctgccaccctggagcaggtgtacttcggcaccagccacccccgctactacatcagcgccaacgtgacaggcttcaagtgtgtgacaggcatgagctgcctgatgaggaaggatgtgctggaccaggccggcggcctgattgcctttgcccagtacatcgccgaggactacttcatggccaaggccatcgctgaccggggctggaggtttgccatgagcacccaggtggccatgcagaacagcggcagctacagcatcagccagttccagagcaggatgatccgctggaccaagctgcgcatcaacatgctgcctgccaccatcatctgtgagcccatcagtgaatgttttgtggccagcctcatcatcggctgggccgcccaccacgtgttccgctgggacatcatggtgttcttcatgtgccactgcctggcctggttcatctttgactacatccagctgcggggcgtgcagggcggcaccctgtgcttcagcaagctggactatgctgtggcctggttcatccgggagagcatgaccatctacatcttcctgagcgccctgtgggaccccaccatctcctggaggacaggccgctaccgcctgcgctgtggcggcacagctgaggagatcctggatgtgtag

SEQ ID NO: 137705 - DNA, 1185 bp, Artificial Sequence
  derived and/or modified sequence
atggccctgctggacctggccctggagggcatggccgtgttcggcttcgtcctcttcctggtgctgtggttaatgcatttcatggccattatctacacacgtttgcacctgaataagaaggcaacagacaagcaaccctattcaaaactgccaggggtgtccttacttaagcccctcaagggcgtcgaccccaacctaatcaacaacctggagacattctttgaactggactatcccaagtacgaagtactgctttgtgtccaggatcatgatgaccccgccatcgatgtatgcaagaaattgctcggaaagtaccctaacgtggacgcccgcctgttcattggtggaaaaaaagtgggtatcaaccctaaaattaataacctgatgcccggttacgaagttgccaagtacgacctgatatggatctgtgattccggcataagggtgatacccgacaccctgaccgacatggttaaccagatgactgagaaggtgggactcgttcatgggcttccgtatgtcgcagatcggcagggatttgctgctaccctggaacaagtgtactttggcacttcacatcccaggtattatatttctgccaatgtaaccggctttaagtgcgtgactggtatgagctgtctaatgcgcaaggatgtcctggaccaagccggcggtttgatagcctttgcccagtacatagcagaggattattttatggccaaggccatcgctgatcgaggctggcgcttcgcaatgtccacgcaggtggctatgcaaaatagcggctcctatagcatcagtcagttccagtcgcggatgattcgatggaccaagcttaggataaatatgctgcccgcaaccatcatatgcgagcccatctcagaatgcttcgtcgcatccctgatcatcgggtgggccgctcaccatgtgtttaggtgggatattatggtgttttttatgtgtcattgcttagcatggttcatcttcgactatatccagcttcgcggcgtgcagggcggaaccctttgtttttccaagctggactacgccgtcgcctggttcattcgggagtcaatgacaatctatattttccttagtgctctctgggatcccaccatctcatggagaacaggtcgatataggctgaggtgcggagggacggcagaagagattctagacgtatag

SEQ ID NO: 137706 - DNA, 1185 bp, Artificial Sequence
  derived and/or modified sequence
atggccctcctggacttggctctggagggaatggccgtttttgggttcgtgcttttccttgtcctgtggttgatgcatttcatggctatcatctacacccgactgcacctgaataaaaaagccacagataaacaaccctattctaagctgcctggcgttagcctccttaaacccttgaagggggtggatccaaacctgattaataacctggagacattctttgaactagattatcccaaatacgaggtattgctatgtgtgcaggatcatgacgaccccgctatcgacgtgtgcaagaaactcctcggcaaataccccaatgtggacgctcggctttttattggagggaagaaggtcggcatcaaccctaagataaacaatttgatgccaggctacgaagtcgcaaagtacgacctcatctggatctgtgacagcggcatccgggtgataccagacacattaacggacatggttaaccaaatgactgagaaggtcgggctcgtccacggcttaccatatgtggccgacaggcagggctttgccgcaactctggaacaggtctacttcggaacctcccatccaaggtactatatttccgccaatgtcactggattcaaatgcgttacaggaatgagctgcctgatgagaaaggatgtcctagaccaggccggaggtctgattgcttttgcacaatatatcgcggaagattatttcatggcaaaagccatagcagatcgaggctggcgcttcgcaatgtccacacaggtggccatgcagaacagcggcagttatagtatcagtcagtttcagtctagaatgatcaggtggaccaaactgcgcatcaacatgctgccagctactattatctgtgaaccaatatcggagtgctttgtagcttcacttattattgggtgggcagcgcaccacgttttccggtgggatattatggttttttttatgtgccactgcctcgcctggttcattttcgactacatccagctccgcggagtccagggcggaactctttgtttttctaagctggattacgccgtcgcctggtttataagagagagtatgaccatctacattttcctgtcagcactgtgggatccaaccatttcgtggcgtactggtcgctaccgcctgaggtgcgggggtacagcagaagagatcttagacgtctag

SEQ ID NO: 137707 - DNA, 4007 bp, Artificial Sequence
  derived and/or modified sequence
gggggcgggacgcgccgaggagtggggcgcgagccgccggttttgattagtgcgcggagctgcggcggtggagctgctcggccgggagcccggcggcgagacggagaggcggcggaggtgcccgcgcgcagggtctggtgggcggccgcgaggctcgggagaggcgaaccggagcgcgggaccgcggtcgccccgaccagagccgggagaccgcagcacccgcagccgcccgcgagcgcgccgaagacagcgcgcaggcgagagcgcgcgggcgggggcgcgcaggccctgcccgccccttccgtccccacccccctccgccctttcctctccccaccttcctctcgcctcccgcgcccccgcaccgggcgcccaccctgtcctcctcctgcgggagcgttgtccgtgttggcggccgcagcgggccgggccggtccggcgggccgggggatggcgctgctggacctggccttggagggaatggccgtcttcgggttcgtcctcttcttggtgctgtggctgatgcatttcatggctatcatctacacccgattacacctcaacaagaaggcaactgacaaacagccttatagcaagctcccaggtgtctctcttctgaaaccactgaaaggggtagatcctaacttaatcaacaacctggaaacattctttgaattggattatcccaaatatgaagtgctcctttgtgtacaagatcatgatgatccagccattgatgtatgtaagaagcttcttggaaaatatccaaatgttgatgctagattgtttataggtggcaaaaaagttggcattaatcctaaaattaataatttaatgccaggatatgaagttgcaaagtatgatcttatatggatttgtgatagtggaataagagtaattccagatacgcttactgacatggtgaatcaaatgacagaaaaagtaggcttggttcacgggctgccttacgtagcagacagacagggctttgctgccaccttagagcaggtatattttggaacttcacatccaagatactatatctctgccaatgtaactggtttcaaatgtgtgacaggaatgtcttgtttaatgagaaaagatgtgttggatcaagcaggaggacttatagcttttgctcagtacattgccgaagattactttatggccaaagcgatagctgaccgaggttggaggtttgcaatgtccactcaagttgcaatgcaaaactctggctcatattcaatttctcagtttcaatccagaatgatcaggtggaccaaactacgaattaacatgcttcctgctacaataatttgtgagccaatttcagaatgctttgttgccagtttaattattggatgggcagcccaccatgtgttcagatgggatattatggtatttttcatgtgtcattgcctggcatggtttatatttgactacattcaactcaggggtgtccagggtggcacactgtgtttttcaaaacttgattatgcagtcgcctggttcatccgcgaatccatgacaatatacatttttttgtctgcattatgggacccaactataagctggagaactggtcgctacagattacgctgtgggggtacagcagaggaaatcctagatgtataactacagctttgtgactgtatataaaggaaaaaagagaagtattataaattatgtttatataaatgcttttaaaaatctaccttctgtagttttatcacatgtatgttttggtatctgttctttaatttatttttgcatggcacttgcatctgtgaaaaaaaaaaaaaacacatctgtagtcttggccaaatgatacactttattttgtggaagtagagaatcaagagaattggttctaggaacctgggttcgttcatcattgttgtttatttttttaaaataaataaataaatatatatatagatgctctgcaacaaactctgtgacagtatccttcagtagagaaagtttcttacttgtgagtacactcttttagaacatttacgggtggcagcagctttgctttagagtttagaagataatagaaggaatgactattcatgtccaaagtgaatggttttgtgcagtgaacaacacatggcgaggtactaactgagaaactttttcatgctttatgcctacctcttgtagttgttgcagagcaaatataaattgtaataagatagctaggccttgcagaaacaaacagaaaaacttaaaaaaaaatgatataagagctggagtctagtatttatatgaatctgtgagagataatttttttggtctcactgcaatgaaccaaaagcggctgagtttggtttttaattgtagccatgtattgaaggcatctttttgaccaactcttgttggttctgtcttgaaccattgttaatcactgtgctgtaattagtatagctaaatcttttccttccttgctcctcccccagcccaccccgtcttcccttaacattttttcagggggggttgggagtggtttcattttagtgtgagtggatgttttgatagttgtaaggaaaaaatgcatttcagacacatttcacacatgagctattttcttacacagtatgtcttattgttaataagaatgtaatttcatgatacaagtatttaataccttttttaagtcagtaaatattctagccatcaataaattgcagtagagtattaagaggggacaggatgagtttactcttaaaattaatcagtatcaaactaagtctactgtgtgtgttttttttttttgttttttgtttttgtttgtttactattatagtaagtctagtcttatttaaattggatttttgtattcaagtttatatgacaaaatagactagatcagcgctggttgtaaatgcatgctgtacctcactgttttctccccatcatgccgctaaacttgctcgccaggttgtgcttaacttgtggtgaactggacttgattctgttttgttttgtttttttaaaaaaaaaaaacaaaaatgtaagggacagtgcataagccttttctttgttaagtagtggtgttttgctttttcttcaggattggatggcatgttgtccacaggaatgcctactgcagggctaacactggcaatatggcagctttaaattctgagttactacagtctccatgtcaaagcataatgtgtagcatatcagcaataactacatatttatagaaaacactttttcactttactgagccaattcatttaattgtcaaatgtctatatccatggtttaaatggcaacatatctataagtatgtatacacattatatttaagcttttctctgggccaaactgcttcatccttttttctttctttttttttttttttagccttatgatgaatttgtttgaagggcattttctttatgaacaaaggcttggatgcatattcctttctttctgtgaatgggtattattccctgaggaaagttgcacagtgaaaaccagtctggttgtgacccactacatgttttgtttttaatcactattacctgagttgaactttgctcaccatgtttgtacttgttggtctgtttaatgaagtttggttgatgccatcctttgcactgccgaagcgtaatcttgtgtattacttagctctctgctgatctcagtatggacagtgtaacaacaaaaccaaaatggctggacagacttcttgtgttttgtaaatataaactaggacagttctgtaggtttgttcagtgtgctagtggagtatttccttaatgtaaaacttcacttaacagagagattctttgtttagcaagcttggagtgatgataaaatggtaagaaataatataaatgttgaagaaagcatcacaacagaactataggagtctaaatttaataaatctttaaaaaaaaccagtgtctagaatatataccatgttttattatttaaaatcattgtcttaaatttttgttcaaaaaataaaaatttgaatacaatcaaaa

SEQ ID NO: 137708 - protein, 55 aa, Artificial Sequence
  derived and/or modified sequence
MFEIKKICCIGAGYVGGPTCSVIAHMCPEIRVTVVDVNESRINAWNSPTLPIYED

SEQ ID NO: 137709 - DNA, 1485 bp, Artificial Sequence
  derived and/or modified sequence
atgttcgagatcaagaagatctgctgcatcggcgccggctacgtgggcggccccacctgcagcgtgatcgcccacatgtgccccgagatcagagtgaccgtggtggacgtgaacgagagcagaatcaacgcctggaacagccccaccctgcccatctacgagcccggcctgaaggaggtggtggagagctgcagaggcaagaacctgttcttcagcaccaacatcgacgacgccatcaaggaggccgacctggtgttcatcagcgtgaacacccccaccaagacctacggcatgggcaagggcagagccgccgacctgaagtacatcgaggcctgcgccagaagaatcgtgcagaacagcaacggctacaagatcgtgaccgagaagagcaccgtgcccgtgagagccgccgagagcatcagaagaatcttcgacgccaacaccaagcccaacctgaacctgcaggtgctgagcaaccccgagttcctggccgagggcaccgccatcaaggacctgaagaaccccgacagagtgctgatcggcggcgacgagacccccgagggccagagagccgtgcaggccctgtgcgccgtgtacgagcactgggtgcccagagagaagatcctgaccaccaacacctggagcagcgagctgagcaagctggccgccaacgccttcctggcccagagaatcagcagcatcaacagcatcagcgccctgtgcgaggccaccggcgccgacgtggaggaggtggccaccgccatcggcatggaccagagaatcggcaacaagttcctgaaggccagcgtgggcttcggcggcagctgcttccagaaggacgtgctgaacctggtgtacctgtgcgaggccctgaacctgcccgaggtggccagatactggcagcaggtgatcgacatgaacgactaccagagaagaagattcgccagcagaatcatcgacagcctgttcaacaccgtgaccgacaagaagatcgccatcctgggcttcgccttcaagaaggacaccggcgacaccagagagagcagcagcatctacatcagcaagtacctgatggacgagggcgcccacctgcacatctacgaccccaaggtgcccagagagcagatcgtggtggacctgagccaccccggcgtgagcgaggacgaccaggtgagcagactggtgaccatcagcaaggacccctacgaggcctgcgacggcgcccacgccgtggtgatctgcaccgagtgggacatgttcaaggagctggactacgagagaatccacaagaagatgctgaagcccgccttcatcttcgacggcagaagagtgctggacggcctgcacaacgagctgcagaccatcggcttccagatcgagaccatcggcaagaaggtgagcagcaagagaatcccctacgcccccagcggcgagatccccaagttcagcctgcaggacccccccaacaagaagcccaaggtgtag

SEQ ID NO: 137710 - DNA, 393 bp, Artificial Sequence
  derived and/or modified sequence
atgttcgagatcaagaagatctgctgcatcggcgccggctacgtgggcggccccacctgcagcgtgatcgcccacatgtgccccgagatcagagtgaccgtggtggacgtgaacgagagcagaatcaacgcctggaacagccccaccctgcccatctacgagcccggcctgaaggaggtggtggagagctgcagaggcaagaacctgttcttcagcaccaacatcgacgacgccatcaaggaggccgacctggtgttcatcagcgtgaacacccccaccaagacctacggcatgggcaagggcagagccgccgacctgaagtacatcgaggcctgcgccagaagaatcgtgcagaacagcaacggctacaagatcgtgaccgagaagagctag

SEQ ID NO: 137711 - DNA, 462 bp, Artificial Sequence
  derived and/or modified sequence
atgttcgagatcaagaagatctgctgcatcggcgccggctacgtgggcggccccacctgcagcgtgatcgcccacatgtgccccgagatcagagtgaccgtggtggacgtgaacgagagcagaatcaacgcctggaacagccccaccctgcccatctacgagcccggcctgaaggaggtggtggagagctgcagaggcaagaacctgttcttcagcaccaacatcgacgacgccatcaaggaggccgacctggtgttcatcagcgtgaacacccccaccaagacctacggcatgggcaagggcagagccgccgacctgaagtacatcgaggcctgcgccagaagaatcgtgcagaacagcaacggctacaagatcgtgaccgagaagagcaccgtgcccgtgagagccgccgagagcatcagaagaatcttcgacgccaacaccaagcccaacctgaactag

SEQ ID NO: 137712 - DNA, 1485 bp, Artificial Sequence
  derived and/or modified sequence
atgtttgagatcaagaagatctgctgtatcggggctgggtatgtcggcgggcccacatgcagcgtgatagcccacatgtgccctgaaataagggttacggtggtggatgttaatgaaagcagaatcaacgcctggaattcccccactctgcctatttacgagccaggactgaaagaggttgtggaaagttgtagaggaaagaacctttttttttccacaaacatcgacgatgccatcaaggaagcggatctcgtgttcatatctgtcaacacccctactaagacatatggtatggggaagggcagagcggcagatctgaagtatattgaggcctgtgctaggaggatagtacagaatagtaacgggtataagattgtgaccgaaaagtctaccgtcccagttagggccgcagagtcaattcggagaatctttgatgccaatactaaacccaatttaaatctgcaggttttgtctaacccagagttccttgccgaaggaactgccatcaaggatctcaaaaaccctgacagggtgctgattgggggtgatgaaacaccagagggccagcgcgccgttcaggcactgtgtgctgtgtacgagcactgggtgccaagagaaaagattcttacaactaatacctggtcctcggaactctctaagctggccgctaacgcattcctcgcccaaagaattagcagcataaacagtatctccgccctgtgcgaagctaccggagcagacgtggaagaggtagccaccgcgatcgggatggatcagcgcatcgggaataaattcctgaaagcatccgtgggctttgggggttcctgtttccagaaggatgtgctgaatctagtctacctgtgtgaggccctcaacctccccgaggttgcgagatattggcagcaagtaattgatatgaacgattatcagaggcgacgattcgcatcccgcattattgattctctttttaataccgtgaccgacaaaaaaatcgcgattctgggcttcgcgtttaagaaagacacaggggacactagagagagcagtagcatatacatttcgaaatatctcatggacgagggggcacatctgcacatttatgacccgaaggtacccagagagcaaattgtggtcgacctgtcacaccccggtgtgagcgaggacgatcaggtgagcaggctggtaacgatcagcaaagatccgtacgaggcctgcgacggggctcacgccgtggttatctgcacagaatgggacatgttcaaggagttggactatgagcgaatccacaaaaaaatgttgaaaccagccttcatttttgacggccgtcgggtcctcgacggactccacaatgagctgcagactatcggcttccagatagagacaatcggcaagaaggtgtcatctaagaggatcccctacgcaccgtctggggagatccctaaattcagcctccaggacccccctaataaaaagcctaaggtgtag

SEQ ID NO: 137713 - DNA, 1485 bp, Artificial Sequence
  derived and/or modified sequence
atgtttgagattaaaaagatctgctgcattggggctggttacgtcgggggccccacgtgttcagtgatcgcgcatatgtgtcccgagatccgcgttacggtggtggacgtcaacgagagcaggattaacgcatggaattctcctacactgcctatctacgagccaggcttgaaagaggtagtggaatcctgtcgcggaaaaaacctgttcttctccacaaacatcgacgatgcaatcaaagaagccgatctggtgtttatttctgttaatacccccaccaagacttatggaatgggcaaaggacgggctgctgacctcaagtacatagaggcctgtgccaggcggatagtgcagaactctaatggctacaagattgtgaccgaaaagtccacagtgcctgtcagagcagctgagtccatacgaaggattttcgatgcgaatacaaagccgaaccttaatctgcaggtgttgagtaaccctgagttcctcgccgaaggaacagccattaaggatttgaagaatcccgatcgggtgctaatcggaggcgacgagacccccgagggacagcgggctgtacaggctctttgtgcagtttacgaacattgggtgccacgcgagaagattctgaccaccaacacatggtcaagcgagctctcaaaacttgcggctaatgccttcttggctcaacggattagctcgatcaatagtattagcgccctctgcgaagcgaccggtgccgacgtagaggaggtcgccaccgctattgggatggatcagaggatcgggaataagtttctgaaagccagcgtgggctttggcggtagttgcttccagaaagatgtcctgaaccttgtatacctgtgtgaagccctcaacctgccagaagttgcaaggtactggcagcaagtcattgacatgaacgattatcagaggcggagattcgcctccagaatcatcgatagtctctttaatacagtcacagacaagaaaattgccatcctagggttcgcttttaagaaagataccggggacactcgcgagtcatcaagcatctatatatccaagtatctcatggacgaaggcgcccacctccatatatacgacccgaaggtccctagggagcagatcgtggtagatctgtcgcatcctggagtgtccgaagatgaccaggtgagtaggctggtgaccatcagcaaagatccatatgaggcctgtgacggagcccacgctgtggtgatttgcacagagtgggacatgttcaaagaacttgattatgaacgaatccacaaaaagatgctcaagcccgcctttattttcgacggccggcgcgtcctcgatggtctgcacaacgaactacagacaatcggattccagatcgagaccatcggcaaaaaggtctcatccaaacggattccatacgctccgagcggagaaattccgaaattttcactgcaggaccccccaaataagaaaccaaaagtttag

SEQ ID NO: 137714 - DNA, 393 bp, Artificial Sequence
  derived and/or modified sequence
atgtttgaaattaagaagatttgttgtattggcgcggggtacgtggggggtcccacctgcagcgttatcgcgcacatgtgcccagagattagagtgacggtggtcgacgttaacgaaagcaggattaacgcatggaattcaccaacactgcccatctacgagcccggccttaaagaagtggtcgagtcgtgccggggcaagaacctgttcttctccacgaacattgacgatgccatcaaagaggccgatttagttttcatctccgtcaacacccctaccaagacctatggcatggggaaggggcgagccgccgacctaaaatacatcgaagcatgcgccagacgaatcgtccagaatagtaacggctacaaaatcgtcactgaaaaaagctag

SEQ ID NO: 137715 - DNA, 462 bp, Artificial Sequence
  derived and/or modified sequence
atgtttgaaattaagaagatctgttgtatcggtgcagggtacgtcggcggccccacatgcagcgttatagctcacatgtgccctgagattcgggtgaccgtggtggacgttaatgagagtcgcattaacgcatggaattctccgactctccccatctacgaacctggactgaaggaggtggttgagtcatgtcgcggcaagaacttgtttttctccaccaacatagacgacgccataaaagaggcagatctcgtgtttatatcagtgaacacacctaccaagacttacggcatggggaaaggccgagccgccgatctgaaatacattgaggcctgtgcaaggcggatcgtgcagaatagcaatggctacaagatcgtcacagaaaagtccacagtgcccgtgcgagcagccgaaagtattaggcgtatattcgatgctaacaccaagccgaacctgaattag

SEQ ID NO: 137716 - DNA, 1485 bp, Artificial Sequence
  derived and/or modified sequence
atgtttgagatcaagaagatctgctgcatcggggccggctacgtgggcggccccacctgcagcgtgattgcccacatgtgcccagagatccgggtgacagtggtggatgtgaatgaaagccgcatcaatgcctggaacagccccaccctgcccatctatgagcccggcctgaaggaggtggtggagagctgccggggcaagaacctcttcttcagcaccaacattgatgatgccatcaaggaggccgacctggtgttcatctctgtgaacacccccaccaagacctacggcatgggcaagggccgggctgctgacctgaagtacatcgaggcctgtgcccggcgcatcgtgcagaacagcaatggctacaagatcgtgacagagaagagcacagtgcctgtgcgggctgctgagagcatccgccgcatctttgatgccaacaccaagcccaacctgaacctgcaggtgctgagcaaccctgagttcctggccgagggcacagccatcaaggacctgaagaacccagacagagtgctgattggaggagatgagaccccagagggccagagagctgtgcaggccctgtgtgctgtgtatgagcactgggtgccccgggagaagatcctgaccaccaacacctggagcagcgagctgagcaagctggccgccaatgccttcctggcccagaggatcagcagcatcaacagcatcagcgccctgtgtgaggccaccggggctgatgtggaggaggtggccacagccatcggcatggaccagagaattggcaacaagttcctgaaggcctctgtgggctttggaggcagctgcttccagaaggatgtgctgaacctggtgtacctgtgtgaggccctgaacctgcctgaggtggcccgctactggcagcaggtgattgacatgaatgactaccagaggagaagatttgccagccgcatcatcgacagcctcttcaacacagtgacagacaagaagatcgccatcctgggctttgccttcaagaaggacaccggggacacccgggagagcagcagcatctacatcagcaagtacctgatggatgaaggagcccacctgcacatctatgaccccaaggtgccccgggagcagatcgtggtggacctgagccaccctggggtgtctgaagatgaccaggtgtcccggctggtgaccatcagcaaggacccctatgaggcctgtgatggagcccatgctgtggtgatctgcacagagtgggacatgttcaaggagctggactatgagcgcatccacaagaagatgctgaagccagccttcatctttgatggccggcgggtgctggatggcctgcacaatgagctgcagaccatcggcttccagatcgagaccatcggcaagaaggtgagcagcaagaggatcccctatgcccccagcggggagatccccaagttcagcctgcaggacccccccaacaagaagcccaaggtgtag

SEQ ID NO: 137717 - DNA, 393 bp, Artificial Sequence
  derived and/or modified sequence
atgtttgagatcaagaagatctgctgcatcggggccggctacgtgggcggccccacctgcagcgtgattgcccacatgtgcccagagatccgggtgacagtggtggatgtgaatgaaagccgcatcaatgcctggaacagccccaccctgcccatctatgagcccggcctgaaggaggtggtggagagctgccggggcaagaacctcttcttcagcaccaacattgatgatgccatcaaggaggccgacctggtgttcatctctgtgaacacccccaccaagacctacggcatgggcaagggccgggctgctgacctgaagtacatcgaggcctgtgcccggcgcatcgtgcagaacagcaatggctacaagatcgtgacagagaagagctag

SEQ ID NO: 137718 - DNA, 462 bp, Artificial Sequence
  derived and/or modified sequence
atgtttgagatcaagaagatctgctgcatcggggccggctacgtgggcggccccacctgcagcgtgattgcccacatgtgcccagagatccgggtgacagtggtggatgtgaatgaaagccgcatcaatgcctggaacagccccaccctgcccatctatgagcccggcctgaaggaggtggtggagagctgccggggcaagaacctcttcttcagcaccaacattgatgatgccatcaaggaggccgacctggtgttcatctctgtgaacacccccaccaagacctacggcatgggcaagggccgggctgctgacctgaagtacatcgaggcctgtgcccggcgcatcgtgcagaacagcaatggctacaagatcgtgacagagaagagcacagtgcctgtgcgggctgctgagagcatccgccgcatctttgatgccaacaccaagcccaacctgaactag

SEQ ID NO: 137719 - DNA, 1485 bp, Artificial Sequence
  derived and/or modified sequence
atgttcgagatcaagaagatctgctgcatcggcgccggctacgtgggtggccctacctgctcggttatcgcacacatgtgcccagaaatccgcgtcaccgtggtcgatgtgaatgagtcaagaataaatgcctggaacagccccacactccccatttatgagcccggcctcaaggaagtggtggagagttgtcggggaaagaatctctttttctccacgaatatagacgacgccattaaggaagccgaccttgtatttatctcggtcaatacacccacaaagacctatggtatggggaaggggagggcggcggaccttaaatatatcgaagcttgcgctcggaggatcgtgcagaactcgaacggatataagattgtgactgagaagagtacagtacccgtgagagcagccgaatcaatccggaggattttcgatgctaatactaaaccaaacctcaaccttcaggttctttccaacccagagttcctggctgagggaaccgctatcaaagatctaaaaaaccctgaccgggttttgatcggcggtgatgaaacacccgaagggcaaagagccgtgcaagcattgtgtgctgtctatgaacattgggtccctagggagaagattctgacgacaaatacgtggtcctctgaactcagtaagcttgctgccaatgcttttctggctcagcgtatttcatcaatcaacagcatctcggctctgtgcgaggccacaggggctgacgtggaagaagttgctaccgccatcggtatggatcagcggatcggaaataagtttctgaaggcctcagttgggtttggaggctcatgcttccaaaaagacgtgcttaaccttgtgtacttgtgtgaagcattaaacttgccagaggttgctcgctattggcaacaggtcattgacatgaatgattatcaaaggaggcggtttgcctcacgaataatagacagtctgttcaatacagtgacagataagaaaatcgccatcctgggctttgccttcaagaaggataccggcgatacacgagagtcctccagcatttatattagcaagtatctaatggatgaaggcgcgcatctgcacatatatgatccgaaagtccctcgcgagcagatcgtagtggacctgtcacatcccggagtatcagaggacgatcaggtctcacgactggtgaccatctcaaaggatccgtatgaggcttgtgacggtgctcatgcagtggtcatctgcactgaatgggatatgttcaaagaactcgactatgagagaattcacaaaaagatgctgaagcccgcgtttatcttcgacggcagacgcgtactcgatggcctgcacaatgagctacaaactatcggattccagattgagacaatcgggaaaaaagtatcaagtaaacggatcccctacgctccctctggcgagattcccaagttctccctacaggatccacccaacaagaaaccgaaggtctag

SEQ ID NO: 137720 - DNA, 1485 bp, Artificial Sequence
  derived and/or modified sequence
atgttcgagatcaagaagatctgctgcatcggcgccggctacgtgggcggtcccacttgtagtgtaattgcacatatgtgtcccgagattcgggttaccgtggtcgatgttaacgaatctcgcattaatgcatggaatagccctaccctgcccatctatgagcctggccttaaagaagtggtcgaaagctgcaggggtaaaaatctgttcttcagcactaacatcgatgacgccattaaagaggctgacctggtgttcatctctgtcaatactcctaccaaaacatatggcatgggaaaaggacgggcagccgacctgaagtatatcgaagcctgtgctaggcggatcgtccagaactcgaacggctataagatcgtcacagaaaagtcgacagtgcccgttagggcagcggaatcaattcgacggatcttcgatgcaaatacaaagcccaatctcaatcttcaagtgctcagtaatcctgaattccttgctgagggaaccgcgatcaaggatctgaaaaaccctgacagggtgctgatcggaggggatgaaacacctgaaggccaacgcgctgtacaagccctgtgcgcagtttatgagcactgggtcccacgggagaagatcctcaccactaatacctggtcatctgagctgtccaaactggccgctaatgcattcttggcccaacggatctcttctattaactccataagcgccctgtgcgaggctactggagccgacgtggaagaagtggccactgcaattggaatggaccagaggattggcaacaagtttctgaaggcaagtgtcggcttcggtggatcctgcttccagaaggacgtgctcaatctggtgtacctttgtgaggcccttaacctacccgaagtggcgagatactggcaacaggtcattgacatgaatgactaccaaaggcgacggttcgcgtcccggattatcgactctctgttcaacacagtgacggataagaagatcgcaattcttgggttcgcattcaagaaggacactggtgatacccgggagtcctcctccatctacatctccaaataccttatggatgagggtgcgcatctgcacatttacgatcctaaggttcctcgcgagcagattgtggtcgatctgtcccaccctggcgtgagtgaagatgaccaggtctcccgactggtgactatttctaaagacccatatgaggcatgtgacggcgctcacgccgtggtgatttgtaccgaatgggatatgtttaaagaactggattacgagcggattcacaagaaaatgctcaagcctgccttcattttcgacgggagaagagtgctggatggtttgcacaatgaactgcagaccattgggtttcagatagaaacaattggtaagaaggtgtcctctaaaagaatcccctacgccccttcgggtgagattcccaagttctcattgcaggatcctccaaacaaaaaaccaaaggtgtag

SEQ ID NO: 137721 - DNA, 393 bp, Artificial Sequence
  derived and/or modified sequence
atgttcgagatcaagaagatctgctgcatcggcgccggctacgtggggggccccacgtgctccgttatcgctcacatgtgtcctgagataagggtgaccgtggtcgatgttaacgagtcaagaattaacgcctggaattccccaacactccctatctatgaaccgggcctcaaagaagtggttgagtcctgccgcggcaaaaatcttttcttctctactaacatcgacgatgcaatcaaagaagccgacttggtgttcatctctgtcaacactccaactaaaacatatggtatgggaaagggtagagcggccgatctgaaatatatagaagcttgtgctaggaggatcgtccagaattcaaacgggtataagatcgtgactgagaagagctag

SEQ ID NO: 137722 - DNA, 462 bp, Artificial Sequence
  derived and/or modified sequence
atgttcgagatcaagaagatctgctgcatcggcgccggctacgtgggaggacctacctgttccgtcattgcccacatgtgtcctgaaatcagagtgactgttgtggacgtgaatgaatctaggataaacgcatggaatagtcccaccttgcctatctacgaacccgggctgaaggaggtagtggagagctgtagagggaagaacctcttctttagcaccaacatcgatgacgcgattaaagaggccgacctggtatttatatctgttaacacaccaaccaaaacttacggtatggggaagggccgggccgctgatctcaagtacatagaagcttgtgcccgtaggatagtacagaacagcaacgggtataaaattgtgactgaaaagtcaaccgtcccagttagagctgccgagtccatacgcaggattttcgatgctaatacaaagcccaacctgaattag

SEQ ID NO: 137723 - DNA, 1485 bp, Artificial Sequence
  derived and/or modified sequence
atgttcgagattaaaaagatctgctgcataggcgctggatacgttggtggaccgacctgctcggtgatcgcccatatgtgccccgagattcgtgtgacagttgtggatgttaacgaatcaaggattaacgcctggaattcacctacactgccaatatacgaaccaggactgaaagaagtggtggagtcatgcagaggcaagaacttgttcttctctacaaacattgacgacgcaattaaagaagctgatttggtcttcataagtgtgaacacacccacgaagacttatggcatgggaaagggaagagctgccgatctcaagtatatcgaggcctgcgcccgacggatcgtacagaactcaaacggatataagatcgtgaccgaaaagtctacagtcccagtgcgagcggcagaatctattcgcagaatttttgacgcaaataccaaacccaatctcaatctccaagttcttagcaatcccgaattcttggccgaggggacagctattaaggacctgaagaaccctgatagggtgctcattggtggtgatgaaactcctgagggccagagggctgtccaagccctgtgtgccgtatacgaacattgggtgccccgtgagaaaatcttgaccactaatacatggagctccgaactgagcaagcttgctgctaacgctttcctcgcccagcggatctcttctattaatagtatttcagcactgtgtgaggccactggggctgacgtggaagaggtggctaccgcaattggtatggaccagcgaatcggtaacaagttcctgaaggcttctgtggggttcggtgggtcttgctttcagaaggacgtgctcaacttggtgtatttatgtgaagcgcttaaccttcctgaagtagctaggtactggcagcaggttatcgatatgaatgattatcaaagacgtcgcttcgcttctcggatcattgactctctcttcaacactgtgaccgacaagaagatcgctatcttgggattcgcgttcaaaaaggacacaggtgatacacgggagagctcctcaatctatattagcaaatatttaatggacgagggcgctcatctccatatctacgacccgaaggtgccaagggaacaaattgttgtcgacttgagccatcccggagtcagcgaagatgaccaggtgagccgcctggtcacaattagcaaggatccctacgaagcttgtgatggcgctcacgcagttgtgatatgcaccgagtgggacatgtttaaggagctggattatgaacgaatacacaaaaagatgctcaaacccgcttttatctttgacggcagaagggtcctagatggtctacacaacgaactccagactattgggtttcagatcgaaacaattggtaagaaagtttcttctaagaggatcccatatgctcccagtggggagatcccaaagttcagtctgcaggacccaccgaacaaaaagcccaaggtctag

SEQ ID NO: 137724 - DNA, 1485 bp, Artificial Sequence
  derived and/or modified sequence
atgtttgagattaagaagatttgctgcatcggggcaggatatgtgggtgggcctacgtgtagcgtgatcgctcatatgtgccccgagattagagtgaccgttgtggatgtgaatgaatccagaataaacgcctggaattccccgaccctgcctatctacgagcccggtcttaaagaagtagttgagtcgtgtcgtggaaaaaacttatttttcagcacgaacatcgacgacgcaatcaaggaagctgatttggtctttatatcggttaatacgccaacaaagacgtatggaatgggaaaaggacgggcagctgatctgaagtacattgaggcgtgcgctagaagaatcgtacagaattccaacggctataaaattgttactgagaagtccaccgtcccagtgcgcgctgccgagtccattcgccgtattttcgatgcgaatactaaacctaacttgaatctgcaagtattgagcaaccccgagttcctggctgaagggacagctatcaaggatctgaagaacccagacagggtgttaatcggtggcgacgagaccccggagggccagagggccgtccaggctctttgcgccgtctatgagcactgggtgccccgagagaaaatactgaccaccaatacctggagttcagagctatccaagctggctgctaacgcattcttggcccaaagaatctcatctattaatagtatttctgccctctgcgaagcaacgggcgctgatgtggaggaggttgcaaccgccatcggcatggatcagcgcattggcaacaaattccttaaggccagtgtgggctttggcggatcttgttttcaaaaggacgttctcaatctagtctatctatgcgaggcgctcaacctgcctgaggttgctaggtattggcagcaggtgatagatatgaacgactaccagagacggaggttcgcatccagaattatcgacagtctgttcaacaccgtaaccgataaaaagattgcgatactcggctttgccttcaaaaaagatacaggagacactcgcgagagctcaagtatctacataagcaaatacctaatggacgagggggctcatctgcacatttacgaccctaaggtgcccagagaacagatcgtggtggacctgagtcatcctggagtgagtgaagacgaccaggtctctaggcttgttactatcagcaaggatccatacgaggcgtgtgacggcgctcacgctgtggtgatctgcaccgagtgggacatgtttaaggagctggattatgaacgtatccacaagaaaatgctcaagccggcattcatttttgatggcaggagagttcttgatgggctgcacaacgagctacagactataggcttccagattgagactatcggtaagaaagtgtcgtccaagagaatcccctacgctccgtctggcgaaatccctaagttctcattacaggacccccctaacaagaagccaaaagtgtag

SEQ ID NO: 137725 - DNA, 393 bp, Artificial Sequence
  derived and/or modified sequence
atgttcgagatcaaaaagatatgctgcattggggctggatacgttggcggacccacctgctccgtcattgcacacatgtgtcccgagattcgggtgacagtggtggacgtcaacgagagcagaatcaatgcttggaacagtcccaccctgccaatctatgaacccggtttgaaggaggtggtggaatcgtgcagaggtaagaatctctttttcagcacaaatattgacgatgccatcaaagaagccgatctcgtgtttatctcagtgaatacaccgacgaagacatatgggatgggaaagggaagggctgccgacctcaagtacatagaggcctgtgcacggagaattgtccaaaatagtaatggctacaagatcgtgaccgagaaatcatag

SEQ ID NO: 137726 - DNA, 462 bp, Artificial Sequence
  derived and/or modified sequence
atgtttgagatcaaaaaaatttgttgtattggggctgggtacgttgggggtccgacctgttctgttattgcccacatgtgtcctgagatcagagttaccgtagtagacgttaacgagagccgcatcaacgcgtggaattctcccactcttcctatttacgaacctgggcttaaggaagtggtggagtcctgcagagggaagaacctatttttcagcacgaatatcgacgatgccataaaggaggctgacctcgtattcatctcagtgaatacccccaccaaaacgtacggcatgggcaaaggacgtgccgctgatttgaagtacatcgaagcctgtgctcggaggattgttcagaactccaatgggtacaagattgtgaccgagaaatcaaccgtccccgtccgcgctgccgagagcatcaggcgtatcttcgacgccaacactaagcccaacctgaattag

SEQ ID NO: 137727 - DNA, 1712 bp, Artificial Sequence
  derived and/or modified sequence
gtgtaacgcgtggcagcctgagggaggggcgtgcgccgagagggagctcagatcgagcggggcgcgggtggagaagctgcggcggcgcggcccgtaggaaggtgctgtccgaacgatcgggataggagcggtccctgcgcttgctgctgggaagtggccaggactaaaagaagtggtagaatcctgtcgaggaaaaaatctttttttttctaccaatattgatgatgccatcaaagaagctgatcttgtatttatttctgtgaatactccaacaaaaacctatggaatggggaaaggccgggcagcagatctgaagtatattgaagcttgtgctagacgcattgtgcaaaactcaaatgggtacaaaattgtgactgagaaaagcacagttccagtgcgggcagcagaaagtatccgtcgcatatttgatgcaaacacaaaacccaacttgaatttacaggtgctgtccaaccctgagtttctggcagagggaacagccatcaaggacctaaagaacccagacagagtactgattggaggggatgaaactccagagggccagagagctgtgcaggccctgtgtgctgtatatgagcactgggttcccagagaaaagatcctcaccactaatacttggtcttcagagctttccaaactggcagcaaatgcttttcttgcccagagaataagcagcattaactccataagtgctctgtgtgaagcaacaggagctgatgtagaagaggtagcaacagcgattggaatggaccagagaattggaaacaagtttctaaaagccagtgttgggtttggtgggagctgtttccaaaaggatgttctgaatttggtttatctctgtgaggctctgaatttgccagaagtagctcgttattggcagcaggtcatagacatgaatgactaccagaggaggaggtttgcttcccggatcatagatagtctgtttaatacagtaactgataagaagatagctattttgggatttgcattcaaaaaggacactggtgatacaagagaatcttctagtatatatattagcaaatatttgatggatgaaggtgcacatctacatatatatgatccaaaagtacctagggaacaaatagttgtggatctttctcatccaggtgtttcagaggatgaccaagtgtcccggctcgtgaccatttccaaggatccatatgaagcatgtgatggtgcccatgctgttgttatttgcactgagtgggacatgtttaaggaattggattatgaacgcattcataaaaaaatgctaaagccagcctttatcttcgatggacggcgtgtcctggatgggctccacaatgaactacaaaccattggcttccagattgaaacaattggcaaaaaggtgtcttcaaagagaattccatatgctccttctggtgaaattccgaagtttagtcttcaagatccacctaacaagaaacctaaagtgtagagattgccatttttatttgtgattttttttttttttttttggtacttcaggatagcaaatatctatctgctattaaatggtaaatgaaccaagtgtttttttttgttttttttttgagacagagtctcactgttgcccaggctggagtgcagtggtgcaatctcggctcactgcaagctctgcttcccaggttcacgccattctcctggctcagcctcccaagtagctggga

SEQ ID NO: 137728 - protein, 304 aa, Artificial Sequence
  derived and/or modified sequence
MGVFCLGPWGLGRKLRTPGKGPLQLLSRLCGDHLQAIPAKKAPAGQEEPGTPPSSPLSAEQLDRIQRNKAAALLRLAARNVPVGFGESWKKHLSGEFGKPYFIKLMGFVAEERKHYTVYPPPHQVFTWTQMCDIKDVKVVILGQDPYHGPNQAHGLCFSVQRPVPPPPSLENIYKELSTDIEDFVHPGHGDLSGWAKQGVLLLNAVLTVRAHQANSHKERGWEQFTDAVVSWLNQNSNGLVFLLWGSYAQKKGSAIDRKRHHVLQTAHPSPLSVYRGFFGCRHFSKTNELLQKSGKKPIDWKEL

SEQ ID NO: 137729 - DNA, 915 bp, Artificial Sequence
  derived and/or modified sequence
atgggcgtgttctgcctgggcccctggggcctgggcagaaagctgagaacccccggcaagggccccctgcagctgctgagcagactgtgcggcgaccacctgcaggccatccccgccaagaaggcccccgccggccaggaggagcccggcaccccccccagcagccccctgagcgccgagcagctggacagaatccagagaaacaaggccgccgccctgctgagactggccgccagaaacgtgcccgtgggcttcggcgagagctggaagaagcacctgagcggcgagttcggcaagccctacttcatcaagctgatgggcttcgtggccgaggagagaaagcactacaccgtgtacccccccccccaccaggtgttcacctggacccagatgtgcgacatcaaggacgtgaaggtggtgatcctgggccaggacccctaccacggccccaaccaggcccacggcctgtgcttcagcgtgcagagacccgtgccccccccccccagcctggagaacatctacaaggagctgagcaccgacatcgaggacttcgtgcaccccggccacggcgacctgagcggctgggccaagcagggcgtgctgctgctgaacgccgtgctgaccgtgagagcccaccaggccaacagccacaaggagagaggctgggagcagttcaccgacgccgtggtgagctggctgaaccagaacagcaacggcctggtgttcctgctgtggggcagctacgcccagaagaagggcagcgccatcgacagaaagagacaccacgtgctgcagaccgcccaccccagccccctgagcgtgtacagaggcttcttcggctgcagacacttcagcaagaccaacgagctgctgcagaagagcggcaagaagcccatcgactggaaggagctgtag

SEQ ID NO: 137730 - DNA, 813 bp, Artificial Sequence
  derived and/or modified sequence
atgggcgtgttctgcctgggcccctggggcctgggcagaaagctgagaacccccggcaagggccccctgagcgccgagcagctggacagaatccagagaaacaaggccgccgccctgctgagactggccgccagaaacgtgcccgtgggcttcggcgagagctggaagaagcacctgagcggcgagttcggcaagccctacttcatcaagctgatgggcttcgtggccgaggagagaaagcactacaccgtgtacccccccccccaccaggtgttcacctggacccagatgtgcgacatcaaggacgtgaaggtggtgatcctgggccaggacccctaccacggccccaaccaggcccacggcctgtgcttcagcgtgcagagacccgtgccccccccccccagcctggagaacatctacaaggagctgagcaccgacatcgaggacttcgtgcaccccggccacggcgacctgagcggctgggccaagcagggcgtgctgctgctgaacgccgtgctgaccgtgagagcccaccaggccaacagccacaaggagagaggctgggagcagttcaccgacgccgtggtgagctggctgaaccagaacagcaacggcctggtgttcctgctgtggggcagctacgcccagaagaagggcagcgccatcgacagaaagagacaccacgtgctgcagaccgcccaccccagccccctgagcgtgtacagaggcttcttcggctgcagacacttcagcaagaccaacgagctgctgcagaagagcggcaagaagcccatcgactggaaggagctgtag

SEQ ID NO: 137731 - DNA, 915 bp, Artificial Sequence
  derived and/or modified sequence
atgggcgtgttctgcttaggtccttggggcctcggacgtaaacttcgaactcccggtaaaggtcctctccagcttctgtcaagactgtgcggggaccacttacaagcaatcccagccaaaaaagccccagcaggacaggaggagccagggactcccccatcgtccccattgtcagccgaacaactggataggatacagagaaacaaggccgcggctttattaaggctggccgccaggaacgttcctgtcgggtttggggagtcttggaagaagcatctttctggggagttcggcaagccttactttattaagcttatgggttttgtggctgaagagcgaaaacattacaccgtttatccgcccccacatcaggtcttcacttggacacagatgtgcgacataaaagacgtgaaagtggtcattcttggccaagacccatatcacgggccaaaccaggcacacggtctgtgctttagcgtgcagcgccccgtgcctccccccccctcactggaaaatatctataaggagctgagtactgatatagaggacttcgtgcaccccggccacggggatctctcaggctgggccaaacaaggcgtcttgctgttgaacgccgtcctgacagtgagggcacaccaggccaatagtcacaaggagaggggctgggaacagtttacagacgccgttgtgtcttggcttaatcaaaattctaacggattggtgtttctactctggggatcctacgcccagaagaagggatctgccatcgaccgcaagaggcatcacgtcctgcaaactgcccacccgagtcctctgtcagtgtacaggggcttctttggttgtcgccacttctccaagactaacgagcttctacagaaatcaggtaaaaaacccattgactggaaggagttatag

SEQ ID NO: 137732 - DNA, 813 bp, Artificial Sequence
  derived and/or modified sequence
atgggggtgttctgtcttggcccatggggactagggaggaagctgcggactcccggcaaaggcccgctcagcgcggagcagcttgatagaatacaacgcaacaaggccgctgccctcttgcgccttgccgccagaaacgtcccggttggttttggcgagagctggaaaaaacatttgagtggcgaatttggaaagccttattttattaagctaatggggttcgttgctgaggagaggaagcattacactgtgtatcctcctccccatcaggttttcacttggacccagatgtgcgacatcaaggatgtcaaggtggtgatcctgggccaggacccttatcatggcccaaatcaagctcacgggctgtgcttctctgtgcaaagaccagtgcccccccccccctctctcgagaacatttataaagaactgtcaaccgatatcgaggatttcgtccatccaggacacggtgacctgtcaggttgggccaagcagggggtgctcctactgaatgccgtcctgactgtgagagcccatcaggccaattcacacaaagaacgggggtgggaacagtttacagacgcagtggtgtcatggctgaatcaaaactcaaatgggctcgtgttcctgctgtggggttcctatgcccagaaaaaaggtagcgctatagatagaaaacgtcaccatgtgctgcagaccgcccaccccagtccactgtcagtttaccgcggatttttcggatgtcgccacttctctaagacaaatgaattgctccaaaagtcaggaaaaaaacctattgactggaaagagctgtag

SEQ ID NO: 137733 - DNA, 915 bp, Artificial Sequence
  derived and/or modified sequence
atgggcgtcttctgcctgggcccctggggcctgggcaggaagctgcggacccctgggaagggccccctgcagctgctgagccggctgtgtggggaccacctgcaggccatcccagccaagaaggccccagctggccaggaggagcccggcaccccacccagcagccccctgtctgctgagcagctggaccgcatccagaggaacaaggctgctgccctgctgcggctggccgccagaaatgtgcctgtgggctttggagagagctggaagaagcacctgagcggggagtttgggaagccctacttcatcaagctgatgggctttgtggccgaggagaggaagcactacacagtgtaccccccaccccaccaggtgttcacctggacccagatgtgtgacatcaaggatgtgaaggtggtgatcctgggccaggacccctaccacggccccaaccaggcccacggcctgtgcttctctgtgcagaggcctgtgcccccaccacccagcctggagaacatctacaaggagctgagcacagacatcgaggactttgtgcaccctggccatggagacctgagcggctgggccaagcagggcgtgctgctgctgaatgctgtgctgactgtgcgggcccaccaggccaacagccacaaggagcggggctgggagcagttcacagatgctgtggtgtcctggctgaaccagaacagcaatggcctggtgttcctgctgtggggcagctatgcccagaagaagggcagcgccatcgacaggaagaggcaccacgtgctgcagacagcccaccccagccccctgtctgtgtaccggggcttcttcggctgccgccacttcagcaagaccaatgagctgctgcagaagagcggcaagaagcccatcgactggaaggagctgtag

SEQ ID NO: 137734 - DNA, 813 bp, Artificial Sequence
  derived and/or modified sequence
atgggcgtcttctgcctgggcccctggggcctgggcaggaagctgcggacccctgggaagggccccctgtctgctgagcagctggaccgcatccagaggaacaaggctgctgccctgctgcggctggccgccagaaatgtgcctgtgggctttggagagagctggaagaagcacctgagcggggagtttgggaagccctacttcatcaagctgatgggctttgtggccgaggagaggaagcactacacagtgtaccccccaccccaccaggtgttcacctggacccagatgtgtgacatcaaggatgtgaaggtggtgatcctgggccaggacccctaccacggccccaaccaggcccacggcctgtgcttctctgtgcagaggcctgtgcccccaccacccagcctggagaacatctacaaggagctgagcacagacatcgaggactttgtgcaccctggccatggagacctgagcggctgggccaagcagggcgtgctgctgctgaatgctgtgctgactgtgcgggcccaccaggccaacagccacaaggagcggggctgggagcagttcacagatgctgtggtgtcctggctgaaccagaacagcaatggcctggtgttcctgctgtggggcagctatgcccagaagaagggcagcgccatcgacaggaagaggcaccacgtgctgcagacagcccaccccagccccctgtctgtgtaccggggcttcttcggctgccgccacttcagcaagaccaatgagctgctgcagaagagcggcaagaagcccatcgactggaaggagctgtag

SEQ ID NO: 137735 - DNA, 915 bp, Artificial Sequence
  derived and/or modified sequence
atgggcgtgttctgcctgggcccctggggcctgggccggaagctgcggaccccaggtaaggggccacttcagctgctgagcaggctctgtggagaccatctgcaggctatccctgccaaaaaggcacctgccgggcaggaggaacccggtacccctccttcatcccctttatccgccgaacagttggatagaatacaaaggaacaaagccgccgccctgctgcggctggcagcgcggaatgtccccgtcggatttggcgagtcttggaagaaacacttgtctggggagtttggcaaaccttacttcatcaaacttatggggttcgttgcagaggaacgcaaacactacactgtgtaccccccccctcatcaggtgtttacatggacacagatgtgtgacattaaggacgtaaaagtcgtaatccttggacaggacccgtaccacgggcccaaccaggcccacggcttatgcttctctgtgcagcggcccgtaccaccacctccaagcctagagaatatatacaaggagctgtccactgatatagaggatttcgttcatcccgggcatggagacttgtccggttgggcaaaacagggggtgttactgctgaatgctgtgctgactgtgcgggcgcatcaggccaattcccataaggagcgcggttgggagcagttcaccgatgccgtcgtgagctggctgaatcaaaacagtaatggtctggtgtttctgctgtggggctcttatgcacagaagaaggggagcgcaatcgatcggaaaagacatcacgtactgcaaactgcccacccctcccctctgagtgtttatcggggattctttggatgccgccacttttctaagacaaatgagttgctccaaaaatccggaaagaaaccaatcgactggaaggagctgtag

SEQ ID NO: 137736 - DNA, 813 bp, Artificial Sequence
  derived and/or modified sequence
atgggcgtgttctgcctgggcccctggggcctgggccggaagctgagaactcccggcaagggacccttgtcagctgagcaattagataggatccagcggaacaaggcagctgctctgctcagacttgctgctagaaatgtgcccgtcggctttggcgagtcatggaagaagcatctcagcggcgaatttgggaagccctattttatcaaactgatgggctttgtggctgaggaacggaagcattatacggtttatccccccccccaccaagtcttcacttggacacagatgtgtgatattaaagacgtgaaggtggtgatcctgggccaggacccctaccatggccccaaccaagcacacggtttgtgcttctccgtccagcggccagtgcctcctccaccaagcttggagaacatatacaaggaattgagtactgacatcgaagacttcgtacatcctggacacggggacctaagtgggtgggccaagcaaggagtgcttctgctaaacgccgttctgaccgtgagggcccatcaggctaattcgcataaagaacgaggctgggaacagttcacagatgcggtggtgtcgtggctcaaccagaactcaaacggacttgtttttctgctttggggcagctatgcccagaagaagggttcagcaattgatcgaaaaagacaccacgtgctccagacagcacatccctcaccattgtccgtgtatcggggattttttggttgccgacacttctcaaaaactaacgagttgctgcagaagtctggaaagaagcccatagactggaaggagctctag

SEQ ID NO: 137737 - DNA, 915 bp, Artificial Sequence
  derived and/or modified sequence
atgggggtcttttgtctgggtccatgggggctcggcagaaagctcaggacaccaggaaagggcccactgcaactactgagcaggctctgcggggaccacctccaagcgatcccagccaaaaaagcccctgccggacaggaggagccaggcactccgccatcctctcctctgtcagcagaacagcttgacagaatccagcggaacaaggctgctgctcttctgcgactggccgctcgcaatgtacccgtaggtttcggagagtcctggaaaaaacatttgtcgggagaattcgggaagccctattttattaaattgatgggttttgtggctgaagaaagaaagcactataccgtttatcctcccccacatcaagtattcacgtggacccagatgtgtgatatcaaagatgtgaaagttgtaatcttggggcaagacccctaccacgggcctaaccaggcccacggcctatgcttttccgtccaaagacccgttccaccccctccctccctggagaacatctataaggaactgtctactgacatagaagattttgtccatcccggacatggcgatctatccgggtgggcgaaacagggcgttttgcttctcaatgcagtgctgacagttcgggctcatcaagccaactctcacaaggagcgaggctgggagcagttcaccgatgcggtggtcagttggctgaatcagaactctaatggcctggtctttctgctgtggggctcctacgcgcaaaagaaaggctctgcaattgacagaaaaaggcatcatgtgctccaaaccgcacacccctctcctctgagcgtatacaggggcttcttcggctgccgccacttttccaagaccaatgaattgctccagaaaagcggaaaaaaacccattgattggaaggagctctag

SEQ ID NO: 137738 - DNA, 813 bp, Artificial Sequence
  derived and/or modified sequence
atgggggtgttctgtctgggtccctggggccttggcagaaagcttagaacacccggaaaaggaccactcagcgccgagcagctggacaggatacagaggaacaaggctgcggcactactgaggcttgcagccagaaatgttcccgtggggtttggggaaagttggaaaaaacatctgtccggagagtttggcaagccttattttataaaactgatggggttcgtcgccgaagaaaggaaacattataccgtgtacccaccacctcatcaagtgttcacctggacgcagatgtgcgacatcaaagatgtcaaggtcgtcatcttaggccaagatccctatcacggcccaaaccaggctcacggactttgcttctccgtgcagaggccagtgcccccaccacccagccttgaaaacatctacaaggagctcagcactgacatcgaagatttcgttcacccaggtcacggagatctttcaggctgggccaaacagggggtccttctgctcaacgccgtccttacagtgcgtgcccaccaagctaactcacataaggagaggggttgggaacagttcacggatgctgtggtgtcttggcttaaccagaactccaatgggctagtgttccttctctgggggagttacgctcaaaagaagggcagtgctattgacaggaaaaggcatcacgtgttgcaaaccgcccatccatctcccctctctgtgtacaggggattcttcggctgcagacacttcagtaaaacaaacgaactcttacagaagagcggaaagaagcccattgattggaaggaactatag

SEQ ID NO: 137739 - DNA, 2130 bp, Artificial Sequence
  derived and/or modified sequence
aaaagaccacgtggggacgcggtggggcgggtctggcgggggcggggcacctctgtgcagggttcccagtcaccgcgacgctcctcgggaagccatagggcgcctcccagcccgtctccccgctccagtttagaacctaattcccaattcccggaccgggcccagccctgggctcttactgtccgcttttgctgggacctgttccacaaatgggcgtcttctgccttgggccgtgggggttgggccggaagctgcggacgcctgggaaggggccgctgcagctcttgagccgcctctgcggggaccacttgcaggccatcccagccaagaaggccccggctgggcaggaggagcctgggacgccgccctcctcgccgctgagtgccgagcagttggaccggatccagaggaacaaggccgcggccctgctcagactcgcggcccgcaacgtgcccgtgggctttggagagagctggaagaagcacctcagcggggagttcgggaaaccgtattttatcaagctaatgggatttgttgcagaagaaagaaagcattacactgtttatccacccccacaccaagtcttcacctggacccagatgtgtgacataaaagatgtgaaggttgtcatcctgggacaggatccatatcatggacctaatcaagctcacgggctctgctttagtgttcaaaggcctgttccgcctccgcccagtttggagaacatttataaagagttgtctacagacatagaggattttgttcatcctggccatggagatttatctgggtgggccaagcaaggtgttctccttctcaacgctgtcctcacggttcgtgcccatcaagccaactctcataaggagcgaggctgggagcagttcactgatgcagttgtgtcctggctaaatcagaactcgaatggccttgttttcttgctctggggctcttatgctcagaagaagggcagtgccattgataggaagcggcaccatgtactacagacggctcatccctcccctttgtcagtgtatagagggttctttggatgtagacacttttcaaagaccaatgagctgctgcagaagtctggcaagaagcccattgactggaaggagctgtgatcatcagctgaggggtggcctttgagaagctgctgttaacgtatttgccagttacgaagttccactgaaaattttcctattaattcttaagtactctgcataagggggaaaagcttccagaaagcagccatgaaccaggctgtccaggaatggcagctgtatccaaccacaaacaacaaaggctaccctttgaccaaatgtctttctctgcaacatggcttcggcctaaaatatgcagaagacagatgaggtcaaatactcagttggctctctttatctcccttgcctttatggtgaaacaggggagatgtgcacctttcaggcacagccctagtttggcgcctgctgctccttggttttgcctggttagactttcagtgacagatgttggggtgtttttgcttagaaaggtccccttgtctcagccttgcagggcaggcatgccagtctctgccagttccactgcccccttgatctttgaaggagtcctcaggcccctcgcagcataaggatgttttgcaactttccagaatctggcccagaaattagggctcaatttcctgattgtagtagaggttaagattgctgtgagctttatcagataagagaccgagagaagtaagctgggtcttgttattccttgggtgttggtggaataagcagtggaatttgaacaaggaagaggagaaaagggaattttgtctttatggggtggggtgattttctcctagggttatgtccagttggggtttttaaggcagcacagactgccaagtactgttttttttaaccgactgaaatcactttgggatattttttcctgcaacactggaaagttttagttttttaagaagtactcatgcagatatatatatatatatttttcccagtcctttttttaagagacggtctttattgggtctgcacctccatccttgatcttgttagcaatgctgtttttgctgttagtcgggttagagttggctctacgcgaggtttgttaata

SEQ ID NO: 137740 - DNA, 1326 bp, Artificial Sequence
  derived and/or modified sequence
gtgcagggttcccagtcaccgcgacgctcctcgggaagccatagggcgcctcccagcccgtctccccgctccagtttagaacctaattcccaattcccggaccgggcccagccctgggctcttactgtccgcttttgctgggacctgttccacaaatgggcgtcttctgccttgggccgtgggggttgggccggaagctgcggacgcctgggaaggggccgctgagtgccgagcagttggaccggatccagaggaacaaggccgcggccctgctcagactcgcggcccgcaacgtgcccgtgggctttggagagagctggaagaagcacctcagcggggagttcgggaaaccgtattttatcaagctaatgggatttgttgcagaagaaagaaagcattacactgtttatccacccccacaccaagtcttcacctggacccagatgtgtgacataaaagatgtgaaggttgtcatcctgggacaggatccatatcatggacctaatcaagctcacgggctctgctttagtgttcaaaggcctgttccgcctccgcccagtttggagaacatttataaagagttgtctacagacatagaggattttgttcatcctggccatggagatttatctgggtgggccaagcaaggtgttctccttctcaacgctgtcctcacggttcgtgcccatcaagccaactctcataaggagcgaggctgggagcagttcactgatgcagttgtgtcctggctaaatcagaactcgaatggccttgttttcttgctctggggctcttatgctcagaagaagggcagtgccattgataggaagcggcaccatgtactacagacggctcatccctcccctttgtcagtgtatagagggttctttggatgtagacacttttcaaagaccaatgagctgctgcagaagtctggcaagaagcccattgactggaaggagctgtgatcatcagctgaggggtggcctttgagaagctgctgttaacgtatttgccagttacgaagttccactgaaaattttcctattaattcttaagtactctgcataagggggaaaagcttccagaaagcagccatgaaccaggctgtccaggaatggcagctgtatccaaccacaaacaacaaaggctaccctttgaccaaatgtctttctctgcaacatggcttcggcctaaaatatgcagaagacagatgaggtcaaatactcagttggctctctttatctcccttgcctttatggtgaaacaggggagatgtgcacctttcaggcacagccctagtttggcgcctgctgctccttggtt

SEQ ID NO: 137741 - protein, 963 aa, Artificial Sequence
  derived and/or modified sequence
MAEGGGCRERPDAETQKSELGPLMRTTLQRGAQWYLIDSRWFKQWKKYVGFDSWDMYNVGEHNLFPGPIDNSGLFSDPESQTLKEHLIDELDYVLVPTEAWNKLLNWYGCVEGQQPIVRKVVEHGLFVKHCKVEVYLLELKLCENSDPTNVLSCHFSKADTIATIEKEMRKLFNIPAERETRLWNKYMSNTYEQLSKLDNTVQDAGLYQGQVLVIEPQNEDGTWPRQTLQSKSSTAPSRNFTTSPKSSASPYSSVSASLIANGDSTSTCGMHSSGVSRGGSGFSASYNCQEPPSSHIQPGLCGLGNLGNTCFMNSALQCLSNTAPLTDYFLKDEYEAEINRDNPLGMKGEIAEAYAELIKQMWSGRDAHVAPRMFKTQVGRFAPQFSGYQQQDSQELLAFLLDGLHEDLNRVKKKPYLELKDANGRPDAVVAKEAWENHRLRNDSVIVDTFHGLFKSTLVCPECAKVSVTFDPFCYLTLPLPLKKDRVMEVFLVPADPHCRPTQYRVTVPLMGAVSDLCEALSRLSGIAAENMVVADVYNHRFHKIFQMDEGLNHIMPRDDIFVYEVCSTSVDGSECVTLPVYFRERKSRPSSTSSASALYGQPLLLSVPKHKLTLESLYQAVCDRISRYVKQPLPDEFGSSPLEPGACNGSRNSCEGEDEEEMEHQEEGKEQLSETEGSGEDEPGNDPSETTQKKIKGQPCPKRLFTFSLVNSYGTADINSLAADGKLLKLNSRSTLAMDWDSETRRLYYDEQESEAYEKHVSMLQPQKKKKTTVALRDCIELFTTMETLGEHDPWYCPNCKKHQQATKKFDLWSLPKILVVHLKRFSYNRYWRDKLDTVVEFPIRGLNMSEFVCNLSARPYVYDLIAVSNHYGAMGVGHYTAYAKNKLNGKWYYFDDSNVSLASEDQIVTKAAYVLFYQRRDDEFYKTPSLSSSGSSDGGTRPSSSQQGFGDDEACSMDTN

SEQ ID NO: 137742 - DNA, 2892 bp, Artificial Sequence
  derived and/or modified sequence
atggccgagggcggcggctgcagagagagacccgacgccgagacccagaagagcgagctgggccccctgatgagaaccaccctgcagagaggcgcccagtggtacctgatcgacagcagatggttcaagcagtggaagaagtacgtgggcttcgacagctgggacatgtacaacgtgggcgagcacaacctgttccccggccccatcgacaacagcggcctgttcagcgaccccgagagccagaccctgaaggagcacctgatcgacgagctggactacgtgctggtgcccaccgaggcctggaacaagctgctgaactggtacggctgcgtggagggccagcagcccatcgtgagaaaggtggtggagcacggcctgttcgtgaagcactgcaaggtggaggtgtacctgctggagctgaagctgtgcgagaacagcgaccccaccaacgtgctgagctgccacttcagcaaggccgacaccatcgccaccatcgagaaggagatgagaaagctgttcaacatccccgccgagagagagaccagactgtggaacaagtacatgagcaacacctacgagcagctgagcaagctggacaacaccgtgcaggacgccggcctgtaccagggccaggtgctggtgatcgagccccagaacgaggacggcacctggcccagacagaccctgcagagcaagagcagcaccgcccccagcagaaacttcaccaccagccccaagagcagcgccagcccctacagcagcgtgagcgccagcctgatcgccaacggcgacagcaccagcacctgcggcatgcacagcagcggcgtgagcagaggcggcagcggcttcagcgccagctacaactgccaggagccccccagcagccacatccagcccggcctgtgcggcctgggcaacctgggcaacacctgcttcatgaacagcgccctgcagtgcctgagcaacaccgcccccctgaccgactacttcctgaaggacgagtacgaggccgagatcaacagagacaaccccctgggcatgaagggcgagatcgccgaggcctacgccgagctgatcaagcagatgtggagcggcagagacgcccacgtggcccccagaatgttcaagacccaggtgggcagattcgccccccagttcagcggctaccagcagcaggacagccaggagctgctggccttcctgctggacggcctgcacgaggacctgaacagagtgaagaagaagccctacctggagctgaaggacgccaacggcagacccgacgccgtggtggccaaggaggcctgggagaaccacagactgagaaacgacagcgtgatcgtggacaccttccacggcctgttcaagagcaccctggtgtgccccgagtgcgccaaggtgagcgtgaccttcgaccccttctgctacctgaccctgcccctgcccctgaagaaggacagagtgatggaggtgttcctggtgcccgccgacccccactgcagacccacccagtacagagtgaccgtgcccctgatgggcgccgtgagcgacctgtgcgaggccctgagcagactgagcggcatcgccgccgagaacatggtggtggccgacgtgtacaaccacagattccacaagatcttccagatggacgagggcctgaaccacatcatgcccagagacgacatcttcgtgtacgaggtgtgcagcaccagcgtggacggcagcgagtgcgtgaccctgcccgtgtacttcagagagagaaagagcagacccagcagcaccagcagcgccagcgccctgtacggccagcccctgctgctgagcgtgcccaagcacaagctgaccctggagagcctgtaccaggccgtgtgcgacagaatcagcagatacgtgaagcagcccctgcccgacgagttcggcagcagccccctggagcccggcgcctgcaacggcagcagaaacagctgcgagggcgaggacgaggaggagatggagcaccaggaggagggcaaggagcagctgagcgagaccgagggcagcggcgaggacgagcccggcaacgaccccagcgagaccacccagaagaagatcaagggccagccctgccccaagagactgttcaccttcagcctggtgaacagctacggcaccgccgacatcaacagcctggccgccgacggcaagctgctgaagctgaacagcagaagcaccctggccatggactgggacagcgagaccagaagactgtactacgacgagcaggagagcgaggcctacgagaagcacgtgagcatgctgcagccccagaagaagaagaagaccaccgtggccctgagagactgcatcgagctgttcaccaccatggagaccctgggcgagcacgacccctggtactgccccaactgcaagaagcaccagcaggccaccaagaagttcgacctgtggagcctgcccaagatcctggtggtgcacctgaagagattcagctacaacagatactggagagacaagctggacaccgtggtggagttccccatcagaggcctgaacatgagcgagttcgtgtgcaacctgagcgccagaccctacgtgtacgacctgatcgccgtgagcaaccactacggcgccatgggcgtgggccactacaccgcctacgccaagaacaagctgaacggcaagtggtactacttcgacgacagcaacgtgagcctggccagcgaggaccagatcgtgaccaaggccgcctacgtgctgttctaccagagaagagacgacgagttctacaagacccccagcctgagcagcagcggcagcagcgacggcggcaccagacccagcagcagccagcagggcttcggcgacgacgaggcctgcagcatggacaccaactag

SEQ ID NO: 137743 - DNA, 2892 bp, Artificial Sequence
  derived and/or modified sequence
atggctgaaggcgggggatgccgggaaagaccggatgctgagacacagaagtcggaactcgggcctctgatgcggacaaccctccaaaggggcgcgcaatggtacctgattgacagtcggtggttcaagcagtggaaaaagtatgtggggttcgattcttgggacatgtacaacgtgggagagcacaatttgttcccaggcccaatcgataatagcgggttgtttagtgatcctgagagccaaactctgaaagagcatctgatcgatgaattggactatgtgctggtacccacagaggcttggaataaactcttgaattggtacggatgcgtggaagggcagcagccaattgtgcggaaggtggtggaacatgggttatttgtgaagcattgtaaggtggaggtttacctgcttgaactgaagttgtgtgaaaatagcgacccgaccaatgtgctctcatgtcacttcagcaaagctgatacgatagccaccattgaaaaagagatgcgcaagctttttaatatccccgccgaaagggagacgaggctctggaacaaatacatgtccaatacatatgagcaactcagtaagctggataatacagtgcaagatgctggactgtaccaagggcaggtgctggtgattgagccgcagaatgaagacggtacatggcctagacaaacactccagtcaaagtcaagcaccgccccaagtagaaactttactaccagccctaagtcctcagcctcgccgtactcctcagtgtcggcctccttgattgccaatggggacagcacctcgacatgcggaatgcactctagcggcgtatcgagaggtggttccggcttctcggcctcttataattgccaggagccacctagtagccatattcaaccaggactctgtggccttggcaacttaggcaatacctgcttcatgaattccgccctccagtgcttatccaacacggcgcccctaacagactacttcctgaaagatgaatacgaggccgaaataaaccgggataatcctctcgggatgaaaggggaaatcgctgaggcctacgcagagctaattaaacagatgtggtcagggcgtgacgcacacgtggcccctcggatgtttaaaacgcaggtcggccgattcgcccctcagttcagtggttatcagcagcaggacagccaggagcttttggcgttcttgctcgatggtctgcacgaggacttgaaccgagtgaagaagaaaccttacctggagctcaaggacgcgaacgggcgacctgatgccgttgttgcaaaagaagcttgggagaaccacaggcttaggaatgacagcgtgattgtggatacttttcacggtcttttcaaatccacactggtgtgcccagaatgcgctaaggtcagtgtgacatttgacccattctgctacctcaccctgcctctgccactcaagaaggatagagtcatggaagttttcctggtacctgcagatccacactgcaggccaacccagtaccgcgtaacagtaccccttatgggcgcggtgtccgacctgtgtgaggccttgtctcgcctgagtggaattgctgcggagaacatggtggtggctgatgtctacaatcataggttccataaaatatttcagatggacgaaggattgaatcacattatgcccagggatgacatttttgtttacgaggtatgctccactagcgttgacgggtctgagtgtgtcactctgccagtttatttccgggagcggaaatctagacccagtagcaccagctccgccagcgctctgtacgggcaaccacttctcctttctgtccctaagcataagcttacactcgagagtttatatcaggctgtgtgcgatcggatctcccgatatgtgaaacagcctctgcctgacgagtttggctcctcaccactcgaacccggggcatgtaatgggtcaagaaacagttgcgagggagaggatgaggaagaaatggaacaccaggaggaaggcaaagagcagctgtccgagactgagggttccggggaggatgaacctgggaatgatccaagtgagacgacccagaaaaagatcaaaggtcagccttgtccgaagagactgttcacgtttagcttggtgaattcatacggtactgcagatataaattcgctagccgctgatggcaagctgcttaagctcaattcccgtagtacactcgccatggactgggactctgagacccggaggttgtactacgacgaacaagagagcgaagcttacgagaaacacgttagtatgctccaaccgcagaaaaaaaagaaaactactgtcgcgctacgagactgcatagaactctttaccacaatggaaaccttgggagagcatgatccatggtattgtcctaactgcaaaaagcaccaacaggccacaaaaaagttcgacctgtggtcccttccaaaaatcttagtcgttcacctgaaacgtttttcctacaaccgctactggagggacaaactcgatactgtcgtcgagtttccgatcaggggcctgaatatgagtgaattcgtgtgtaacttaagcgcccgaccatacgtttacgacctcatcgcggtgagtaaccactacggcgctatgggcgttggtcactatacggcgtacgcaaagaataaactgaacggcaaatggtattatttcgatgattctaacgtgagcttagcctccgaagatcagatcgtgactaaggctgcctatgttctattctatcaacgccgcgacgacgagttctataagaccccctctctcagcagcagcggctctagcgacggaggtactaggcccagctcaagtcaacagggttttggcgacgatgaagcctgtagcatggacaccaattag

SEQ ID NO: 137744 - DNA, 2892 bp, Artificial Sequence
  derived and/or modified sequence
atggccgagggcggcggctgccgggagaggccagatgctgagacccagaagtctgagctgggccccctgatgaggaccaccctgcagagaggagcccagtggtacctgattgacagccgctggttcaagcagtggaagaagtatgtgggctttgacagctgggacatgtacaacgtgggggagcacaacctcttccctggccccatcgacaacagcggcctcttcagtgaccctgagagccagaccctgaaggagcacctgattgatgagctggactatgtgctggtgcccacagaggcctggaacaagctgctgaactggtacggctgtgtggagggccagcagcccatcgtgaggaaggtggtggagcacggcctgtttgtgaagcactgcaaggtggaggtgtacctgctggagctgaagctgtgtgagaacagcgaccccaccaacgtgctgagctgccacttcagcaaggctgacaccatcgccaccatcgagaaggagatgaggaagctgttcaacatcccagctgagcgggagacccggctgtggaacaagtacatgagcaacacctatgagcagctgagcaagctggacaacacagtgcaggatgctggcctgtaccagggccaggtgctggtgattgagccccagaatgaagatggcacctggccccggcagaccctgcagagcaagagcagcacagcccccagcaggaacttcaccaccagccccaagagcagcgccagcccctacagctctgtgtctgccagcctcatcgccaacggggacagcaccagcacctgtggcatgcacagcagcggcgtgtccagaggaggcagcggcttcagcgccagctacaactgccaggagccccccagcagccacatccagcccggcctgtgtggcctgggcaacctgggcaacacctgcttcatgaacagcgccctgcagtgcctgagcaacacagcccccctgacagactacttcctgaaggatgaatatgaagctgagatcaacagagacaaccccctgggcatgaagggggagattgctgaggcctatgcagagctgatcaagcagatgtggagcggcagagatgcccacgtggcccccaggatgttcaagacccaggtgggccgctttgccccccagttcagcggctaccagcagcaggacagccaggagctgctggccttcctgctggatggcctgcacgaggacctgaacagagtgaagaagaagccctacctggagctgaaggatgccaacggccgcccagatgctgtggtggccaaggaggcctgggagaaccaccggctgagaaatgattctgtgattgtggacaccttccacggcctcttcaagagcaccctggtgtgcccagaatgtgccaaggtgtctgtgacctttgaccccttctgctacctgaccctgcccctgcccctgaagaaggacagagtgatggaggtgttcctggtgcctgctgacccccactgccggcccacccagtacagagtgacagtgcccctgatgggcgctgtgtctgacctgtgtgaggccctgagccggctgagcggcattgctgctgagaacatggtggtggctgatgtgtacaaccaccgcttccacaagatcttccagatggatgagggcctgaaccacatcatgcccagagatgacatctttgtgtatgaggtgtgcagcacctctgtggatggctctgaatgtgtgaccctgcctgtgtacttccgggagaggaagagccggcccagcagcaccagcagcgccagcgccctgtatggccagcccctgctgctgtctgtgcccaagcacaagctgaccctggagagcctgtaccaggccgtgtgtgaccgcatcagccgctacgtgaagcagcccctgcctgatgaatttggcagcagccccctggagcccggggcctgcaatggcagcaggaacagctgtgaaggagaagatgaggaggagatggagcaccaggaggagggcaaggagcagctgtctgaaacagagggcagcggggaggatgagcctggaaatgaccccagcgagaccacccagaagaagatcaagggccagccctgccccaagaggctcttcaccttcagcctggtgaacagctatggaacagctgacatcaacagcctggccgcagatggcaagctgctgaagctgaacagccgcagcaccctggccatggactgggacagcgagacccggcggctgtactatgatgagcaggagagcgaggcctatgagaagcacgtgtccatgctgcagccccagaagaagaagaagaccaccgtggccctgcgggactgcatcgagctgttcaccaccatggagaccctgggggagcatgacccctggtactgccccaactgcaagaagcaccagcaggccaccaagaagtttgacctgtggagcctgcccaagatcctggtggtgcacctgaagcgcttctcctacaaccgctactggagggacaagctggacacagtggtggagttccccatccggggcctgaacatgtctgaatttgtgtgcaacctgagcgcccggccctacgtgtatgacctgattgctgtgagcaaccactacggggccatgggcgtgggccactacacagcctatgccaagaacaagctgaatggcaagtggtactactttgatgacagcaatgtgtccctggccagcgaggaccagatcgtgaccaaggccgcctacgtgctcttctaccagaggagagatgatgagttctacaagacccccagcctgagcagcagcggcagcagtgatggcggcacccggcccagcagcagccagcagggctttggagatgatgaggcctgcagcatggacaccaactag

SEQ ID NO: 137745 - DNA, 2892 bp, Artificial Sequence
  derived and/or modified sequence
atggccgagggcggcggctgccgggagcggcccgacgccgagacccagaagtcagagttgggacctctcatgcgaacgacattacagagaggcgctcagtggtatctcattgacagcaggtggtttaaacagtggaagaagtacgttggattcgatagttgggatatgtacaatgttggggaacataacctgtttccaggccctatcgacaactctgggttgttcagcgatcccgagtctcaaaccctgaaggagcacctcatagatgagctcgattacgtgctggtccctaccgaggcctggaataaattactgaattggtacggatgtgtcgaaggacagcagccaatagtgcgcaaagtcgtggagcacgggctcttcgttaaacactgcaaagtcgaagtttacctgctggaattaaaactgtgcgaaaatagcgatcctacgaacgtcctgtcctgtcactttagcaaggctgatacaatcgccacaatagagaaggagatgaggaagctgttcaacattcccgccgagcgcgagacacgtttgtggaacaagtatatgtcaaatacctatgagcaattaagtaaactcgacaataccgtgcaggacgcaggcctctaccaggggcaggtgctagtcattgagccccagaatgaagatggcacctggcctagacagacgctgcagtccaagagttctactgcaccttcccgtaacttcacaacaagcccaaaatcatctgctagtccgtactcttcggtgtctgcgagcctaattgcgaacggtgacagcacgtcgacctgtgggatgcatagctccggggtgtctcggggtggtagcggcttctctgcgtcatacaattgtcaagaacctccctcctcacacatccagcccgggctctgcggattgggtaacctggggaacacctgctttatgaacagcgcccttcagtgcctctcaaacaccgctcctttgactgactatttccttaaggacgaatacgaagcggaaatcaacagagataatccactgggcatgaaaggcgaaatagccgaggcctacgcagagttgattaaacagatgtggtccggcagagatgctcatgtagcgcctaggatgttcaagactcaagtgggacgatttgcaccccagttctctggctatcagcagcaggattcccaagagctgctggcatttctgctggacggactccatgaggatctcaatcgggtgaagaaaaagccataccttgagctaaaggatgccaatgggaggccagatgccgtggtcgccaaggaggcctgggagaaccatagacttagaaacgattcagtgatcgtggacacctttcatggactgtttaagtccacactggtatgcccagaatgcgccaaagtcagcgtcacctttgatcctttttgctatttaacactgcccctgcccctgaagaaagatagagtcatggaggttttcctcgtgcctgctgatccgcactgcaggccaacccagtacagagtcacagtaccattaatgggggctgtcagcgatctatgcgaagctttaagtaggctttccgggatagccgcggagaacatggttgtggctgatgtttataatcaccgttttcacaaaatatttcaaatggacgaaggactgaaccatatcatgcctcgtgatgatatatttgtttacgaggtgtgttccaccagtgtggatggcagcgagtgtgtcacccttcccgtatactttagagagagaaagtcccgcccctcctctacatcctccgcctctgctttgtacggccagcccttgctcttgagtgtgcccaaacacaaacttactctcgaatcattgtaccaggccgtgtgcgaccgcatttcgcggtacgtgaaacagccactacctgacgaatttggatccagccctctggaaccaggcgcctgtaatggatcacggaattcgtgtgagggcgaagatgaggaggagatggagcaccaggaagaaggcaaggaacagctgtcagagactgagggcagcggagaagatgagccaggcaatgatccaagcgaaactactcagaaaaagataaagggacaaccatgcccgaaaagactgttcacgttctctcttgtaaattcttacggtactgcagacataaacagcctggccgctgatggcaaactacttaagcttaacagtcggagtaccctcgcaatggactgggattccgagaccagacgactctactatgacgagcaggaatcggaggcatacgaaaagcacgtgtcaatgctccagcctcaaaagaaaaagaaaacaaccgttgcgcttcgtgattgtatcgaactgtttaccactatggagactcttggcgaacatgatccatggtactgtcctaactgcaagaagcaccagcaggcaacgaagaagtttgatctgtggtctttgccaaaaatactagtcgttcatctaaagcgctttagctataatcgctactggcgggacaagttggatacagtggtggaatttccgattcgtgggctgaatatgagcgaatttgtctgcaatttgtccgctcgcccctatgtgtatgatctgattgctgtatccaaccactacggagctatgggcgtggggcattacaccgcctatgccaagaacaaactgaatgggaagtggtattactttgatgattctaatgttagccttgcttcagaggatcaaatagtgactaaagcagcttatgtgttattctaccagcgcagggacgatgaattctataagacgccaagcttgtcatcctcagggtcaagtgacggaggtactcggccctcctcttcccagcagggtttcggggacgacgaagcctgctccatggatactaactag

SEQ ID NO: 137746 - DNA, 2892 bp, Artificial Sequence
  derived and/or modified sequence
atggcagaagggggtggctgccgcgagaggccagatgcagaaactcagaaaagcgagttagggccacttatgagaaccacgctgcagcggggagctcagtggtatctgatcgattctcgctggttcaaacagtggaaaaagtatgtcggatttgatagttgggatatgtacaacgtgggcgagcacaacctattccctggcccaatcgataactcgggcctgttttctgacccagagtcccagactttaaaagagcatctcatcgatgaactcgactatgttctcgttcctaccgaggcttggaacaaactcctgaactggtacggttgcgttgaggggcagcaacccatcgtgaggaaagttgttgagcatggtctgtttgtgaaacactgcaaggtggaagtgtatctactggaactcaaactctgcgagaactcagaccccaccaatgttttatcctgccatttctcaaaggccgacaccattgctactattgagaaggagatgcggaagctgtttaacatccctgcggaacgagagacccggctgtggaacaaatacatgtcaaacacatacgagcagctatctaaactggataatacagtccaagacgctggcttatatcagggtcaggtactggtcatcgagccgcagaatgaggatggcacatggcccagacagaccctccagagtaaatcctccacagctcctagccgaaacttcactactagtcccaagtcttccgctagtccttacagctctgtctccgcttcattgatcgctaacggcgattccacctcaacatgcggcatgcatagctctggggtctcgcgcggtgggtcaggcttctcagcttcctataactgccaggagcccccaagctcgcacattcagcctggactgtgcgggctgggcaatttaggcaacacctgtttcatgaacagcgctctgcaatgcctcagtaacaccgcacctctgacggattactttttaaaggacgaatatgaggcagagatcaaccgcgataatcctctgggaatgaagggtgaaatagcggaggcttatgccgagctcatcaagcaaatgtggtccgggagggatgcacacgtggccccaaggatgttcaagacacaggtggggcgttttgcgcctcagtttagcggctaccagcagcaggactcgcaagagcttctggctttcctgttggacggcctgcacgaagacctgaaccgcgtcaagaagaaaccctatctcgagttaaaggacgccaacggcaggccagacgctgtggtcgccaaagaggcatgggaaaaccaccgcctcaggaacgattcggtgattgtggatacatttcatggattattcaagtcaactctggtttgcccggagtgtgctaaagtgagcgtcacctttgaccctttctgctatttgacgctgccactcccactgaaaaaggatagggtgatggaagtgtttcttgtgcctgccgatccccactgtaggcctacccagtacagagtgacagtgcccctaatgggggctgtttctgacctgtgcgaggcgctctccaggctgtctggcattgcagctgagaatatggtcgtggctgatgtgtacaaccaccggttccataaaatcttccaaatggatgagggcctgaatcatatcatgcctagggacgatattttcgtgtatgaggtttgctcaaccagcgtagacggctctgagtgcgtaactttgccggtgtattttagggagcggaagagccgcccttctagcacgtcaagcgcttccgccctttacgggcagcccctcctcttgtccgtacccaagcataaactgactctggagagcctgtaccaagccgtctgtgatcgcatcagccgatacgtcaagcaacctctgcccgatgagttcggcagttccccgctggagcccggtgcttgcaatggaagtaggaacagctgtgaaggtgaagacgaggaagaaatggagcatcaggaggaagggaaggaacaactcagtgaaacagagggctccggggaggacgaacccggtaatgacccctcagagacaactcaaaagaaaattaagggccaaccctgccccaagcgactgtttacctttagtctagttaattcatacgggaccgccgacatcaactccctggccgcagatggtaagctgttgaagctcaacagccgcagtactctggcgatggactgggactctgagactcggagactctattacgacgagcaggagagcgaagcgtacgaaaaacatgtctcgatgcttcaacctcagaagaagaagaagacaaccgtcgccctgcgggattgcatcgaactgttcactactatggaaacgctcggtgaacacgacccatggtactgtcccaattgtaagaagcatcagcaagcgactaaaaagtttgatctctggtcactacctaagatactggtagtgcacctcaaacggttctcttacaaccgttattggcgcgacaagctggacactgtggttgagtttcccataaggggcctgaacatgagcgaattcgtctgtaatctcagcgcccgtccctatgtctacgacctaatcgctgtatctaaccattacggagctatgggggtgggccactacaccgcgtacgccaaaaataaattaaacggtaaatggtactacttcgacgacagcaacgtgagcctggcctccgaagatcagatcgttacaaaagcagcatacgtcctgttttatcagaggcgggacgatgaattctataagactccatccctgagtagcagtggctcaagcgacggaggaacgcgtcctagctcatcacagcaagggttcggggacgatgaagcctgcagtatggacactaactag

SEQ ID NO: 137747 - DNA, 3126 bp, Artificial Sequence
  derived and/or modified sequence
cgcgcggggcggatgtccgggccggctgggccggggccgcggaggagatggcggaaggtggaggctgccgtgagcgaccggatgcggagactcagaagtccgagcttggacccttaatgaggaccacactccaacgcggggcgcagtggtatcttattgacagccggtggttcaagcagtggaagaagtatgtgggctttgacagctgggacatgtacaatgtgggtgaacataacctatttcctggcccaatagacaactctgggctattttcagatcctgagagtcagaccttgaaagaacacttaattgatgaattggactatgtattggtccctaccgaggcgtggaataaactactaaactggtacggctgtgtagaaggccagcaacccatcgtcagaaaagttgtggagcatggcctgtttgtcaagcactgcaaagtcgaggtgtatttgctggaactgaagctctgtgagaacagtgaccccaccaatgtgctgagttgccatttcagcaaggcagacaccattgcaaccatcgagaaagagatgcggaagctattcaacatccctgcggagcgtgaaacacggctctggaacaaatacatgagcaacacctacgagcagttgagcaagctagacaacactgtccaggatgctgggctataccagggtcaggtgctagtaattgagcctcaaaatgaagatggcacatggcccaggcagaccttgcagtcaaaatcaagcactgcgcctagcagaaattttactacctctccaaaatcatcagcaagtccctattcctcagtgtctgcctctctcattgcaaatggtgatagcactagcacctgtgggatgcacagttccggtgtcagcaggggtggatctggcttttctgcttcgtataattgtcaggagccaccatcctctcatatacaacctgggctctgtggacttggaaacctgggaaacacctgcttcatgaactccgctttgcagtgtttgagcaacactgcaccactgactgactactttctcaaagatgagtatgaagccgaaatcaacagagacaaccctctggggatgaaaggggaaattgcagaagcctatgctgaactcattaagcagatgtggtctggaagggacgcccatgtggcacctcgcatgttcaaaactcaagtaggacgttttgctcctcaattttctggctaccagcaacaagattctcaggagctgctggcctttcttctagatggattgcatgaagatctgaaccgggtaaagaaaaagccctacttggagctgaaggatgccaatgggcggccagatgcggtggtggcaaaggaagcctgggagaatcacaggttgaggaatgattctgtgattgtggatactttccatggcctcttcaaatctactttggtttgcccagaatgtgctaaggtttctgtgacctttgacccattttgctatctaacgctgccactgcccttgaagaaagatcgagttatggaggttttcctggttcctgctgaccctcactgcagacctactcagtaccgtgtgactgtgccgctgatgggggctgtgtccgacctgtgcgaggctctctccaggctgtctggcattgctgcagaaaatatggtggtcgcagatgtgtataatcaccgattccacaaaattttccaaatggatgaaggtttaaaccacatcatgcctcgggatgacattttcgtgtacgaggtctgcagcacttccgtggatggctcggaatgtgtcacgcttccagtctacttcagggagaggaagtccaggccatcaagcacttcctccgcatcagcgctatatgggcagccactattgctttctgtccccaagcacaagttaacccttgagtctttgtaccaggctgtttgtgatcgtatcagccgctatgtgaaacagcctttacctgatgagtttggcagctcacccttggagccaggggcctgcaatggctccaggaacagctgtgaaggagaagatgaggaagaaatggagcatcaggaagaaggcaaagagcagctttcagaaacagaaggcagtggggaagatgagccaggaaatgaccccagtgagaccacccaaaagaagatcaaaggccagccctgcccaaaaaggctttttaccttcagtcttgtgaactcctatggaacagctgacataaattcacttgcagctgatggaaaactacttaaactcaactctcgatctacactggccatggattgggacagtgaaactcggagactttactatgatgagcaagaatctgaggcctacgagaagcatgtgagcatgttgcagcctcagaagaagaagaagaccacagtggccctgagagactgcatcgagctcttcaccaccatggagacccttggggagcatgacccctggtactgtcccaactgtaagaagcatcaacaggccacaaaaaagtttgacctatggtccttgcccaagatcctggtggtccacctcaaacgtttctcctacaacagatactggagggataagctcgacacagtcgtagaattcccaatcagagggctgaacatgtccgagtttgtctgtaacctgtcagcaaggccttatgtgtacgacctcattgccgtgtccaatcattatggagccatgggggttggccactacactgcatatgcgaagaacaaactgaatggtaaatggtattactttgatgatagcaacgtgtccctggcctctgaggatcagatagtgactaaagcagcttatgtgctattttaccaacgtcgagatgatgaattttataagacaccttcacttagcagttctggttcctctgatggagggacacgaccaagcagctctcagcagggctttggggatgatgaggcttgcagcatggacaccaactaatgctgactccacgatcctgccaccctgtagcgccagtgtaatcccccaggagaacatctttgacactctgcagactgctagtgttctgtctaaaaaccagacaaggaaatacccttcttttatgagcagaaggaaacaaaaaaaaaaaaagaagaccgtttacctagaagaagctatgtcaagaggc

SEQ ID NO: 137748 - protein, 480 aa, Artificial Sequence
  derived and/or modified sequence
MAASVVCRAATAGAQVLLRARRSPALLRTPALRSTATFAQALQFVPETQVSLLDNGLRVASEQSSQPTCTVGVWIDVGSRFETEKNNGAGYFLEHLAFKGTKNRPGSALEKEVESMGAHLNAYSTREHTAYYIKALSKDLPKAVELLGDIVQNCSLEDSQIEKERDVILREMQENDASMRDVVFNYLHATAFQGTPLAQAVEGPSENVRKLSRADLTEYLSTHYKAPRMVLAAAGGVEHQQLLDLAQKHLGGIPWTYAEDAVPTLTPCRFTGSEIRHRDDALPFAHVAIAVEGPGWASPDNVALQVANAIIGHYDCTYGGGVHLSSPLASGAVANKLCQSFQTFSICYAETGLLGAHFVCDRMKIDDMMFVLQGQWMRLCTSATESEVARGKNILRNALVSHLDGTTPVCEDIGRSLLTYGRRIPLAEWESRIAEVDASVVREICSKYIYDQCPAVAGYGPIEQLPDYNRIRSGMFWLRF

SEQ ID NO: 137749 - DNA, 1443 bp, Artificial Sequence
  derived and/or modified sequence
atggccgccagcgtggtgtgcagagccgccaccgccggcgcccaggtgctgctgagagccagaagaagccccgccctgctgagaacccccgccctgagaagcaccgccaccttcgcccaggccctgcagttcgtgcccgagacccaggtgagcctgctggacaacggcctgagagtggccagcgagcagagcagccagcccacctgcaccgtgggcgtgtggatcgacgtgggcagcagattcgagaccgagaagaacaacggcgccggctacttcctggagcacctggccttcaagggcaccaagaacagacccggcagcgccctggagaaggaggtggagagcatgggcgcccacctgaacgcctacagcaccagagagcacaccgcctactacatcaaggccctgagcaaggacctgcccaaggccgtggagctgctgggcgacatcgtgcagaactgcagcctggaggacagccagatcgagaaggagagagacgtgatcctgagagagatgcaggagaacgacgccagcatgagagacgtggtgttcaactacctgcacgccaccgccttccagggcacccccctggcccaggccgtggagggccccagcgagaacgtgagaaagctgagcagagccgacctgaccgagtacctgagcacccactacaaggcccccagaatggtgctggccgccgccggcggcgtggagcaccagcagctgctggacctggcccagaagcacctgggcggcatcccctggacctacgccgaggacgccgtgcccaccctgaccccctgcagattcaccggcagcgagatcagacacagagacgacgccctgcccttcgcccacgtggccatcgccgtggagggccccggctgggccagccccgacaacgtggccctgcaggtggccaacgccatcatcggccactacgactgcacctacggcggcggcgtgcacctgagcagccccctggccagcggcgccgtggccaacaagctgtgccagagcttccagaccttcagcatctgctacgccgagaccggcctgctgggcgcccacttcgtgtgcgacagaatgaagatcgacgacatgatgttcgtgctgcagggccagtggatgagactgtgcaccagcgccaccgagagcgaggtggccagaggcaagaacatcctgagaaacgccctggtgagccacctggacggcaccacccccgtgtgcgaggacatcggcagaagcctgctgacctacggcagaagaatccccctggccgagtgggagagcagaatcgccgaggtggacgccagcgtggtgagagagatctgcagcaagtacatctacgaccagtgccccgccgtggccggctacggccccatcgagcagctgcccgactacaacagaatcagaagcggcatgttctggctgagattctag

SEQ ID NO: 137750 - DNA, 1443 bp, Artificial Sequence
  derived and/or modified sequence
atggccgctagcgtggtatgccgcgcagccaccgcgggggcccaggtgcttctgagggcccgccgctcccctgcacttctgagaacacccgctctgcgctctactgctactttcgctcaggctctacagtttgtccccgaaacccaggtgtcattgctggataatggcctgcgggtggcttctgagcagagtagtcagcccacctgcacagtgggggtatggatcgacgtggggagcagattcgagaccgaaaaaaacaacggtgccggctacttcctcgagcacctggcattcaaggggacaaaaaataggcctggaagcgccttagagaaggaggtggagagcatgggagcccatctgaacgcttattctacaagggagcataccgcctattacatcaaggcgttgagcaaagatctgccaaaagcagtcgagctgcttggtgacatcgtccaaaactgtagcctcgaggactctcagatcgaaaaagagcgggacgttatcctgcgggaaatgcaggaaaacgacgcctccatgagggacgtggtgttcaactacctacatgccactgctttccagggtacccccctggctcaagctgtggagggccctagcgaaaatgtgagaaagctgtccagagccgatctgaccgaatatctctcaactcactacaaggcaccccggatggtactagcggcggcgggcggcgtagaacaccaacagctgctggatcttgcccagaaacacctgggggggatcccatggacttacgcagaagatgcagtgccgacattaacaccatgccggtttaccgggagcgagattagacacagggacgacgccctaccattcgctcatgtcgccattgctgtggaggggcccggctgggcctctccagataatgtggcccttcaggttgcaaacgcaatcatcggacactatgactgcacgtacggcggcggagtccatctgtcatcacccttagcttccggggctgtcgccaacaagctatgccagtcctttcagaccttcagcatctgttatgctgagacaggcctcctgggagcgcatttcgtctgcgacagaatgaagattgacgacatgatgttcgtgctgcagggccaatggatgcgactgtgcacgagcgccaccgagtcggaggtggcccggggcaaaaacatcctgcgcaatgcactggtgtctcacctggatggaacgactcctgtctgtgaagatatcggacgttctctgttgacatatggtaggcgcatccccctggccgagtgggagtcccggatcgcagaggtggatgcatcggtagtgcgcgagatttgctctaaatacatatatgaccaatgcccagctgtcgcgggctacggaccgattgagcagctccccgattacaatcggattcgttccggcatgttctggctgcgattctag

SEQ ID NO: 137751 - DNA, 1443 bp, Artificial Sequence
  derived and/or modified sequence
atggccgcctctgtggtgtgcagagctgccacagctggggcccaggtgctgctgcgggcccggcgcagccctgccctgctgcggaccccagccctgcggagcacagccacctttgcccaggccctgcagtttgtgcctgagacccaggtgtccctgctggacaatggcctgcgggtggccagcgagcagagcagccagcccacctgcaccgtgggcgtgtggattgatgtgggcagcagatttgaaacagagaagaacaatggagctggctacttcctggagcacctggccttcaagggcaccaagaacagacctggcagcgccctggagaaggaggtggagagcatgggcgcccacctgaatgcctacagcacccgggagcacacagcctactacatcaaggccctgagcaaggacctgcccaaggctgtggagctgctgggggacatcgtgcagaactgcagcctggaggacagccagatcgagaaggagagagatgtgatcctgcgggagatgcaggagaatgatgcctccatgagagatgtggtgttcaactacctgcacgccacagccttccagggcacccccctggcccaggccgtggagggccccagtgaaaatgtgaggaagctgagcagagctgacctgacagagtacctgagcacccactacaaggcccccaggatggtgctggccgccgccggcggcgtggagcaccagcagctgctggacctggcccagaagcacctgggcggcatcccctggacctatgcagaagatgctgtgcccaccctgaccccctgccgcttcaccggcagcgagatccgccacagagatgatgccctgccctttgcccacgtggccatcgctgtggagggccctggctgggccagcccagacaacgtggccctgcaggtggccaatgccatcatcggccactatgactgcacctacggcggcggcgtgcacctgagcagccccctggccagcggggctgtggccaacaagctgtgccagagcttccagaccttcagcatctgctacgccgagaccggcctgctgggcgcccactttgtgtgtgacaggatgaagattgatgacatgatgtttgtgctgcagggccagtggatgaggctgtgcaccagcgccacagagagcgaggtggcccggggcaagaacatcctgagaaatgccctggtgagccacctggatggcaccacccctgtgtgtgaagatattggccgcagcctgctgacctacggccgccgcatccccctggccgagtgggagagcagaattgctgaggtggatgcctctgtggtgcgggagatctgcagcaagtacatctatgaccagtgcccagctgtggccggctacggccccatcgagcagctgcctgactacaaccgcatccgcagcggcatgttctggctgcgcttctag

SEQ ID NO: 137752 - DNA, 1443 bp, Artificial Sequence
  derived and/or modified sequence
atggccgccagcgtggtgtgccgggccgccaccgccggcgcccaggtacttctgcgtgcgaggaggtcgccagccctccttcggaccccggcccttaggagtacagctaccttcgcacaggccttgcaattcgtgccagaaactcaggtaagcttgctcgacaatggcctacgagtggccagcgagcaatccagtcagcccacatgcacggttggagtatggatcgacgtaggcagtcgatttgagacagagaaaaataatggcgccggatattttctggaacacctggcatttaaagggaccaagaaccggcctggctcagccctggaaaaggaagtcgagagtatgggcgctcatctgaacgcttattcgacgcgcgagcacaccgcttactatattaaggccctgtccaaggatcttccgaaagccgtggagctgctgggggatattgtacagaattgctcattagaagacagtcagattgagaaggagcgggacgtcattctgagggaaatgcaggagaacgacgcctctatgcgtgatgttgtcttcaattatctccacgcaacggcttttcaagggaccccgctggctcaggccgtcgagggtccaagcgaaaatgtccggaaactctcacgtgcagacctcacggagtatctgagcacccattataaggctcccagaatggtgttagcagcggccgggggggtggaacatcagcagctgctggatcttgcacaaaaacaccttggcggcatcccttggacctacgcagaggatgccgttccaaccctgaccccttgccgattcactgggagtgaaatcagacaccgggacgacgcgttacccttcgctcatgttgccatcgcagtcgaagggcccggatgggccagccctgataacgtcgccttgcaggtggctaatgctatcataggtcactatgactgcacttacggcgggggggtgcacctgtcctccccattagcgtcaggggccgtcgccaacaagctgtgccagagctttcagactttttcgatctgctatgctgaaactggactcttgggtgcccactttgtgtgcgatagaatgaagatagatgatatgatgttcgtgcttcaggggcagtggatgagactgtgtactagcgccaccgagtctgaggtcgcgaggggcaaaaatatcctgcgtaatgctttggtctctcatctcgacggaacaactcctgtatgcgaagatatcggacgaagtctgctaacttatggccgacgcatcccacttgccgagtgggagagcagaatcgccgaggtcgatgccagcgtggttagggagatctgctccaagtatatatatgaccagtgccctgccgtggctggatacggaccaatcgagcagctgcctgactacaatagaatcagatcaggaatgttctggctccgcttctag

SEQ ID NO: 137753 - DNA, 1443 bp, Artificial Sequence
  derived and/or modified sequence
atggctgccagcgtggtgtgccgggcagctacagcaggagcacaagtgctgctgagggccaggcgtagtcccgctctgcttagaactcctgctttgagatcaacagccacttttgcgcaggcactgcaattcgtgccagaaacccaggtatcactgttggacaacggattgagggtggcttccgaacagtcctcccaacctacctgcaccgttggtgtgtggattgatgtcggaagcagatttgaaacagagaagaataatggggcagggtactttctcgaacacctggccttcaaaggtactaagaaccgtcctggaagcgcccttgagaaggaagtggaatccatgggggcacacctgaacgcatattccacccgggagcacacagcttactatataaaagcgctgagcaaggaccttcccaaagccgtggagttacttggcgacatcgtgcagaactgctcgctcgaggattctcagatcgagaaagagagggacgtgattttacgtgagatgcaggagaatgatgcaagtatgcgggatgtggtctttaactacctgcatgccacagcctttcagggcacacctttggctcaggccgtggagggtccgagcgaaaacgtgcgcaagctctctcgcgcagacctgacggagtacctgagtacgcactacaaagctcctcggatggtgctggctgccgctggaggtgttgaacatcagcagctcctcgacctcgcccagaaacacctgggagggatcccttggacttatgccgaggatgccgttccgacgctgactccatgcaggtttacgggtagcgaaattcgccatcgggacgatgcccttccattcgcccacgtcgccatagctgtggagggtcctgggtgggcttcacccgataacgtagcccttcaggtcgctaatgccataatcgggcactatgattgtacatatggcggaggagtacatctctcctcccctctggcctctggggcagttgccaacaaactgtgtcagagctttcagaccttcagcatttgttatgcagaaacggggctcttaggggctcactttgtgtgtgatcggatgaaaatcgacgatatgatgtttgtgttgcagggccagtggatgaggttatgcacatccgcaacagagtcagaggtggcccgaggaaaaaatatattacgcaatgcgctggtcagccacctggatgggacaacgccagtctgcgaggacattggacgttcactgctaacatatggacgacgcattcctttagccgagtgggagtcacgaatcgccgaagtggacgctagcgtcgtcagggagatctgctccaaatatatttatgaccagtgtccagctgttgccggatatggtcccatagaacagctcccagactacaaccgaatccggtcaggcatgttctggctgcggttttag

SEQ ID NO: 137754 - DNA, 1985 bp, Artificial Sequence
  derived and/or modified sequence
tactgactttcagcaccaacttgtggtcccaggtaagtttccacgctggtactttagccctgggctcgaacctgcggacacgctgtggctgcaactccccgcccgccagacctcagtacgcagcgcggctggtgagaaacataatgcactctgacttccacgcgtggaatggggagatggactgcacggcgggcggacctgctcgggctgatggacggcaggtggactgatgtgcgcagggactggcggcagcgcggtcagagccagtcagccaaagccaggccagcacaatagactgtcccggttcccgccaggaggcggccgagcaccaactgtacggtactgcgcctgcgccgcgaccgccaacgcgcccagtctacgcttgcgcggcgcaacagggccgactgcagctggaagatggcggcgtccgtggtctgtcgggccgctaccgccggggcacaagtgctattgcgcgcccgccgctcgccggccctgctgcggacgccagccttgcggagtacggcaaccttcgctcaggcgctccagttcgtgccggagacgcaggttagcctgctggacaacggcctgcgtgtggcctccgagcagtcctctcagcccacttgcacggtgggagtgtggattgatgttggcagccgttttgagactgagaagaataatggggcaggctactttttggagcatctggctttcaagggaacaaagaatcggcctggcagtgccctggagaaggaggtggagagcatgggggcccatcttaatgcctacagcacccgggagcacacagcttactacatcaaggcgctgtccaaggatctgccgaaagctgtggagctcctgggtgacattgtgcagaactgtagtctggaagactcacagattgagaaggaacgtgatgtgatcctgcgggagatgcaggagaatgatgcatctatgcgagatgtggtctttaactacctgcatgccacagcattccagggcacacctctagcccaggctgtggaggggcccagtgagaatgtcaggaagctgtctcgtgcagacttgaccgagtacctcagcacacattacaaggcccctcgaatggtgctggcagcagctggaggagtggagcaccagcaactgttagacctcgcccagaagcacctcggtggcatcccatggacatatgcagaggacgctgtgcccactcttactccatgccgcttcactggcagtgagatccgccaccgtgatgatgctctaccttttgcccacgtggccattgcagtagagggtcctggctgggccagcccggacaatgtggccttgcaagtggccaatgccatcatcggccactatgactgcacttatggtggtggcgtgcacctgtccagcccactggcttcaggtgctgtggccaacaagctatgccagagtttccagaccttcagcatctgctatgcagagacgggcttgctgggtgcacactttgtctgtgaccgaatgaaaatcgatgacatgatgttcgtcctgcaagggcagtggatgcgcctgtgtaccagtgccacggagagtgaggtggcccggggcaaaaacatcctcagaaatgccctggtatctcatctagatggcactactcctgtgtgtgaggacatcggacgcagcctcctgacctatggccgccgcatccccctggctgaatgggaaagccggattgcggaggtggatgccagtgtggtacgtgagatctgctccaagtacatctatgaccagtgcccagcagtggctggatatggccccattgagcagctcccagactacaaccggatccgtagcggcatgttctggctgcgcttctaggcgggaagcctatgtaagcaagagggcagggccggggtttgtggtcccccccccaccacaaacacagcacttcggctcctctaacctgtgccacaggtgaccaccaataaaatcctctgctgaga

SEQ ID NO: 137755 - protein, 453 aa, Artificial Sequence
  derived and/or modified sequence
MKLLTRAGSFSRFYSLKVAPKVKATAAPAGAPPQPQDLEFTKLPNGLVIASLENYSPVSRIGLFIKAGSRYEDFSNLGTTHLLRLTSSLTTKGASSFKITRGIEAVGGKLSVTATRENMAYTVECLRGDVDILMEFLLNVTTAPEFRRWEVADLQPQLKIDKAVAFQNPQTHVIENLHAAAYRNALANPLYCPDYRIGKVTSEELHYFVQNHFTSARMALIGLGVSHPVLKQVAEQFLNMRGGLGLSGAKANYRGGEIREQNGDSLVHAAFVAESAVAGSAEANAFSVLQHVLGAGPHVKRGSNTTSHLHQAVAKATQQPFDVSAFNASYSDSGLFGIYTISQATAAGDVIKAAYNQVKTIAQGNLSNTDVQAAKNKLKAGYLMSVESSECFLEEVGSQALVAGSYMPPSTVLQQIDSVANADIINAAKKFVSGQKSMAASGNLGHTPFVDEL

SEQ ID NO: 137756 - DNA, 1362 bp, Artificial Sequence
  derived and/or modified sequence
atgaagctgctgaccagagccggcagcttcagcagattctacagcctgaaggtggcccccaaggtgaaggccaccgccgcccccgccggcgcccccccccagccccaggacctggagttcaccaagctgcccaacggcctggtgatcgccagcctggagaactacagccccgtgagcagaatcggcctgttcatcaaggccggcagcagatacgaggacttcagcaacctgggcaccacccacctgctgagactgaccagcagcctgaccaccaagggcgccagcagcttcaagatcaccagaggcatcgaggccgtgggcggcaagctgagcgtgaccgccaccagagagaacatggcctacaccgtggagtgcctgagaggcgacgtggacatcctgatggagttcctgctgaacgtgaccaccgcccccgagttcagaagatgggaggtggccgacctgcagccccagctgaagatcgacaaggccgtggccttccagaacccccagacccacgtgatcgagaacctgcacgccgccgcctacagaaacgccctggccaaccccctgtactgccccgactacagaatcggcaaggtgaccagcgaggagctgcactacttcgtgcagaaccacttcaccagcgccagaatggccctgatcggcctgggcgtgagccaccccgtgctgaagcaggtggccgagcagttcctgaacatgagaggcggcctgggcctgagcggcgccaaggccaactacagaggcggcgagatcagagagcagaacggcgacagcctggtgcacgccgccttcgtggccgagagcgccgtggccggcagcgccgaggccaacgccttcagcgtgctgcagcacgtgctgggcgccggcccccacgtgaagagaggcagcaacaccaccagccacctgcaccaggccgtggccaaggccacccagcagcccttcgacgtgagcgccttcaacgccagctacagcgacagcggcctgttcggcatctacaccatcagccaggccaccgccgccggcgacgtgatcaaggccgcctacaaccaggtgaagaccatcgcccagggcaacctgagcaacaccgacgtgcaggccgccaagaacaagctgaaggccggctacctgatgagcgtggagagcagcgagtgcttcctggaggaggtgggcagccaggccctggtggccggcagctacatgccccccagcaccgtgctgcagcagatcgacagcgtggccaacgccgacatcatcaacgccgccaagaagttcgtgagcggccagaagagcatggccgccagcggcaacctgggccacacccccttcgtggacgagctgtag

SEQ ID NO: 137757 - DNA, 1362 bp, Artificial Sequence
  derived and/or modified sequence
atgaagcttttaaccagggccggctcctttagcagattttattcactaaaagtggcaccaaaggttaaggccaccgccgccccagctggcgcaccaccacagccccaggacttggagttcaccaaactcccaaatggtctggtcatcgctagcctcgaaaactactctcccgtgtcccgcattggacttttcatcaaagctggaagtcggtacgaagatttttctaacttaggcactacgcatctgctcagactaacttccagtctgactacgaaaggcgcctctagttttaagatcacgcgaggtatcgaggccgtcggcggtaaactttccgtaactgctactcgtgagaacatggcttacaccgtggagtgcctacgaggggatgtcgatatcctgatggaatttctgctcaatgtaaccacagcgccggagttccggcgatgggaggtcgccgacctgcaaccacaattgaaaattgataaggctgtcgccttccagaatccacagacccatgtgattgagaacctgcacgctgctgcttaccggaacgccctggccaaccccctctattgccctgactacagaataggaaaagtcactagcgaggagttgcactattttgtgcagaaccacttcacctcagcaaggatggccctcatcgggctaggcgtgtctcatcctgtgctgaaacaggttgcagaacaatttctgaacatgaggggcggcctggggctgtccggggccaaagcaaattacagggggggggagatcagagagcagaatggagactccctagtacacgctgcatttgtggccgaaagtgcggttgctgggagcgccgaggctaacgcctttagtgtgcttcagcacgttctcggagcgggccctcacgtgaagcgaggctccaataccacaagccacctgcatcaggccgtggcaaaggctacacagcagcctttcgacgtctccgcatttaacgcttcctactcagacagtggtcttttcggaatatacacaatcagccaggcaacagccgctggcgacgtaatcaaggccgcttataaccaggtgaagaccatcgcacaggggaatctgtccaacactgacgtccaggccgccaagaataagcttaaggccggttatctcatgtctgtggagtccagcgagtgcttccttgaggaggtgggcagccaggcactcgtggccggctcttacatgccgccttccaccgtcctgcagcaaatagactcggtcgccaacgctgacatcattaatgccgcaaagaagtttgtgtctggccaaaagtcaatggccgctagtgggaacctaggccacaccccattcgttgatgagctgtag

SEQ ID NO: 137758 - DNA, 1362 bp, Artificial Sequence
  derived and/or modified sequence
atgaagctgctgaccagggctggcagcttcagccgcttctacagcctgaaggtggcccccaaggtgaaggccacagctgccccagctggggccccaccccagccccaggacctggagttcaccaagctgcccaacggcctggtgattgccagcctggagaactacagccctgtgtccagaattggcctcttcatcaaggccggcagccgctatgaggacttcagcaacctgggcaccacccacctgctgcggctgaccagcagcctgaccaccaagggggccagcagcttcaagatcacccggggcattgaagctgtgggcggcaagctgtctgtgacagccacccgggagaacatggcctacacagtggagtgcctgcggggagatgtggacatcctgatggagttcctgctgaatgtgaccacagcccctgagttccgccgctgggaggtggccgacctgcagccccagctgaagattgacaaggctgtggccttccagaacccccagacccacgtgattgagaacctgcatgctgctgcctacagaaatgccctggccaaccccctgtactgcccagactacagaattggcaaggtgaccagcgaggagctgcactactttgtgcagaaccacttcaccagcgccaggatggccctgattggcctgggcgtgagccaccctgtgctgaagcaggtggccgagcagttcctgaacatgaggggcggcctgggcctgagcggggccaaggccaactacagaggaggagagatccgggagcagaatggagacagcctggtgcatgctgcctttgtggccgagagcgctgtggccggcagcgctgaggccaatgccttctctgtgctgcagcacgtgctgggcgccggcccccacgtgaagaggggcagcaacaccaccagccacctgcaccaggccgtggccaaggccacccagcagccctttgatgtgtctgccttcaatgccagctacagcgacagcggcctgtttggcatctacaccatcagccaggccacagctgctggagatgtgatcaaggccgcctacaaccaggtgaagaccatcgcccagggcaacctgagcaacacagatgtgcaggccgccaagaacaagctgaaggccggctacctgatgtctgtggagagcagcgagtgcttcctggaggaggtgggcagccaggccctggtggccggcagctacatgccacccagcacagtgctgcagcagattgacagcgtggccaatgctgacatcatcaatgctgccaagaagtttgtgtctggccagaagtccatggccgccagcggcaacctgggccacaccccatttgtggatgagctgtag

SEQ ID NO: 137759 - DNA, 1362 bp, Artificial Sequence
  derived and/or modified sequence
atgaagctgctgacccgggccggcagcttcagccggttctacagccttaaagtcgccccgaaagtcaaggccactgcggcccctgctggagcgccaccccagccccaggacctggaattcacgaagctccccaacgggcttgttatcgcatctctagagaactactcacccgtgagccgcataggcctgtttataaaggctgggtctcggtatgaagatttcagtaatcttgggactacccatctcctgcgcttgacctccagcctgacaactaagggagcaagctcctttaaaataacccgcggaattgaggccgttggagggaagttaagtgtgactgccacaagggagaacatggcatatactgttgagtgtcttaggggcgatgtggatattctcatggagtttctactcaacgtgaccaccgcacccgaattccggcgctgggaggtggcagacctccagccgcaactgaagattgataaagcggtggctttccagaaccctcagacgcacgttatcgagaatctgcatgctgcagcctaccgaaacgctttggctaaccctctctactgtcctgattatcgcattggcaaggtgacctctgaggagctgcactacttcgtgcagaaccatttcacctcggccaggatggcactaattggccttggggtgtcccatcctgtgctgaagcaagtggcggagcagtttcttaacatgagaggcgggctgggactctcaggggccaaggccaattacagggggggagagatccgagaacagaacggcgattcactcgtccatgcagcgtttgtcgcggagtccgcggtcgccggcagcgccgaggctaacgcttttagtgtgctccaacatgtgctcggggccggacctcacgttaagcgcggaagtaatacaaccagccacctacatcaggcagtcgccaaagctacccaacaaccgtttgatgtgtctgcttttaacgccagttacagtgatagcgggctctttggaatttatactatctcacaagccaccgctgcgggtgacgtcattaaagctgcctacaatcaggtgaagaccatcgcacagggtaacctctcaaatacggacgtgcaggccgccaagaacaaattaaaagcaggatacctgatgtccgtagagtctagtgaatgttttcttgaggaggttggctcacaagctctggtggcaggaagctatatgcctccatcaacagtgttacaacagatagatagcgtcgctaacgctgacataattaacgcagccaaaaagttcgtttcaggacagaaatccatggccgcctccggcaatctggggcacacaccttttgtggacgagctatag

SEQ ID NO: 137760 - DNA, 1362 bp, Artificial Sequence
  derived and/or modified sequence
atgaaattattaactcgcgcaggttcatttagcagattctactcgctgaaagtggctcccaaggtgaaggctactgctgcccctgctggggcaccaccacagcctcaggatttggaattcacgaaactgccaaatgggttagtgatcgcctccctggaaaattatagccctgtaagccgcattggattattcatcaaggcaggcagcagatacgaagacttttcgaacttaggcactactcatttattaaggctcacatcatctttaaccactaagggagctagctcatttaagattacaagaggaattgaagccgtcgggggtaagctgagcgttaccgctactcgggaaaatatggcctacacagttgaatgtctgagaggagatgtggatatactcatggaatttctgctgaatgtgaccactgcaccagaatttcgccgttgggaggtagccgatctgcaaccccaattgaaaatcgataaagcagtggcgttccagaacccccagactcatgtgatcgaaaacctccacgcggcagcgtatcggaacgccctggccaatccactgtactgccctgactatagaattggtaaagttacctctgaggaacttcactactttgttcagaatcacttcacttcagcaaggatggcgcttattgggttgggcgtatctcaccccgtgctcaagcaagtggcagaacagtttcttaatatgcggggtggacttgggctgtcaggtgccaaggccaactatagggggggagagatccgggagcaaaatggcgatagcctggtgcacgcggcattcgtcgctgagagtgctgttgcgggaagtgcagaggctaacgctttttcagtcctgcagcatgttctgggggcaggccctcacgttaagcggggttccaacaccactagccaccttcaccaggccgtggctaaagcgacgcaacagcccttcgacgtaagcgcttttaatgccagctattccgattctggcttgtttggaatttacacgataagtcaggcgacagccgctggagatgtgatcaaagctgcctataaccaggtgaagactattgcccaaggtaatctgagcaacactgacgtgcaggccgctaaaaataaactgaaggcaggttacctgatgtccgtggaatccagtgaatgcttcctggaagaggtgggcagtcaggccctagttgctggcagctatatgccaccttcaactgtgttgcagcaaatcgactccgttgcaaacgcggacatcattaacgcggcaaaaaaatttgtgtcaggccagaagtccatggctgcgtcaggaaaccttggacataccccttttgtggacgaattatag

SEQ ID NO: 137761 - DNA, 2615 bp, Artificial Sequence
  derived and/or modified sequence
actatccaaaacatttctattttcctaacacaaaaactatagctaagtttttatattctatgtagccccagcctaggacgtaaattccacgagaccaaaagccttgtgatgattccccgaggttgctgaccctcccggtgtgtcccgggcctgctctgggggacacagcggcgaatacgttgaacgaggcccctgtttcacggagctaaagatccagtaaggacttcacccagcgagaggcaactacgccgggcttcgatacccaatacctctgcagaaaggtggagtggcaggaatctcctgaagcctccaacgtccaggaacgcggaaacccagggcctccagtgcaggtgtcatcccggagggcgcatgcggagtcccaagagaggcgcgtcccattggacaatgctgagcggaagagcccaagatagcggggggagttgtgacaggctgctgcagacgtacttagaaaaggggtgcatactggatattcaggctaggagaagaacgcaaaaagcagtgacgtacattattctctgcatatatttacttgggaaattgtgcgtctccctattctgagtcttggaggaattggactggtccaaccttataaagagagcagtagagcgcggcagtatagagagtacctcacgaaggggacgtgggaaagtgttagcggggaacgctgggaaactcccggcctccgccaccatcttgctttcctttaatccggcagtgaccgtgtgtcagaacaatcttgaatcatgaagctactaaccagagccggctctttctcgagattttattccctcaaagttgcccccaaagttaaagccacagctgcgcctgcaggagcaccgccacaacctcaggaccttgagtttaccaagttaccaaatggcttggtgattgcttctttggaaaactattctcctgtatcaagaattggtttgttcattaaagcaggcagtagatatgaggacttcagcaatttaggaaccacccatttgctgcgtcttacatccagtctgacgacaaaaggagcttcatctttcaagataacccgtggaattgaagcagttggtggcaaattaagtgtgaccgcaacaagggaaaacatggcttatactgtggaatgcctgcggggtgatgttgatattctaatggagttcctgctcaatgtcaccacagcaccagaatttcgtcgttgggaagtagctgaccttcagcctcagctaaagattgacaaagctgtggcctttcagaatccgcagactcatgtcattgaaaatttgcatgcagcagcttaccggaatgccttggctaatcccttgtattgtcctgactataggattggaaaagtgacatcagaggagttacattacttcgttcagaaccatttcacaagtgcaagaatggctttgattggacttggtgtgagtcatcctgttctaaagcaagttgctgaacagtttctcaacatgaggggtgggcttggtttatctggtgcaaaggccaactaccgtggaggtgaaatccgagaacagaatggagacagtcttgtccatgctgcttttgtagcagaaagtgctgtcgcgggaagtgcagaggcaaatgcatttagtgttcttcagcatgtcctcggtgctgggccacatgtcaagaggggcagcaacaccaccagccatctgcaccaggctgttgccaaggcaactcagcagccatttgatgtttctgcatttaatgccagttactcagattctggactctttgggatttatactatctcccaggccacagctgctggagatgttatcaaggctgcctataatcaagtaaaaacaatagctcaaggaaacctttccaacacagatgtccaagctgccaagaacaagctgaaagctggatacctaatgtcagtggagtcttctgagtgtttcctggaagaagtcgggtcccaggctctagttgctggttcttacatgccaccatccacagtccttcagcagattgattcagtggctaatgctgatatcataaatgcggcaaagaagtttgtttctggccagaagtcaatggcagcaagtggaaatttgggacatacaccttttgttgatgagttgtaatactgatgcacacattacaggagagagctgaacgttctctcagcccagagcagcaaacacatgaaagtcagaagtctctaatatatcatttgtcttttttccagtgaggtaaaataaggcataaatgcaggtaattattcccagctgacctaaagtcaataaaacattctgtttaagtgtttttcttacgtttttctcaatgagttaatcaacaagtatttattatgtgctgatatctttgttttagatgctttaaaggagacaggaatataattattgagtatagaagcatcagaaactattaaaattaaggctaagtggctatcggggtaaatagtgccagattactattggtggcgtttaagatgaaagcaagttcaaaatttgtcattttgggtgtcaacagctaaatggtctggtttttacccctgttttgccttttttgcaataaaattatttccaaaaaacatacatttcctatcaatcata

SEQ ID NO: 137762 - protein, 346 aa, Artificial Sequence
  derived and/or modified sequence
MDMLDPGLDPAASATAAAAASHDKGPEAEEGVELQEGGDGPGAEEQTAVAITSVQQAAFGDHNIQYQFRTETNGGQVTYRVVQVTDGQLDGQGDTAGAVSVVSTAAFAGGQQAVTQVGVDGAAQRPGPAAASVPPGPAAPFPLAVIQNPFSNGGSPAAEAVSGEARFAYFPASSVGDTTAVSVQTTDQSLQAGGQFYVMMTPQDVLQTGTQRTIAPRTHPYSPKIDGTRTPRDERRRAQHNEVERRRRDKINNWIVQLSKIIPDCNADNSKTGASKGGILSKACDYIRELRQTNQRMQETFKEAERLQMDNELLRQQIEELKNENALLRAQLQQHNLEMVGEGTRQ

SEQ ID NO: 137763 - DNA, 1732 bp, Artificial Sequence
  derived and/or modified sequence
gtgagcgccgggctcggggcccccccggccgcccgccccctcccctccctccctcccctcccctcccctcccccccgggccccgcgccccccccgcccccgccccccccatggacatgctggacccgggtctggatcccgctgcctcggccaccgctgctgccgccgccagccacgacaagggacccgaggcggaggagggcgtcgagctgcaggaaggcggggacggcccaggagcggaggagcagacagcggtggccatcaccagcgtccagcaggcggcgttcggcgaccacaacatccagtaccagttccgcacagagacaaatggaggacaggtgacataccgcgtagtccaggtgactgatggtcagctggacggccagggcgacacagctggcgccgtcagcgtcgtgtccaccgctgccttcgcgggggggcagcaggctgtgacccaggtgggtgtggacggggcagcccagcgcccgggccccgccgctgcctctgtgcccccaggtcctgcagcgcccttcccgctggctgtgatccaaaatcccttcagcaatggtggcagtccggcggccgaggctgtcagcggggaggcacgatttgcctatttcccagcgtccagtgtgggagatactacggctgtgtccgtacagaccacagaccagagcttgcaggctggaggccagttctacgtcatgatgacgccccaggatgtgcttcagacaggaacacagaggacgatcgccccccggacacacccttactctccaaaaattgatggaaccagaacaccccgagatgagaggagaagagcccagcacaacgaagtggagcggaggcggagggacaagatcaacaactggatcgtccagctttcgaaaatcattccagactgtaacgcagacaacagcaagacgggagcgagtaaaggagggatcctgtccaaggcctgcgattacatccgggagttgcgccagaccaaccagcgcatgcaggagaccttcaaagaggccgagcggctgcagatggacaacgagctcctgaggcagcagatcgaggagctgaagaatgagaacgccctgcttcgagcccagctgcagcagcacaacctggagatggtgggcgagggcacccggcagtgacgcccgccaccaccacgcagccgccgccgcccacgccggcctctgctgcccccttccccagcccttagcacagagagggacacatgcccctcccccagctgcgtttttttatagtagatttttaacaaaaaacggggagaaataatgcatttctgtggatacagtgcccaccgccctcctccacttggaaacggtatcctccctgcccatccgtctgtctgtcgcccttctcccggccctcactaagccccggcacttctagtggtctcacctggaggcaagagggaggggacagaggccctgccacgtcccgctgcctcctgctctctggaggtactgagacagggtgctgatgggaaggaggggagcctttggggggccacccggggcctggacctatgcagggaggccacgtcccaccccacctcttgtttctgggtccctgctcccctttgggggtgtgtgtgtgtgttttaattttctttatggaaaaattgacaaaaaaaaaatagagagagaggtatttaactgcaataaactggccccatgtggcccccgcaaaaaaaaaaaaaaaaaaaaaaa

SEQ ID NO: 137764 - DNA, 1709 bp, Artificial Sequence
  derived and/or modified sequence
gtgagcgccgggctcggggcccccccggccgcccgccccctcccctccctccctcccctcccctcccctcccccccgggccccgcgccccccccgcccccgccccccccatggacatgctggacccgggtctggatcccgctgcctcggccaccgctgctgccgccgccagccacgacaagggacccgaggcggaggagggcgtcgagctgcaggaaggcggggacggcccaggagcggaggagcagacagcggtggccatcaccagcgtccagcaggcggcgttcggcgaccacaacatccagtaccagttccgcacagagacaaatggaggacaggtgacataccgcgtagtccaggtgactgatggtcagctggacggccagggcgacacagctggcgccgtcagcgtcgtgtccaccgctgccttcgcgggggggcagcaggctgtgacccaggtgggtgtggacggggcagcccagcgcccgggccccgccgctgcctctgtgcccccaggtcctgcagcgcccttcccgctggctgtgatccaaaatcccttcagcaatggtggcagtccggcggccgaggctgtcagcggggaggcacgatttgcctatttcccagcgtccagtgtgggagatactacggctgtgtccgtacagaccacagaccagagcttgcaggctggaggccagttctacgtcatgatgacgccccaggatgtgcttcagacaggaacacagaggacgatcgccccccggacacacccttactctccaaaaattgatggaaccagaacaccccgagatgagaggagaagagcccagcacaacgaagtggagcggaggcggagggacaagatcaacaactggatcgtccagctttcgaaaatcattccagactgtaacgcagacaacagcaagacgggagcgagtaaaggagggatcctgtccaaggcctgcgattacatccgggagttgcgccagaccaaccagcgcatgcaggagaccttcaaagaggccgagcggctgcagatggacaacgagctcctgaggcagcagatcgaggagctgaagaatgagaacgccctgcttcgagcccagctgcagcagcacaacctggagatggtgggcgagggcacccggcagtgacgcccgccaccaccacgcagccgccgccgcccacgccggcctctgctgcccccttccccagcccttagcacagagagggacacatgcccctcccccagctgcgtttttttatagtagatttttaacaaaaaacggggagaaataatgcatttctgtggatacagtgcccaccgccctcctccacttggaaacggtatcctccctgcccatccgtctgtctgtcgcccttctcccggccctcactaagccccggcacttctagtggtctcacctggaggcaagagggaggggacagaggccctgccacgtcccgctgcctcctgctctctggaggtactgagacagggtgctgatgggaaggaggggagcctttggggggccacccggggcctggacctatgcagggaggccacgtcccaccccacctcttgtttctgggtccctgctcccctttgggggtgtgtgtgtgtgttttaattttctttatggaaaaattgacaaaaaaaaaatagagagagaggtatttaactgcaataaactggccccatgtggcccccgc

SEQ ID NO: 137765 - DNA, 1041 bp, Artificial Sequence
  derived and/or modified sequence
atggacatgctggaccccggcctggaccccgccgccagcgccaccgccgccgccgccgccagccacgacaagggccccgaggccgaggagggcgtggagctgcaggagggcggcgacggccccggcgccgaggagcagaccgccgtggccatcaccagcgtgcagcaggccgccttcggcgaccacaacatccagtaccagttcagaaccgagaccaacggcggccaggtgacctacagagtggtgcaggtgaccgacggccagctggacggccagggcgacaccgccggcgccgtgagcgtggtgagcaccgccgccttcgccggcggccagcaggccgtgacccaggtgggcgtggacggcgccgcccagagacccggccccgccgccgccagcgtgccccccggccccgccgcccccttccccctggccgtgatccagaaccccttcagcaacggcggcagccccgccgccgaggccgtgagcggcgaggccagattcgcctacttccccgccagcagcgtgggcgacaccaccgccgtgagcgtgcagaccaccgaccagagcctgcaggccggcggccagttctacgtgatgatgaccccccaggacgtgctgcagaccggcacccagagaaccatcgcccccagaacccacccctacagccccaagatcgacggcaccagaacccccagagacgagagaagaagagcccagcacaacgaggtggagagaagaagaagagacaagatcaacaactggatcgtgcagctgagcaagatcatccccgactgcaacgccgacaacagcaagaccggcgccagcaagggcggcatcctgagcaaggcctgcgactacatcagagagctgagacagaccaaccagagaatgcaggagaccttcaaggaggccgagagactgcagatggacaacgagctgctgagacagcagatcgaggagctgaagaacgagaacgccctgctgagagcccagctgcagcagcacaacctggagatggtgggcgagggcaccagacagtag

SEQ ID NO: 137766 - DNA, 1041 bp, Artificial Sequence
  derived and/or modified sequence
atggatatgctcgaccccggcctcgacccagccgctagcgcaactgcagccgcagccgcaagccatgataaaggacccgaagccgaggagggggtggagcttcaagagggaggagacggtcccggggctgaagagcaaaccgccgtggcgattaccagcgtgcagcaggccgccttcggcgatcacaatattcagtatcaattccggacagagactaacggggggcaggtgacataccgggttgtgcaggtgaccgacggacagctggatggccagggagataccgccggcgccgtgtcagtggtctccaccgccgcgtttgccggagggcagcaggccgtaacgcaagtcggagtggatggcgccgctcagcgcccaggccctgccgctgcctccgtcccaccgggacccgccgctccgtttccactcgccgtcattcagaatccattcagtaacgggggcagccctgctgctgaggccgtgagtggggaagcccgattcgcctactttcccgcgtccagtgtcggggacacaaccgctgtaagcgtacagaccaccgaccagtcactccaggctggaggacaattctatgtaatgatgactccccaggatgtgttgcagactgggactcagcggacaattgccccccgcacgcatccttattcccctaagatcgacggcactcgtacccctcgagatgagcgcaggagagcacagcacaatgaggttgaaagacggcgccgtgataagatcaacaactggatcgtccaactatctaagatcatccccgactgcaacgctgacaatagcaaaacaggtgcctccaagggcgggattctcagcaaagcctgtgactacatcagggagctacgccagacgaatcagcgcatgcaggagactttcaaggaggccgaacgactgcagatggataacgaattactccgacagcagatagaagagcttaagaatgaaaatgctctgctgcgcgctcagttgcaacagcataacctggagatggtaggcgagggcacccgacagtag

SEQ ID NO: 137767 - DNA, 1041 bp, Artificial Sequence
  derived and/or modified sequence
atggacatgctggaccccggcctggaccctgctgccagcgccacagctgctgctgctgccagccatgacaagggccctgaggccgaggagggcgtggagctgcaggagggcggagatggccctggagctgaggagcagacagctgtggccatcacctctgtgcagcaggccgcctttggagaccacaacatccagtaccagttcagaacagagaccaatggaggccaggtgacctacagagtggtgcaggtgacagatggccagctggatggccagggcgacacagctggagctgtgtctgtggtgtccacagctgcctttgctgggggccagcaggccgtgacccaggtgggcgtggatggagctgcccagaggcctggccctgctgctgcctctgtgcccccaggccctgctgcccccttccccctggccgtcatccagaaccccttcagcaatggaggcagccctgctgctgaggccgtgtctggagaggccaggtttgcctacttccctgccagctctgtgggggacaccacagctgtgtctgtgcagaccacagaccagagcctgcaggccggcggccagttctacgtgatgatgaccccccaggatgtgctgcagacaggcacccagaggaccatcgcccccaggacccacccctacagccccaagattgatggcaccaggaccccaagagatgaaagaagaagagcccagcacaatgaggtggagaggagaagaagagacaagatcaacaactggatcgtgcagctgagcaagatcatcccagactgcaatgctgacaacagcaagacaggagccagcaagggcggcatcctgagcaaggcctgtgactacatccgggagctgcggcagaccaaccagaggatgcaggagaccttcaaggaggccgagcggctgcagatggacaatgagctgctgcggcagcagatcgaggagctgaagaatgaaaatgccctgctgcgggcccagctgcagcagcacaacctggagatggtgggggagggcacccggcagtag

SEQ ID NO: 137768 - DNA, 1041 bp, Artificial Sequence
  derived and/or modified sequence
atggacatgctggaccccggcctggaccccgccgccagcgccaccgccgcagccgccgctagccatgacaaggggcctgaagcagaggaaggtgtggaactgcaggaaggcggcgatggaccgggtgctgaagagcagactgcagtggcaataacaagcgtgcagcaagcggcgttcggggaccataatatccaatatcagttccgcactgaaaccaacggaggtcaggtgacctaccgtgtggtgcaggtgaccgacgggcagttggacggccagggtgataccgccggcgctgtgtccgtggtctccactgccgcgttcgccggaggccagcaggcagtcacccaggtgggagtcgatggcgccgcccagcggccaggtcccgcggcggcaagtgtgccccctgggcccgcagccccctttccattggcagtcatccagaatcctttcagcaacggaggaagccctgccgcagaggcagtgagtggagaagcaagattcgcctacttccccgcttcatcggtgggcgatactaccgcagttagcgtgcaaacaacggatcagagtctgcaggctggcgggcaattctacgtgatgatgacaccccaggatgttttacagacaggcacgcaaagaacaatcgctcccaggactcacccctattcacccaagattgacgggacacggactccccgggacgagcgccggcgcgcccaacacaacgaagtggagcggaggcgaagggataagattaataactggatcgtacagctgtctaagatcatccctgactgtaacgccgacaacagcaaaactggcgcctccaagggcggcatcctttcaaaggcttgcgactacattcgtgagcttcgtcagactaatcaacgcatgcaggagacatttaaagaagccgaaaggttacagatggataatgagttactgaggcagcagattgaagagcttaagaatgagaatgcacttctccgcgcgcagctacagcagcataaccttgaaatggtgggagaaggaacgaggcagtag

SEQ ID NO: 137769 - DNA, 1041 bp, Artificial Sequence
  derived and/or modified sequence
atggacatgctggaccccggattggaccctgccgctagcgccactgcggcagccgcagcaagccatgataagggaccggaggctgaagagggggtggagttgcaggagggcggagacgggcctggggctgaggagcagacggccgtcgccattaccagcgtccagcaagctgcatttggggatcataatatccaataccaattccgcacagaaaccaacggcggtcaggtgacttatagagtggttcaagttaccgacggtcagttagacggccagggagacaccgctggcgcagtgtccgtggtgtccactgcagcgttcgccggagggcagcaagccgtgacacaagtcggggtcgacggcgcagctcagcggccaggacccgctgccgcttccgtgccccctggtccggctgccccatttccgctggctgttattcagaatccgttttccaatggaggtagccctgcagctgaggccgtatcaggcgaggccagatttgcgtattttcctgcctcatccgtgggtgatacaaccgccgttagcgtgcagaccaccgaccagagccttcaggcgggaggtcagttttacgtgatgatgaccccacaagatgtccttcagaccggcacacagcgaaccatcgcgcctagaactcatccttacagtcctaagatcgatggtacccgcactccaagggatgagagacgccgagcccaacacaatgaggtggagaggcggaggcgggataagatcaacaactggattgtgcagctgagcaaaatcatccctgattgcaacgccgacaactcaaagacaggcgcaagcaaaggaggaatcctgagcaaggcatgcgattacattagagaactgcggcagaccaatcagcgaatgcaagaaacatttaaagaagccgagcgactgcagatggataatgaattgctgcgacagcagattgaggagttaaagaacgagaacgccctcctgagggctcagcttcagcagcacaatctggaaatggtaggcgagggcactcggcagtag

SEQ ID NO: 137770 - protein, 699 aa, Artificial Sequence
  derived and/or modified sequence
MSASASVGGPVPQPPPGPAAALPPGSAARALHVELPSQQRRLRHLRNIAARNIVNRNGHQLLDTYFTLHLCSTEKIYKEFYRSEVIKNSLNPTWRSLDFGIMPDRLDTSVSCFVVKIWGGKENIYQLLIEWKVCLDGLKYLGQQIHARNQNEIIFGLNDGYYGAPFEHKGYSNAQKTILLQVDQNCVRNSYDVFSLLRLHRAQCAIKQTQVTVQKIGKEIEEKLRLTSTSNELKKKSECLQLKILVLQNELERQKKALGREVALLHKQQIALQDKGSAFSAEHLKLQLQKESLNELRKECTAKRELFLKTNAQLTIRCRQLLSELSYIYPIDLNEHKDYFVCGVKLPNSEDFQAKDDGSIAVALGYTAHLVSMISFFLQVPLRYPIIHKGSRSTIKDNINDKLTEKEREFPLYPKGGEKLQFDYGVYLLNKNIAQLRYQHGLGTPDLRQTLPNLKNFMEHGLMVRCDRHHTSSAIPVPKRQSSIFGGADVGFSGGIPSPDKGHRKRASSENERLQYKTPPPSYNSALAQPVTTVPSMGETERKITSLSSSLDTSLDFSKENKKKGEDLVGSLNGGHANVHPSQEQGEALSGHRATVNGTLLPSEQAGSASVQLPGEFHPVSEAELCCTVEQAEEIIGLEATGFASGDQLEAFNCIPVDSAVAVECDEQVLGEFEEFSRRIYALNENVSSFRRPRRSSDK

SEQ ID NO: 137771 - protein, 327 aa, Artificial Sequence
  derived and/or modified sequence
MISFFLQVPLRYPIIHKGSRSTIKDNINDKLTEKEREFPLYPKGGEKLQFDYGVYLLNKNIAQLRYQHGLGTPDLRQTLPNLKNFMEHGLMVRCDRHHTSSAIPVPKRQSSIFGGADVGFSGGIPSPDKGHRKRASSENERLQYKTPPPSYNSALAQPVTTVPSMGETERKITSLSSSLDTSLDFSKENKKKGEDLVGSLNGGHANVHPSQEQGEALSGHRATVNGTLLPSEQAGSASVQLPGEFHPVSEAELCCTVEQAEEIIGLEATGFASGDQLEAFNCIPVDSAVAVECDEQVLGEFEEFSRRIYALNENVSSFRRPRRSSDK

SEQ ID NO: 137772 - DNA, 2100 bp, Artificial Sequence
  derived and/or modified sequence
atgagcgccagcgccagcgtgggcggccccgtgccccagcccccccccggccccgccgccgccctgccccccggcagcgccgccagagccctgcacgtggagctgcccagccagcagagaagactgagacacctgagaaacatcgccgccagaaacatcgtgaacagaaacggccaccagctgctggacacctacttcaccctgcacctgtgcagcaccgagaagatctacaaggagttctacagaagcgaggtgatcaagaacagcctgaaccccacctggagaagcctggacttcggcatcatgcccgacagactggacaccagcgtgagctgcttcgtggtgaagatctggggcggcaaggagaacatctaccagctgctgatcgagtggaaggtgtgcctggacggcctgaagtacctgggccagcagatccacgccagaaaccagaacgagatcatcttcggcctgaacgacggctactacggcgcccccttcgagcacaagggctacagcaacgcccagaagaccatcctgctgcaggtggaccagaactgcgtgagaaacagctacgacgtgttcagcctgctgagactgcacagagcccagtgcgccatcaagcagacccaggtgaccgtgcagaagatcggcaaggagatcgaggagaagctgagactgaccagcaccagcaacgagctgaagaagaagagcgagtgcctgcagctgaagatcctggtgctgcagaacgagctggagagacagaagaaggccctgggcagagaggtggccctgctgcacaagcagcagatcgccctgcaggacaagggcagcgccttcagcgccgagcacctgaagctgcagctgcagaaggagagcctgaacgagctgagaaaggagtgcaccgccaagagagagctgttcctgaagaccaacgcccagctgaccatcagatgcagacagctgctgagcgagctgagctacatctaccccatcgacctgaacgagcacaaggactacttcgtgtgcggcgtgaagctgcccaacagcgaggacttccaggccaaggacgacggcagcatcgccgtggccctgggctacaccgcccacctggtgagcatgatcagcttcttcctgcaggtgcccctgagataccccatcatccacaagggcagcagaagcaccatcaaggacaacatcaacgacaagctgaccgagaaggagagagagttccccctgtaccccaagggcggcgagaagctgcagttcgactacggcgtgtacctgctgaacaagaacatcgcccagctgagataccagcacggcctgggcacccccgacctgagacagaccctgcccaacctgaagaacttcatggagcacggcctgatggtgagatgcgacagacaccacaccagcagcgccatccccgtgcccaagagacagagcagcatcttcggcggcgccgacgtgggcttcagcggcggcatccccagccccgacaagggccacagaaagagagccagcagcgagaacgagagactgcagtacaagacccccccccccagctacaacagcgccctggcccagcccgtgaccaccgtgcccagcatgggcgagaccgagagaaagatcaccagcctgagcagcagcctggacaccagcctggacttcagcaaggagaacaagaagaagggcgaggacctggtgggcagcctgaacggcggccacgccaacgtgcaccccagccaggagcagggcgaggccctgagcggccacagagccaccgtgaacggcaccctgctgcccagcgagcaggccggcagcgccagcgtgcagctgcccggcgagttccaccccgtgagcgaggccgagctgtgctgcaccgtggagcaggccgaggagatcatcggcctggaggccaccggcttcgccagcggcgaccagctggaggccttcaactgcatccccgtggacagcgccgtggccgtggagtgcgacgagcaggtgctgggcgagttcgaggagttcagcagaagaatctacgccctgaacgagaacgtgagcagcttcagaagacccagaagaagcagcgacaagtag

SEQ ID NO: 137773 - DNA, 768 bp, Artificial Sequence
  derived and/or modified sequence
atgttcatcagcgtggcccagagacagagagagaacgccttcagctgcagcaccttcctgagatgcgacagacaccacaccagcagcgccatccccgtgcccaagagacagagcagcatcttcggcggcgccgacgtgggcttcagcggcggcatccccagccccgacaagggccacagaaagagagccagcagcgagaacgagagactgcagtacaagacccccccccccagctacaacagcgccctggcccagcccgtgaccaccgtgcccagcatgggcgagaccgagagaaagatcaccagcctgagcagcagcctggacaccagcctggacttcagcaaggagaacaagaagaagggcgaggacctggtgggcagcctgaacggcggccacgccaacgtgcaccccagccaggagcagggcgaggccctgagcggccacagagccaccgtgaacggcaccctgctgcccagcgagcaggccggcagcgccagcgtgcagctgcccggcgagttccaccccgtgagcgaggccgagctgtgctgcaccgtggagcaggccgaggagatcatcggcctggaggccaccggcttcgccagcggcgaccagctggaggccttcaactgcatccccgtggacagcgccgtggccgtggagtgcgacgagcaggtgctgggcgagttcgaggagttcagcagaagaatctacgccctgaacgagaacgtgagcagcttcagaagacccagaagaagcagcgacaagtag

SEQ ID NO: 137774 - DNA, 984 bp, Artificial Sequence
  derived and/or modified sequence
atgatcagcttcttcctgcaggtgcccctgagataccccatcatccacaagggcagcagaagcaccatcaaggacaacatcaacgacaagctgaccgagaaggagagagagttccccctgtaccccaagggcggcgagaagctgcagttcgactacggcgtgtacctgctgaacaagaacatcgcccagctgagataccagcacggcctgggcacccccgacctgagacagaccctgcccaacctgaagaacttcatggagcacggcctgatggtgagatgcgacagacaccacaccagcagcgccatccccgtgcccaagagacagagcagcatcttcggcggcgccgacgtgggcttcagcggcggcatccccagccccgacaagggccacagaaagagagccagcagcgagaacgagagactgcagtacaagacccccccccccagctacaacagcgccctggcccagcccgtgaccaccgtgcccagcatgggcgagaccgagagaaagatcaccagcctgagcagcagcctggacaccagcctggacttcagcaaggagaacaagaagaagggcgaggacctggtgggcagcctgaacggcggccacgccaacgtgcaccccagccaggagcagggcgaggccctgagcggccacagagccaccgtgaacggcaccctgctgcccagcgagcaggccggcagcgccagcgtgcagctgcccggcgagttccaccccgtgagcgaggccgagctgtgctgcaccgtggagcaggccgaggagatcatcggcctggaggccaccggcttcgccagcggcgaccagctggaggccttcaactgcatccccgtggacagcgccgtggccgtggagtgcgacgagcaggtgctgggcgagttcgaggagttcagcagaagaatctacgccctgaacgagaacgtgagcagcttcagaagacccagaagaagcagcgacaagtag

SEQ ID NO: 137775 - DNA, 2100 bp, Artificial Sequence
  derived and/or modified sequence
atgtccgcttccgccagtgtaggaggaccagtccctcagccccctcccggccctgcagcagcactgcccccagggtccgccgcccgcgcgcttcacgtggaactgcctagccaacaaagacgtttacggcatttacgcaatattgcagcccggaacatcgtgaacaggaacggccatcagcttctcgatacatactttacacttcacctttgtagtacagaaaaaatttacaaagaattttacagatccgaagtgattaaaaatagcttgaatcccacatggagatctctggatttcggcataatgcctgatcgcctggacacctctgtgtcctgtttcgtggtcaaaatctggggcggtaaggagaacatctaccagctcctgatagaatggaaagtctgcctggacggattaaagtacctgggccagcagatacatgcacgtaaccagaacgaaatcattttcggactcaatgatggctactatggagccccatttgagcacaaaggatattctaatgcacaaaaaactatcttactacaggtcgaccagaattgcgttcggaattcctacgatgtcttcagcctgctcaggctccacagggcacagtgcgccatcaagcagacccaggttactgtacagaagattggtaaggagatcgaggaaaagctgagactgacgagtacatcaaacgagctgaaaaaaaaatccgaatgcttgcagcttaaaattctggtgttgcagaatgagctcgagcgccagaagaaggctttgggccgggaggtggctcttttacacaaacagcaaattgccttgcaggataagggaagcgccttttcggctgagcatctgaagctccagcttcagaaagaaagcctgaatgaattaaggaaagaatgtaccgcgaaacgggagctgttcctcaaaaccaacgcccagctgacaattcgctgtcgtcagctgctctcggagctgtcctacatttacccaatcgacctaaatgagcacaaggactactttgtctgtggggtcaagcttcctaatagcgaggactttcaggcgaaagacgacggctctattgccgtggccttgggatataccgcacacttggtgagtatgatctcctttttcctgcaggtccccctgagataccccataattcataagggaagcaggtctacaattaaggataacattaacgataagctgacggagaaggagagagagtttcccctctaccccaaaggaggcgagaagctccagttcgattatggtgtgtatttattgaataaaaacatagcccagctgcgttatcaacacggattgggaaccccggacctgcgccagaccctgcccaatttgaaaaatttcatggaacacggacttatggtacgttgcgaccgccaccacacctcgtccgcaattcctgttcctaagcgccaaagctcaatctttggcggggccgacgtgggattctccggtggcattccttccccagacaagggccaccggaaaagggcctcttccgagaatgagcgcttgcaatacaagacccctcccccctcctacaattcggccctggctcaacccgtaaccacagttcccagtatgggagagacggagagaaagatcacatccctgtcatctagtttggacacctccttggatttcagcaaggaaaataagaaaaaaggggaggatctggttgggtccctgaacgggggtcacgccaatgttcatccctcacaggaacaaggagaagccctgtctggtcacagggctactgtcaatggtactcttcttccctccgaacaggccggctcggcgagtgttcagcttcccggagaattccatccggtgtccgaggctgagctgtgttgtacagtcgagcaggctgaagagatcatcggacttgaggccaccggattcgcttccggtgaccagctggaggcatttaactgtatcccagtggacagcgcagtcgcggtggaatgcgacgagcaggtccttggcgaatttgaggagttttctcgtcggatatatgctttgaacgaaaacgtcagtagttttagaagacctcgacgatcgtcggataaatag

SEQ ID NO: 137776 - DNA, 768 bp, Artificial Sequence
  derived and/or modified sequence
atgtttatcagtgtagcccagaggcaaagggaaaatgccttcagctgctccacgttcctccgctgcgatcgccaccacacttcgagcgcaattccagtgccgaagcgccagtcatctatcttcggcggcgccgacgttggtttcagcggcggcatccccagtcccgacaagggccaccgaaagcgcgcaagtagcgaaaatgagcgactacagtacaagacaccacctccaagttacaatagcgccctcgcacagcctgtcaccaccgtgccaagcatgggcgaaacagagaggaaaatcacaagtctctctagttccttagacacatcgcttgatttctcaaaggaaaacaaaaagaaaggcgaagacctggttggttcgctgaacggaggacatgccaacgtgcatccaagccaggagcagggtgaggcgctgagcggtcaccgagccactgtgaatgggaccctgctgccctccgagcaggcaggctccgccagcgtgcagcttccaggagagttccatcctgtctccgaggccgaattatgctgcaccgtggaacaggccgaggagattattggccttgaagcaacaggatttgctagcggcgatcagctcgaggctttcaattgtataccagtcgactctgccgtcgccgtcgagtgcgatgagcaagttctgggcgagttcgaagagttcagccgtcgaatttatgcgctcaatgaaaatgtgtcttcgttcagacggcccaggagatcctctgacaaatag

SEQ ID NO: 137777 - DNA, 984 bp, Artificial Sequence
  derived and/or modified sequence
atgatctctttttttctccaggttcctctccgttaccctattatccacaagggatccaggtcaacaattaaggataacataaatgacaagctgacggagaaagaaagggaatttccgctctacccaaaagggggcgagaagctacagtttgattatggcgtgtacctcctaaacaagaatatcgcccagctccgctaccagcacggcctgggcactccggacctcaggcagaccctgcctaatctgaagaacttcatggagcatggtctaatggtgcgctgcgacagacatcacacctcctctgccattccagttcctaaaagacagagctccatctttggaggtgcagatgttggctttagcggcggaatcccatctcccgacaagggacaccgaaaaagggcgtcttccgaaaacgagaggttacaatacaagacacccccgcctagctacaatagtgccctcgcccagcctgtcaccaccgtgccctctatgggagagacggagcgcaaaatcaccagtctcagttcctcactcgacacttcgttggatttttccaaggaaaacaaaaaaaagggcgaagacttagtagggtccctcaatggcggccatgccaatgtacatccaagtcaggaacaaggagaagctctcagcggacaccgcgctacggtgaacggaaccttattacctagtgagcaagccggatctgcttccgtccagctgccgggcgaatttcacccggtcagcgaagctgaactctgttgtacagtggagcaggctgaggaaatcatcggtctcgaggcaacggggtttgcaagcggtgaccagttggaagccttcaattgcattccagtggacagcgctgtggccgtggaatgtgatgagcaggtcctgggcgaattcgaggagtttagccggagaatatatgccctcaatgaaaacgtgagtagttttcggcggccacgaaggagcagtgataaatag

SEQ ID NO: 137778 - DNA, 2100 bp, Artificial Sequence
  derived and/or modified sequence
atgtctgccagcgcctctgtgggcggccctgtgccccagcccccacctggccctgctgctgccctgcccccaggcagcgctgcccgggccctgcacgtggagctgcccagccagcagaggcggctgcggcacctgaggaacattgctgccagaaatattgtgaacagaaatggccaccagctgctggacacctacttcaccctgcacctgtgcagcacagagaagatctacaaggagttctacagaagtgaggtgatcaagaacagcctgaaccccacctggaggagcctggactttggcatcatgccagaccggctggacacctctgtgtcctgctttgtggtgaagatctggggcggcaaggagaacatctaccagctgctgattgagtggaaggtgtgcctggatggcctgaagtacctgggccagcagatccacgccaggaaccagaatgagatcatcttcggcctgaatgatggctactacggggccccctttgagcacaagggctacagcaatgcccagaagaccatcctgctgcaggtggaccagaactgtgtgaggaacagctatgatgtgttcagcctgctgcggctgcaccgggcccagtgtgccatcaagcagacccaggtgacagtgcagaagattggcaaggagattgaggagaagctgcggctgaccagcaccagcaatgagctgaagaagaagtctgagtgcctgcagctgaagatcctggtgctgcagaatgagctggagcggcagaagaaggccctgggccgggaggtggccctgctgcacaagcagcagatcgccctgcaggacaagggcagcgccttctctgctgagcacctgaagctgcagctgcagaaggagagcctgaatgagctgaggaaagaatgtacagccaagcgggagctgttcctgaagaccaatgcccagctgaccatccgctgccggcagctgctgtctgagctgagctacatctaccccatcgacctgaatgagcacaaggactactttgtgtgtggggtgaagctgcccaacagcgaggacttccaggccaaggatgatggcagcattgctgtggccctgggctacacagcccacctggtgtccatgatctccttcttcctgcaggtgcccctgcgctaccccatcatccacaagggcagccgcagcaccatcaaggacaacatcaatgacaagctgacagagaaggagcgggagttccccctgtaccccaagggcggggagaagctgcagtttgattatggagtgtacctgctgaacaagaacatcgcccagctgcgctaccagcacggcctgggcaccccagacctgcggcagaccctgcccaacctgaagaacttcatggagcacggcctgatggtgcgctgtgacagacaccacaccagcagcgccatccctgtgcccaagaggcagagcagcatctttggaggagcagatgtgggcttcagcggcggcatccccagcccagacaagggccacaggaagagggccagcagtgaaaatgaaaggctgcagtacaagaccccaccacccagctacaacagcgccctggcccagcctgtgaccaccgtgcccagcatgggagaaacagagaggaagatcaccagcctgagcagcagcctggacaccagcctggacttcagcaaggagaacaagaagaagggggaggacctggtgggcagcctgaatggaggccacgccaacgtgcaccccagccaggagcagggcgaggccctgagcggccaccgggccaccgtgaatggcaccctgctgcccagcgagcaggccggcagcgcctctgtgcagctgcccggggagttccaccctgtgtctgaggccgagctgtgctgcaccgtggagcaggccgaggagatcatcggcctggaggccactggatttgccagcggggaccagctggaggccttcaactgcatccctgtggacagcgctgtggccgtggagtgtgatgagcaggtgctgggggagtttgaggagttcagccgccgcatctatgccctgaatgaaaatgtgtcctccttcagaagaccccggcgcagcagtgacaagtag

SEQ ID NO: 137779 - DNA, 768 bp, Artificial Sequence
  derived and/or modified sequence
atgttcatctctgtggcccagaggcagagagaaaatgccttcagctgcagcaccttcctgcgctgtgacagacaccacaccagcagcgccatccctgtgcccaagaggcagagcagcatctttggaggagcagatgtgggcttcagcggcggcatccccagcccagacaagggccacaggaagagggccagcagtgaaaatgaaaggctgcagtacaagaccccaccacccagctacaacagcgccctggcccagcctgtgaccaccgtgcccagcatgggagaaacagagaggaagatcaccagcctgagcagcagcctggacaccagcctggacttcagcaaggagaacaagaagaagggggaggacctggtgggcagcctgaatggaggccacgccaacgtgcaccccagccaggagcagggcgaggccctgagcggccaccgggccaccgtgaatggcaccctgctgcccagcgagcaggccggcagcgcctctgtgcagctgcccggggagttccaccctgtgtctgaggccgagctgtgctgcaccgtggagcaggccgaggagatcatcggcctggaggccactggatttgccagcggggaccagctggaggccttcaactgcatccctgtggacagcgctgtggccgtggagtgtgatgagcaggtgctgggggagtttgaggagttcagccgccgcatctatgccctgaatgaaaatgtgtcctccttcagaagaccccggcgcagcagtgacaagtag

SEQ ID NO: 137780 - DNA, 984 bp, Artificial Sequence
  derived and/or modified sequence
atgatctccttcttcctgcaggtgcccctgcgctaccccatcatccacaagggcagccgcagcaccatcaaggacaacatcaatgacaagctgacagagaaggagcgggagttccccctgtaccccaagggcggggagaagctgcagtttgattatggagtgtacctgctgaacaagaacatcgcccagctgcgctaccagcacggcctgggcaccccagacctgcggcagaccctgcccaacctgaagaacttcatggagcacggcctgatggtgcgctgtgacagacaccacaccagcagcgccatccctgtgcccaagaggcagagcagcatctttggaggagcagatgtgggcttcagcggcggcatccccagcccagacaagggccacaggaagagggccagcagtgaaaatgaaaggctgcagtacaagaccccaccacccagctacaacagcgccctggcccagcctgtgaccaccgtgcccagcatgggagaaacagagaggaagatcaccagcctgagcagcagcctggacaccagcctggacttcagcaaggagaacaagaagaagggggaggacctggtgggcagcctgaatggaggccacgccaacgtgcaccccagccaggagcagggcgaggccctgagcggccaccgggccaccgtgaatggcaccctgctgcccagcgagcaggccggcagcgcctctgtgcagctgcccggggagttccaccctgtgtctgaggccgagctgtgctgcaccgtggagcaggccgaggagatcatcggcctggaggccactggatttgccagcggggaccagctggaggccttcaactgcatccctgtggacagcgctgtggccgtggagtgtgatgagcaggtgctgggggagtttgaggagttcagccgccgcatctatgccctgaatgaaaatgtgtcctccttcagaagaccccggcgcagcagtgacaagtag

SEQ ID NO: 137781 - DNA, 2100 bp, Artificial Sequence
  derived and/or modified sequence
atgagcgccagcgccagcgtgggcggccccgtgccccagcccccccccggccccgccgcagccctaccgcctggatctgcagctagagccctccacgtagagttgcctagccagcagagacggttgaggcatctccgcaatatcgcagcccggaacatagtgaaccggaacggccaccagttgcttgatacctacttcacgctccacttgtgttccacagagaaaatatacaaggagttctataggtctgaagtgatcaaaaattccctgaacccaacctggcggtcacttgactttggcatcatgccggacagacttgatacgagcgtgagctgctttgtggtgaaaatctggggtgggaaagaaaacatttatcaattgctgattgagtggaaggtgtgtctagacgggctgaagtatctggggcagcaaattcacgccaggaatcagaacgagatcatttttggactgaacgacgggtactacggagcccccttcgagcacaaagggtatagcaatgctcaaaagaccattctgcttcaggtagatcagaactgcgtaagaaattcttacgatgttttctcactgcttcgtctccaccgggcccagtgcgccattaagcaaactcaggtgaccgtgcagaagattggtaaggagattgaggaaaagctccgtttaacttcaacatctaatgagctaaaaaagaagagtgaatgtctgcagcttaaaattctggtgctccagaacgagctcgaaaggcagaaaaaagctttgggccgcgaggttgcattactgcacaaacagcagatcgccctgcaggataagggcagcgccttcagtgctgaacatttgaagctgcagcttcagaaagagtcgctgaatgaacttagaaaagagtgtacagctaagagagaactcttcctgaagaccaacgctcaactcacgatcaggtgccgccagctgttgtcggagctgagttatatttatcccatcgacctgaacgagcacaaggactatttcgtgtgcggcgtgaagctgccaaattctgaagacttccaggctaaagatgatgggagcatcgccgtcgctctcggttatactgcacacttagtgagtatgatttcttttttcctgcaggttcccttgcgatatcctatcatccacaagggatcgcgctccacgatcaaggacaatatcaacgacaagctcacagaaaaagagcgtgagttcccactgtatcctaagggaggcgagaagctacagttcgactatggtgtgtacttacttaacaagaacatagcacagctgcgatatcagcacggacttggaacacctgacttgcggcagaccttgcccaacctgaagaacttcatggaacatggcctcatggtccggtgcgacaggcaccacacgtcatcggccatcccggtgccaaagagacagtcctccatttttggtggggccgatgttggattttcgggcgggatcccttctcctgataaggggcataggaaaagagccagttctgaaaatgagcgcctgcagtacaagacacctccaccctcctacaattcggccttggcacagccggtcacaacagtgccaagcatgggagagaccgaacgaaaaatcacctccctcagttcatcactagatacctcacttgatttcagcaaagagaacaagaaaaagggggaggacctcgttgggtccttgaacggaggccatgccaatgtgcatccatcccaggagcagggggaggcattgtccggacatcgggccaccgtgaatgggactctgctcccctcagaacaggccggctcggccagcgtccagctgcccggcgaatttcatcccgtgtctgaggctgaactgtgctgcaccgtggaacaggctgaagagatcatcggcctggaggccacgggcttcgcctcaggcgatcaacttgaagcttttaactgcatccccgttgattctgctgtggctgtggagtgcgacgagcaggtcctgggagagttcgaggagttcagccgccgtatttacgcacttaacgaaaacgtcagtagctttcgccgaccccggaggtcttccgacaagtag

SEQ ID NO: 137782 - DNA, 768 bp, Artificial Sequence
  derived and/or modified sequence
atgttcatcagcgtggcccagcggcagcgggagaacgccttcagctgctcgacctttttgaggtgcgaccgccaccacacgtcatctgcaattcccgttcccaaacggcagtcttctatttttggtggcgccgacgtgggattttctggtgggattccttccccagacaaagggcaccgcaaacgagcgtcctcagaaaatgagagactgcagtacaaaacacctcccccttcctataatagcgctttagcacagccggtcaccactgttccatcgatgggcgagactgagagaaagatcacttcactttcttcaagcctggacacaagcctagacttctcaaaggagaacaaaaagaagggcgaagacttggtggggtctttgaatgggggccatgctaatgtgcacccatctcaagagcagggagaagccctgagcggtcatcgggccaccgtcaacggcactctgcttcctagtgagcaggctggatctgcaagcgttcagctcccaggggagttccacccagtttccgaagccgagttgtgctgtaccgtagaacaagcggaagaaattatcgggctggaggcgacaggctttgcttctggtgaccagctggaagcgttcaactgcattccagttgatagtgctgttgcagtcgagtgtgacgagcaggtgttgggggagtttgaagaattctccagacgaatctacgcgttgaacgaaaatgtgtcttcatttcgccggccgcgaaggtctagcgataaatag

SEQ ID NO: 137783 - DNA, 984 bp, Artificial Sequence
  derived and/or modified sequence
atgatcagcttcttcctgcaggtgcccctgcggtaccccatcatccataaaggcagccggtctacaattaaggacaatattaacgataaacttactgagaaagaaagagaattccccctgtaccctaaaggcggtgagaagctgcagttcgattacggcgtttaccttctcaacaagaacattgcccagctgcgataccaacatggtctggggacccccgatcttaggcagactctgcccaacttgaaaaactttatggaacacggtctgatggtgcggtgcgacagacaccacacgagttcagccatacctgtccctaaacgccaatcaagcatatttgggggcgctgatgtcgggttcagcggagggatccctagtcctgataaagggcaccgcaagagggcgagcagcgagaacgaacgcctccagtataagaccccaccaccctcatacaacagcgctttggcacagcccgtgacaaccgtgccttctatgggagagaccgaacgcaaaatcacatcccttagctcctctctggacacaagtctcgattttagtaaagaaaacaaaaaaaagggggaggatctagtaggctcactcaacggtggtcacgcaaacgtgcaccccagccaggagcaaggtgaagctctcagtggacacagagccacagttaacggcacacttctgcctagtgaacaggctggttctgccagcgttcaacttccaggtgagttccaccccgtctccgaggcagagctctgttgcacagtcgagcaagctgaggaaattattgggttggaagcgactggattcgcctcaggtgaccagcttgaagctttcaattgcattcccgtcgattctgcggtggccgtcgaatgcgacgaacaggtactcggtgaatttgaggagttctcgagacgtatctacgctctcaacgagaacgtcagcagtttccggaggccgcgtaggagctcagacaaatag

SEQ ID NO: 137784 - DNA, 2100 bp, Artificial Sequence
  derived and/or modified sequence
atgtcggccagcgcaagcgttggcggtccagtaccccagcctcctcctggtcctgccgctgctctcccaccaggatccgccgcacgagccctgcatgttgagctaccgtcacagcagagaaggctgaggcaccttcgcaatatagctgctcgcaatattgttaaccggaacgggcaccagcttctggatacatacttcaccctccacctttgtagcacagagaagatctataaggagttctaccggtcggaggtgataaagaatagtctgaatccaacttggcgctctctggacttcgggataatgcccgatcgcttggacacttccgtctcctgttttgttgtaaagatatggggcggtaaggagaacatctatcagctgctaatcgagtggaaagtctgtcttgacggactgaagtacctgggtcagcagattcacgctcggaaccaaaatgagattatattcggactgaatgatggatactacggagcccctttcgagcataagggctattcaaacgcacagaaaactattttgctacaggtggatcagaattgcgtccgcaattcgtacgacgtgttctcactgctcagacttcaccgcgctcagtgcgccataaagcagacccaggtcactgtccagaaaattggcaaagaaattgaggaaaaactgcggctgaccagtacgagcaacgagctcaagaaaaagtctgagtgcctgcagctgaaaatcctggtccttcagaatgaactcgaacgccagaaaaaggctctggggagagaagtggccctcctccacaagcaacagatagcactccaggataaggggagtgccttctcagcagagcatctcaagctccaacttcagaaggaatcgctgaacgaactcagaaaagaatgtaccgccaagcgcgagctttttttaaagacaaacgcgcagcttaccatccgctgtcggcagttattgtctgagctatcctacatataccctattgatctaaacgaacataaagattattttgtatgtggcgtaaagttacccaactccgaggacttccaagccaaggacgacggatccatcgctgtggcccttggatacactgctcacctcgtgagcatgatcagcttcttcctgcaggtccctcttaggtaccccatcattcataaggggagccggtcaactattaaggataatatcaacgacaagcttacagagaaggaacgcgaatttcccttatatccgaaaggaggcgaaaaacttcaattcgactacggcgtgtacctgctgaacaaaaacatcgcacagttgcgttatcagcacgggctggggaccccggacttaaggcagacattgcctaaccttaaaaatttcatggaacatggattaatggtgcgctgtgacaggcaccacacatccagtgcaattcctgtaccgaagcgacagagcagtattttcggaggtgcagacgtgggctttagtgggggtatcccttcacctgacaaaggacacagaaagcgagcctcctcggaaaacgagcggctccaatacaagacaccgccaccttcctataatagcgcgttagcacagccggtaacaacagttccctctatgggggagactgagcggaagatcacgtctctgagctctagtttagacacctcacttgacttcagcaaagagaacaaaaaaaagggtgaggatctggtcggttcccttaatggcggtcatgccaacgtgcatccaagccaggagcaaggcgaggctctttccggtcatcgtgctacggtgaacgggacgctgctgccttccgagcaggcaggatctgcatccgtgcagctacctggtgagtttcacccagtttctgaggccgaactgtgctgcactgtcgagcaagccgaggagataattgggcttgaggctaccggcttcgctagcggcgaccaacttgaggccttcaactgcatacccgtggatagcgccgtggcagttgaatgcgacgagcaggttttaggtgagttcgaagaattctctcgccgaatttacgccttgaatgaaaatgtgtcctcatttcgacggccaagacggtccagcgataagtag

SEQ ID NO: 137785 - DNA, 768 bp, Artificial Sequence
  derived and/or modified sequence
atgttcatatccgtggcccagcgccagcgagaaaacgcattcagctgttccaccttcctaaggtgtgaccggcaccacacaagctctgccatccccgtgcccaagcggcagtcatctatatttggaggggcagatgttggcttttcgggcggaatcccctctcccgataaagggcatcgtaaacgagcctccagtgaaaatgagcgccttcaatacaagactcccccaccatcttacaattcagcactggcccagccagtcacaacggtgcctagtatgggagaaaccgagagaaagatcacgtccttaagtagttcgctagacacaagcttggacttctcaaaggaaaacaaaaagaagggagaggatctcgtaggcagcctgaatggcggtcacgccaacgtgcacccctctcaagagcaaggagaggccctcagtgggcatcgggcaaccgtgaacggtacactcttaccgtctgagcaggcgggtagcgccagcgtgcagctgcccggagagtttcatcccgtgtcagaggcagagctgtgctgcactgtagaacaggcagaggaaattatcggcctagaggccaccggattcgcgtccggcgatcagctggaagcatttaattgtatcccagtcgactcagccgtggcagtcgaatgcgatgagcaggtgcttggagaattcgaagaattctctcggaggatatacgccctgaatgaaaacgtctcctccttcaggcgtccacggcgtagcagcgacaaatag

SEQ ID NO: 137786 - DNA, 984 bp, Artificial Sequence
  derived and/or modified sequence
atgattagtttcttcctccaggtcccactgcgctacccgattatacacaagggttccaggtccactataaaggataacattaacgacaagcttacagagaaggaaagggagttccctctgtacccgaagggcggagaaaagctccagttcgactacggcgtgtacctgctgaataaaaacatcgcccagctgcgataccagcatggacttggtactcctgacctgcgccagacacttccaaacttaaagaacttcatggagcacgggctgatggtgcgctgcgatcggcaccatacgagtagcgctattccggtgccaaagcggcaatcctcgatctttgggggagccgatgtggggtttagcggcggaataccaagccccgataagggccacaggaaaagagctagctccgaaaacgagcgcctgcagtataaaacgcccccaccctcatacaactctgccctggctcagccagtgaccacagttcctagtatgggggagaccgagaggaaaattacttcactgtcttcaagtctggatacgagcctggacttctctaaggaaaataagaagaaaggtgaggacctagtcggatccctgaatgggggacacgccaacgttcacccttcccaggagcaaggcgaggcacttagcggacatagagcaacagtgaatggaacactgctcccatctgaacaggcgggttcagctagtgtccaactgccaggggagttccaccccgtgagcgaagcggaattgtgctgcaccgtggagcaggccgaggagatcatcggactggaagctaccggattcgcatccggtgaccagctggaggcatttaactgcatcccagtggactctgccgtcgctgtcgagtgcgacgagcaagtcctgggcgaatttgaagaattttctagacgtatctacgcgctgaacgagaacgtcagctctttcaggagaccacgtcggtcttccgataagtag

SEQ ID NO: 137787 - DNA, 4123 bp, Artificial Sequence
  derived and/or modified sequence
aatgagcgctccgggtctcagcggggtggaggggttgcactgcggtaatatggctcttccttagccagcggcggcaacggcggcagcggcggcagcggcggcggctactgtctgggctgagcagtagtgcctctcgggtggcgggtttctaggctgcaggggcttggtaggtggtggcaagggggcggcggcggatgccggaagagtgcccgccccgccgcttggcggcccctggatcgagatgagcgcctccgcgtcggtcgggggccccgtcccccagccacccccgggcccggccgctgctctgcctcccggttctgccgcgcgggccctgcatgtggagctgccgtctcagcagcggcgtcttcgacatcttcggaacattgctgcccggaacattgttaatagaaatggccatcagctccttgatacctactttacacttcacttgtgtagtactgaaaagatatataaagaattttatagaagtgaagtgattaagaattccttgaatcccacgtggcgaagtctcgattttggaattatgccagaccgtcttgatacatctgtgtcttgtttcgtggtgaagatatggggtggaaaggagaacatctaccagctgttgattgaatggaaagtctgtttggatgggctgaaatacttgggtcagcagattcatgcccgaaaccaaaatgaaataatttttgggctgaatgatggatactatggtgctccatttgaacataagggttattcaaatgctcagaagactattcttctgcaggtggatcagaactgtgttcgcaattcttacgatgtcttctctttgctacggcttcatagagcccagtgtgcaattaaacagactcaggtaactgttcagaaaattggaaaggaaattgaagaaaaactaagactcacatctacaagcaatgaactgaaaaaaaaaagtgaatgcctgcagttaaaaattttggtgcttcagaatgaactggaacggcagaagaaagctttgggacgggaggtggcattactgcataagcaacaaattgcattacaagacaaaggaagtgcattttcagctgagcacctcaaacttcaactccagaaggaatccctaaatgagctgaggaaggagtgcactgcaaaaagagaactcttcttgaagactaatgctcagttgacaattcgttgcaggcagttactctctgagctttcctacatttaccctattgatttgaatgaacataaggattactttgtatgcggtgtcaagttgcctaattctgaggacttccaagcaaaagatgatggaagcattgctgttgcccttggttatactgcacatctggtctccatgatttcctttttcctacaagtgcccctcagatatcctataattcataaggggtctagatcaacaatcaaagacaatatcaatgacaaactgacggaaaaggagagagagtttccactgtatccaaaaggaggggagaagttgcagtttgattatggtgtctatcttctgaacaaaaatatagcacagctaagatatcaacatggactagggactccagacttgcggcaaacccttcccaacctgaaaaacttcatggagcatggactaatggtcaggtgtgacagacatcacacctccagtgcaatccctgttcctaagagacaaagctccatatttgggggtgcagatgtaggcttctctggggggatcccttcaccagacaaaggacatcgaaaacgggccagctctgagaatgagagacttcagtacaaaacccctcctcccagttacaactcagcattagcccagcctgtgaccaccgtcccctccatgggagagaccgagagaaagataacatctctatcctcctccttggatacctccttggacttctccaaagaaaacaagaaaaaaggagaggatctagttggcagcttaaacggaggccacgcgaatgtgcaccctagccaagaacaaggagaagccctctccgggcaccgggccacagtcaatggcactctcctacccagcgagcaggccgggtccgccagtgtccagcttccaggcgagttccacccagtctcagaagctgagctctgctgtactgtggagcaagcagaagaaatcatcgggctggaagccacaggtttcgcctcaggtgatcagctagaagcatttaactgcatcccagtggacagtgctgtggcagtagagtgtgacgaacaagttctgggagaatttgaagagttctcccgaaggatctatgcactgaatgaaaacgtatccagcttccgccggccgcgcaggagttccgataagtgaagtgagcaggtcaacagtaggactggggcagaagctctgcctaaaatgaagtgaaagctgcacttaaccctttgtgataatgatgacacaaaatgaatattaatggaggatattcctcggaaaaacagactttgggaatgaaggagggactcaggatcattgttatcagtgggccaaagttagattttgctttcaagatttgcttttcgggcctgatgattttaaagcaaaaatcaccctctagttgaaagagcttacagctcgagtcaccttttagctatttgtctgctttttatttacccttgtatgttatcctcagagggaagatgataatatataaataatataatgaacacacccttagtttctcataagcatttgccctcaccatggtttataaaactttgggaaaacggaatattcagaaataggtttccgccatgtactgaaaggtctgtggccatctgtgaggtagatgaagaagcagcatagtggtctccttacatctaggcctaactgtccctcttcctgcccccgggtaccacagtccacctttagaccctactgtcgccccatcttctccgtggatgggccatgcgtcctgaaaacaggacatcagattcactggttctgtaacccagtagctgtgacgttccatctcttctaaccagccatggccttcccctcctctgccatacccttaatgcggccctcagattagatgaaaaacttgctcctggtggatcccaagggaccctcaaggacctcgaggttactgcagtcagatgccatctcatcccctgtgggggccaaagtttttatgtgggcagatgctgtggtcaggaactaggcatgctttctggcaatgcactcaccagacaaaaatcccttgatgtaaatcccatgttaatttattaaatttcagtcagaaggtcagcatttacatgacagaatgtatgtagagagttggggtgtctggtaggcaaactgcaaggcagttgagatagttggattaagaggctagacgagacatagaatactattggtatgtgtgcaatttcatgaatattaaattatgtttcgaagtccagttgtcattcccgcattcagatttcatttgctgttgctttatacgttacgtacccaaggacattgcctcagggttgcaaactctttaaaggaaaatttatccatatatccatgtattatatagaagaataaaaattgagtttacttcacccgacctgatttttttttaccagcttggaaattcctcttgaacctacgtctccatatgtcacatcatgacaggactagcctgaacaaaagccatgtctatctaagcggaggctgttgacttcattcagtttgcatattgtatatagcaacacaaacacttgacaggtatatactccagtcgccacatttgtcctgcataacagcttcactcacaggcctcaccgtcactttattttgtgtccaagcattcctgggctcaagtttaatgtatagctacattgttgttttccatgtagagaactcacaggatgactacatcacaaataaacccaactctcaggcagtcgaaagctttaactggatctgcagaagcccatcttcctccacatgaagaagtggggctccttcacctagagcaggagcttctctgcagtgtactgtctgtcgctcattttggagtcagtgtgggtggagacagcatcgtggatatgcacgtgctgcggggccctccagggaagtaacatttaccaaaaaaaaagaaaa

SEQ ID NO: 137788 - DNA, 1312 bp, Artificial Sequence
  derived and/or modified sequence
caccttcacagctaagatatcaacatggactagggactccagacttgcggcaaacccttcccaacctgaaaaacttcatggagcatggactaatggtcaggtggacatctgctttacaagaacacagcaaactaagaaagggtatagtggccactgcgggcaggggcactgattcaaccacccacagcgccagaggggactcgaagaacccacgccaggcttacctccagacctgcgtcctacagaacagacaccactgaacatcctgtagtccccttattgtgtcatcgctcagtaatgttcatatcagtggcccagaggcaacgagaaaatgccttttcttgttcaacttttttaagatgtgacagacatcacacctccagtgcaatccctgttcctaagagacaaagctccatatttgggggtgcagatgtaggcttctctggggggatcccttcaccagacaaaggacatcgaaaacgggccagctctgagaatgagagacttcagtacaaaacccctcctcccagttacaactcagcattagcccagcctgtgaccaccgtcccctccatgggagagaccgagagaaagataacatctctatcctcctccttggatacctccttggacttctccaaagaaaacaagaaaaaaggagaggatctagttggcagcttaaacggaggccacgcgaatgtgcaccctagccaagaacaaggagaagccctctccgggcaccgggccacagtcaatggcactctcctacccagcgagcaggccgggtccgccagtgtccagcttccaggcgagttccacccagtctcagaagctgagctctgctgtactgtggagcaagcagaagaaatcatcgggctggaagccacaggtttcgcctcaggtgatcagctagaagcatttaactgcatcccagtggacagtgctgtggcagtagagtgtgacgaacaagttctgggagaatttgaagagttctcccgaaggatctatgcactgaatgaaaacgtatccagcttccgccggccgcgcaggagttccgataagtgaagtgagcaggtcaacagtaggactggggcagaagctctgcctaaaatgaagtgaaagctgcacttaaccctttgtgataatgatgacacaaaatgaatattaatggaggatattcctcggaaaaacagactttgggaatgaaggagggactcaggatcattgttatcagtgggccaaagttagattttgctttcaagatttgcttttcgggcctgatgattttaaagcaaaaatcaccctctagttg

SEQ ID NO: 137789 - DNA, 1615 bp, Artificial Sequence
  derived and/or modified sequence
aactggaacggcagaagaaagctttgggacgggaggtggcattactgcataagcaacaaattgcattacaagacaaaggaagtgcattttcagctgagcacctcaaacttcaactccagaaggaatccctaaatgagctgaggaaggagtgcactgcaaaaagagaactcttcttgaagactaatgctcagttgacaattcgttgcaggcagttactctctgagctttcctacatttaccctattgatttgaatgaacataaggattactttgtatgcggtgtcaagttgcctaattctgaggacttccaaggcatgatttcttggaaaggagagtccatatgtcaaacaatgtctcattgagaacatggaatgattccatagatgctgtggcagtgattagagtcttaaatattttgtcctgtctggatcagtgggtgcttggttccttaacaaatcagctgcctcagtgattgggaaggcaggatgcaaaagatgatggaagcattgctgttgcccttggttatactgcacatctggtctccatgatttcctttttcctacaagtgcccctcagatatcctataattcataaggggtctagatcaacaatcaaagacaatatcaatgacaaactgacggaaaaggagagagagtttccactgtatccaaaaggaggggagaagttgcagtttgattatggtgtctatcttctgaacaaaaatatagcacagctaagatatcaacatggactagggactccagacttgcggcaaacccttcccaacctgaaaaacttcatggagcatggactaatggtcaggtgtgacagacatcacacctccagtgcaatccctgttcctaagagacaaagctccatatttgggggtgcagatgtaggcttctctggggggatcccttcaccagacaaaggacatcgaaaacgggccagctctgagaatgagagacttcagtacaaaacccctcctcccagttacaactcagcattagcccagcctgtgaccaccgtcccctccatgggagagaccgagagaaagataacatctctatcctcctccttggatacctccttggacttctccaaagaaaacaagaaaaaaggagaggatctagttggcagcttaaacggaggccacgcgaatgtgcaccctagccaagaacaaggagaagccctctccgggcaccgggccacagtcaatggcactctcctacccagcgagcaggccgggtccgccagtgtccagcttccaggcgagttccacccagtctcagaagctgagctctgctgtactgtggagcaagcagaagaaatcatcgggctggaagccacaggtttcgcctcaggtgatcagctagaagcatttaactgcatcccagtggacagtgctgtggcagtagagtgtgacgaacaagttctgggagaatttgaagagttctcccgaaggatctatgcactgaatgaaaacgtatccagcttccgccggccgcgcaggagttccgataagtgaagtgagcaggtcaacagtaggactggggcagaagctctgcctaaaatgaagtgaaagctgcacttaaccctttgtgataatgatgac

SEQ ID NO: 137790 - protein, 380 aa, Artificial Sequence
  derived and/or modified sequence
MSETVICSSRATVMLYDDGNKRWLPAGTGPQAFSRVQIYHNPTANSFRVVGRKMQPDQQVVINCAIVRGVKYNQATPNFHQWRDARQVWGLNFGSKEDAAQFAAGMASALEALEGGGPPPPPALPTWSVPNGPSPEEVEQQKRQQPGPSEHIERRVSNAGGPPAPPAGGPPPPPGPPPPPGPPPPPGLPPSGVPAAAHGAGGGPPPAPPLPAAQGPGGGGAGAPGLAAAIAGAKLRKVSKQEEASGGPTAPKAESGRSGGGGLMEEMNAMLARRRKATQVGEKTPKDESANQEEPEARVPAQSESVRRPWEKNSTTLPRMKSSSSVTTSETQPCTPSSSDYSDLQRVKQELLEEVKKELQKVKEEIIEAFVQELRKRGSP

SEQ ID NO: 137791 - protein, 839 aa, Artificial Sequence
  derived and/or modified sequence
MEQWRQCGRWLIDCKVLPPNHRVVWPSAVVFDLAQALRDGVLLCQLLHNLSPGSIDLKDINFRPQMSQFLCLKNIRTFLKVCHDKFGLRNSELFDPFDLFDVRDFGKVISAVSRLSLHSIAQNKGIRPFPSEETTENDDDVYRSLEELADEHDLGEDIYDCVPCEDGGDDIYEDIIKVEVQQPMKMGMTEDDKRNCCLLEIQETEAKYYRTLEDIEKNYMSPLRLVLSPADMAAVFINLEDLIKVHHSFLRAIDVSVMVGGSTLAKVFLDFKERLLIYGEYCSHMEHAQNTLNQLLASREDFRQKVEECTLKVQDGKFKLQDLLVVPMQRVLKYHLLLKELLSHSAERPERQQLKEALEAMQDLAMYINEVKRDKETLRKISEFQSSIENLQVKLEEFGRPKIDGELKVRSIVNHTKQDRYLFLFDKVVIVCKRKGYSYELKEIIELLFHKMTDDPMNNKDVKKWSYGFYLIHLQGKQGFQFFCKTEDMKRKWMEQFEMAMSNIKPDKANANHHSFQMYTFDKTTNCKACKMFLRGTFYQGYMCTKCGVGAHKECLEVIPPCKFTSPADLDASGAGPGPKMVAMQNYHGNPAPPGKPVLTFQTGDVLELLRGDPESPWWEGRLVQTRKSGYFPSSSVKPCPVDGRPPISRPPSREIDYTAYPWFAGNMERQQTDNLLKSHASGTYLIRERPAEAERFAISIKFNDEVKHIKVVEKDNWIHITEAKKFDSLLELVEYYQCHSLKESFKQLDTTLKYPYKSRERSASRASSRSPVFTPRVIGTAVARYNFAARDMRELSLREGDVVRIYSRIGGDQGWWKGETNGRIGWFPSTYVEEEGIQ

SEQ ID NO: 137792 - DNA, 2520 bp, Artificial Sequence
  derived and/or modified sequence
atggagcagtggagacagtgcggcagatggctgatcgactgcaaggtgctgccccccaaccacagagtggtgtggcccagcgccgtggtgttcgacctggcccaggccctgagagacggcgtgctgctgtgccagctgctgcacaacctgagccccggcagcatcgacctgaaggacatcaacttcagaccccagatgagccagttcctgtgcctgaagaacatcagaaccttcctgaaggtgtgccacgacaagttcggcctgagaaacagcgagctgttcgaccccttcgacctgttcgacgtgagagacttcggcaaggtgatcagcgccgtgagcagactgagcctgcacagcatcgcccagaacaagggcatcagacccttccccagcgaggagaccaccgagaacgacgacgacgtgtacagaagcctggaggagctggccgacgagcacgacctgggcgaggacatctacgactgcgtgccctgcgaggacggcggcgacgacatctacgaggacatcatcaaggtggaggtgcagcagcccatgaagatgggcatgaccgaggacgacaagagaaactgctgcctgctggagatccaggagaccgaggccaagtactacagaaccctggaggacatcgagaagaactacatgagccccctgagactggtgctgagccccgccgacatggccgccgtgttcatcaacctggaggacctgatcaaggtgcaccacagcttcctgagagccatcgacgtgagcgtgatggtgggcggcagcaccctggccaaggtgttcctggacttcaaggagagactgctgatctacggcgagtactgcagccacatggagcacgcccagaacaccctgaaccagctgctggccagcagagaggacttcagacagaaggtggaggagtgcaccctgaaggtgcaggacggcaagttcaagctgcaggacctgctggtggtgcccatgcagagagtgctgaagtaccacctgctgctgaaggagctgctgagccacagcgccgagagacccgagagacagcagctgaaggaggccctggaggccatgcaggacctggccatgtacatcaacgaggtgaagagagacaaggagaccctgagaaagatcagcgagttccagagcagcatcgagaacctgcaggtgaagctggaggagttcggcagacccaagatcgacggcgagctgaaggtgagaagcatcgtgaaccacaccaagcaggacagatacctgttcctgttcgacaaggtggtgatcgtgtgcaagagaaagggctacagctacgagctgaaggagatcatcgagctgctgttccacaagatgaccgacgaccccatgaacaacaaggacgtgaagaagtggagctacggcttctacctgatccacctgcagggcaagcagggcttccagttcttctgcaagaccgaggacatgaagagaaagtggatggagcagttcgagatggccatgagcaacatcaagcccgacaaggccaacgccaaccaccacagcttccagatgtacaccttcgacaagaccaccaactgcaaggcctgcaagatgttcctgagaggcaccttctaccagggctacatgtgcaccaagtgcggcgtgggcgcccacaaggagtgcctggaggtgatccccccctgcaagttcaccagccccgccgacctggacgccagcggcgccggccccggccccaagatggtggccatgcagaactaccacggcaaccccgccccccccggcaagcccgtgctgaccttccagaccggcgacgtgctggagctgctgagaggcgaccccgagagcccctggtgggagggcagactggtgcagaccagaaagagcggctacttccccagcagcagcgtgaagccctgccccgtggacggcagaccccccatcagcagaccccccagcagagagatcgactacaccgcctacccctggttcgccggcaacatggagagacagcagaccgacaacctgctgaagagccacgccagcggcacctacctgatcagagagagacccgccgaggccgagagattcgccatcagcatcaagttcaacgacgaggtgaagcacatcaaggtggtggagaaggacaactggatccacatcaccgaggccaagaagttcgacagcctgctggagctggtggagtactaccagtgccacagcctgaaggagagcttcaagcagctggacaccaccctgaagtacccctacaagagcagagagagaagcgccagcagagccagcagcagaagccccgtgttcacccccagagtgatcggcaccgccgtggccagatacaacttcgccgccagagacatgagagagctgagcctgagagagggcgacgtggtgagaatctacagcagaatcggcggcgaccagggctggtggaagggcgagaccaacggcagaatcggctggttccccagcacctacgtggaggaggagggcatccagtag

SEQ ID NO: 137793 - DNA, 2520 bp, Artificial Sequence
  derived and/or modified sequence
atggaacagtggaggcagtgcggccggtggctgatagattgtaaagtcctgccaccaaaccatcgagtggtttggccctctgccgtcgtgtttgacctggctcaggcattgcgtgatggtgtgctcttgtgccagctgcttcacaatctgtccccgggctccattgatctgaaggacatcaattttcggccgcaaatgtctcagtttttgtgccttaagaacataaggacctttttgaaggtatgtcacgataagttcggcctgagaaattcagagttgtttgatcccttcgatttattcgatgtgagagatttcgggaaggtgatctccgccgtttcccgcctctccctgcactcaattgcgcaaaataaggggatccgcccattcccctctgaagaaacaactgagaacgatgatgacgtttaccgctctctggaggagttggctgacgaacacgatttgggggaggatatatacgattgcgtaccttgcgaggacgggggggacgacatctacgaggacataatcaaggtagaggttcagcagcctatgaagatgggcatgacagaagatgacaagcgcaattgctgtctgctggagattcaggaaacagaggccaaatactacaggaccctcgaagacattgaaaagaactatatgagcccgcttagactggttttgtcacccgcagacatggctgccgtgttcatcaacctggaggatctgatcaaggttcaccactctttcttaagggcaattgatgtctccgtgatggttgggggcagtactctggcaaaggtgtttttggacttcaaggagcgccttctcatttacggtgagtactgttctcatatggagcacgctcagaatactctaaatcagctgttggcatcacgtgaggacttccgccaaaaggtcgaagagtgtaccttaaaggtccaagatggcaagttcaagctccaagacttactggtcgtccctatgcagcgagtgcttaaatatcacctgctgctaaaagagctgctcagtcactctgctgaacgccctgagaggcagcaactcaaggaagcattagaggcaatgcaagacctggctatgtacattaacgaggtgaaacgcgacaaggaaacgctcagaaaaatctcagaatttcagagctctatcgagaatctacaggtgaagcttgaggaatttggccgtccaaagattgatggggagttgaaggtgcgaagtatcgttaatcacaccaaacaggacagatacttattcctgtttgacaaagtagtgattgtttgcaagaggaaggggtatagttacgaactcaaggaaatcatagagctgcttttccataagatgacggatgaccctatgaataacaaggatgtcaaaaagtggtcctacgggttctatctgatccacctccaaggcaaacaagggtttcagttcttttgtaaaacagaagacatgaagagaaagtggatggaacagttcgaaatggctatgtctaatattaaacctgacaaagctaatgctaatcaccacagcttccaaatgtacaccttcgacaaaactactaattgcaaagcatgcaagatgtttctgcggggaactttctaccaagggtacatgtgcacaaaatgcggggtgggagctcataaggagtgtttagaagtgatacctccttgtaagttcacttcccctgccgatttggatgctagtggcgccggccccggaccaaagatggtcgcaatgcaaaattaccatggaaacccggccccccctggcaagcctgtactaacctttcagacaggggacgtcttggagcttctccggggtgatcctgagagcccttggtgggagggccgattggtccagactagaaagagcggttactttccatcatcatcagtgaaaccctgccccgtcgacggaaggccgcctatcagcagacctccgagccgggagattgactacactgcttacccgtggttcgcaggaaatatggagcgtcagcagacagacaatctactcaagtctcacgcttcaggcacatacttaatcagggagcgccccgccgaggcagaacgctttgctatctctatcaaattcaacgacgaggtgaagcacattaaagtggtggagaaagacaactggatccacattaccgaagctaaaaagttcgactctcttctagaactcgtcgaatactatcaatgtcattcgctgaaggagagcttcaagcaacttgacaccacattaaaatatccctacaagtccagggagagatccgcttcgcgcgccagctccagatcacccgtgttcacaccacgggtgattggaaccgctgtggctaggtataactttgccgctagagatatgagggagctaagccttagagaaggggacgtggttcgcatttattcacggattggtggggaccagggctggtggaagggggagacgaatgggcgaatcggatggttcccatccacatatgttgaggaagagggcattcagtag

SEQ ID NO: 137794 - DNA, 2520 bp, Artificial Sequence
  derived and/or modified sequence
atggagcagtggaggcagtgtggccgctggctgattgactgcaaggtgctgccccccaaccaccgggtggtgtggcccagcgctgtggtgtttgacctggcccaggccctgagagatggagtgctgctgtgccagctgctgcacaacctgagccctggcagcattgacctgaaggacatcaacttccggccccagatgagccagttcctgtgcctgaagaacatccgcaccttcctgaaggtgtgccacgacaagtttggcctgagaaattctgagctgtttgacccctttgacctgtttgatgtgcgggactttgggaaggtgatctctgctgtgtcccggctgagcctgcacagcatcgcccagaacaagggcatccggcccttccccagcgaggagaccacagaaaatgatgatgatgtgtaccgcagcctggaggagctggctgatgaacatgacctgggggaggacatctatgactgtgtgccctgtgaagatggaggagatgacatctatgaggacatcatcaaggtggaggtgcagcagcccatgaagatgggcatgacagaagatgacaagaggaactgctgcctgctggagatccaggagacagaggccaagtactaccgcaccctggaggacatcgagaagaactacatgagccccctgcggctggtgctgagccctgctgacatggctgctgtgttcatcaacctggaggacctgatcaaggtgcaccacagcttcctgcgggccattgatgtgtctgtgatggtgggcggcagcaccctggccaaggtgttcctggacttcaaggagcggctgctgatctacggggagtactgcagccacatggagcacgcccagaacaccctgaaccagctgctggccagccgggaggacttccggcagaaggtggaggagtgcaccctgaaggtgcaggacggcaagttcaagctgcaggacctgctggtggtgcccatgcagagggtgctgaagtaccacctgctgctgaaggagctgctgagccacagcgctgagaggcctgagcggcagcagctgaaggaggccctggaggccatgcaggacctggccatgtacatcaatgaggtgaagagggacaaggagaccctgaggaagatcagcgagttccagagcagcattgagaacctgcaggtgaagctggaggagtttggccggcccaagattgatggagagctgaaggtgcgcagcatcgtgaaccacaccaagcaggaccgctacctgttcctgtttgacaaggtggtgattgtgtgcaagaggaagggctacagctatgagctgaaggagatcatcgagctgctcttccacaagatgacagatgaccccatgaacaacaaggatgtgaagaagtggagctatggcttctacctgatccacctgcagggcaagcagggcttccagttcttctgcaagacagaggacatgaagaggaagtggatggagcagtttgagatggccatgagcaacatcaagccagacaaggccaatgccaaccaccacagcttccagatgtacacctttgacaagaccaccaactgcaaggcctgcaagatgttcctgcggggcaccttctaccagggctacatgtgcaccaagtgtggggtgggcgcccacaaggagtgcctggaggtgatccccccctgcaagttcaccagccctgctgacctggatgccagcggggccggccctggccccaagatggtggccatgcagaactaccacggcaacccagcccctcctgggaagcctgtgctgaccttccagacaggagatgtgctggagctgctgcggggggaccctgagagcccctggtgggagggccgcctggtgcagaccaggaagagcggctacttccccagcagctctgtgaagccctgccctgtggatggccggccccccatcagcaggcctcccagccgggagattgactacacagcctacccctggtttgctggcaacatggagcggcagcagacagacaacctgctgaagagccacgccagcggcacctacctgatccgggagaggcctgctgaggccgagagatttgccatcagcatcaagttcaatgatgaggtgaagcacatcaaggtggtggagaaggacaactggatccacatcacagaggccaagaagtttgacagcctgctggagctggtggagtactaccagtgccacagcctgaaggagagcttcaagcagctggacaccaccctgaagtacccctacaagagccgggagaggtctgccagccgggccagcagccgcagccctgtgttcaccccccgggtgattggaacagctgtggcccgctacaactttgctgcccgggacatgagggagctgagcctgcgggagggagatgtggtgcgcatctacagccgcatcggcggggaccagggctggtggaagggggagaccaacggcagaattggctggttccccagcacctacgtggaggaggagggcatccagtag

SEQ ID NO: 137795 - DNA, 2520 bp, Artificial Sequence
  derived and/or modified sequence
atggagcagtggcggcagtgcggccggtggctgatcgactgcaaggtcttgccacccaatcatagagtcgtatggccatccgccgtggtcttcgacctggcccaggccctgcgggatggtgttctgctgtgccagcttctgcacaatctgtcccctggctctatcgatttgaaggatatcaattttcgccctcaaatgagtcagttcctgtgcctaaagaacatccgtactttcctgaaagtgtgtcatgacaagtttggcctccgcaattcagagctgttcgatcctttcgacttgttcgacgtgagagactttggtaaagttatttcagcagtatcccgcttaagtctacacagtatcgcccagaataagggcataaggccatttccttctgaagaaacgacagagaacgacgacgacgtttaccgatcactggaggagcttgctgatgagcatgacttgggcgaagacatctacgattgcgttccctgtgaggacgggggcgatgatatatatgaagacataatcaaggttgaggtgcaacagccaatgaagatgggaatgactgaggacgataagcggaactgttgcttacttgagattcaggagactgaggccaagtattacagaaccctggaagatatcgagaagaactatatgtcacctcttagattagtgttatcaccagctgatatggccgctgtctttatcaacctggaggatctaatcaaggtgcaccacagtttccttagagccattgatgtctctgtgatggtggggggcagtacattggccaaggtgttcttggattttaaagagaggctcttgatctatggcgagtattgctcgcatatggagcatgcacaaaacacattaaaccagctcctggctagccgagaggattttaggcaaaaagtcgaagaatgcactttgaaggtgcaagatgggaaattcaaactacaggatctgttagtcgtcccaatgcagcgggtcctgaagtaccatttgctgttgaaggaacttctatcccattcagcagagaggcccgaacgacagcaactaaaagaggcattggaagctatgcaggatctcgctatgtatattaacgaggttaagagggacaaagaaaccctcagaaaaattagcgaattccaatcttccattgaaaatcttcaggtgaagctggaagaattcggtcgccctaagattgatggagaactcaaggtgaggtccattgtaaatcacacaaagcaggatagatacctgttcttgttcgataaggtcgttattgtgtgtaagcggaagggttattcatacgaactaaaagagatcatagagctgctgttccacaagatgaccgacgatcccatgaacaacaaggatgtgaagaaatggagttatggcttctacctgatccacttacaaggcaagcagggcttccagtttttctgcaagaccgaagatatgaagcggaagtggatggagcaatttgagatggccatgtcaaacatcaagcccgataaagctaacgctaaccatcactcgtttcagatgtacactttcgacaaaacaactaattgtaaggcttgcaagatgtttctgagaggtaccttttatcagggctacatgtgcaccaaatgcggagtcggcgcacacaaggaatgcctggaggtgatcccgccgtgcaaatttacctcccctgctgacctggacgcttctggtgcagggcccggccctaaaatggtggctatgcagaattatcatggaaacccggcccccccagggaagcctgtgcttaccttccagaccggagatgtactagagttactaagaggcgaccctgagagcccttggtgggagggacgcctcgtccagacaaggaaaagcggctattttccctcctcaagcgtaaagccttgtcccgtggacggacgaccccccatctccaggccccctagcagagaaatcgattacaccgcctatccgtggttcgctggcaacatggagaggcaacaaacggacaacttactgaaaagccatgccagcggtacttatctcatcagggagcgtcccgcagaggccgagcgcttcgccatcagcatcaaattcaatgacgaggtgaagcacattaaggtcgtagagaaggacaactggatccacattactgaggcaaaaaaattcgactcactgctcgagctggtcgagtactaccagtgtcactccctgaaggagagctttaaacagttggatactactctgaagtatccttacaaaagtagggagcggtccgcctcccgcgcttccagcagatcccccgtgttcacacccagggtgatcgggacggctgtggcgaggtataacttcgctgctagggatatgcgagaactatcgctacgggagggggatgtcgtgagaatctactccagaatcggtggtgatcagggctggtggaagggcgagaccaacgggagaatcggatggtttccaagtacttatgtcgaggaagagggcatccagtag

SEQ ID NO: 137796 - DNA, 2520 bp, Artificial Sequence
  derived and/or modified sequence
atggaacagtggcgacaatgtgggaggtggctgatcgactgtaaagtgctcccacctaatcatagagttgtgtggccttccgctgtagtgttcgacttagctcaggccctacgggacggcgtgttactatgccaactcctgcacaacctctcccctggttccatagacctgaaagacattaacttcagacctcagatgtctcaattcctgtgcttgaaaaacatccgaacttttctgaaggtgtgccatgataaatttggattgcggaacagcgagctgtttgatccgttcgacctctttgatgtcagggactttgggaaagtgatatcagcggtgagtcggctgtcactccatagtatcgcacaaaacaaaggaatccggccatttccttctgaagagacgacagaaaatgacgacgatgtatatagatctcttgaggagctggccgacgagcacgatctaggagaagatatctacgactgtgtcccctgtgaagacggcggtgacgacatctacgaggatattattaaggtcgaagttcagcaacccatgaaaatgggcatgaccgaggacgataagaggaattgttgtctcctggagattcaggagaccgaggccaaatattatcgcaccctggaggacatcgagaagaactatatgtcccccctaaggctggtactgtcccctgccgacatggcagccgtattcattaatttggaggacctgattaaggtccatcactccttcctgagagctattgacgtttctgtcatggtgggaggcagcacgttggcgaaggtgtttttggactttaaagaacgcctgctcatctacggagagtattgttctcatatggagcatgcccagaatactctgaatcagctcttggcgtcccgagaggactttcgccagaaggtggaggaatgcaccctgaaagtccaagacggaaagttcaaactgcaagacctcctcgttgtgccaatgcagcgcgtgctgaagtaccacctcctgctaaaggaacttctctcgcatagcgcagaacgccctgaacgtcagcaactgaaagaggctttggaagcgatgcaggaccttgctatgtatattaacgaagtcaaaagagataaagagaccctgaggaaaatcagcgaatttcagtcttcaatcgagaatcttcaagtcaagcttgaggagtttggcaggcctaagattgacggcgaattgaaggtgcgtagcatcgtgaaccataccaagcaggatagatatctgtttctattcgacaaagtggtgattgtgtgcaaaaggaaaggatactcctacgagctgaaagagatcatagagctccttttccataaaatgacggacgatccaatgaataataaagacgttaagaagtggtcatacggcttctaccttatccatctccagggcaaacagggttttcagtttttttgcaaaacagaagatatgaagcgaaaatggatggaacaattcgagatggcgatgagcaacatcaaacccgacaaggcgaacgctaaccatcactcttttcagatgtatacctttgataaaacaacaaattgcaaggcctgtaaaatgtttctcagaggtaccttttatcagggctacatgtgcaccaagtgcggagtgggagcccataaggaatgccttgaggtcattcccccatgtaagttcacatcccccgctgatctggatgcatcgggggctggccctggtccaaagatggtcgcaatgcagaattaccacggtaaccctgcaccgcctggaaagccggttctgaccttccagaccggcgatgtgctggagttgcttcggggagatccagagagtccttggtgggaggggcgactggttcagacacggaaaagcggctactttccctccagctcagtcaaaccttgcccagtcgatggacgcccacctatttctcgtcctccttctcgcgagattgattatacagcatatccctggttcgcgggtaatatggagaggcagcagaccgataatctgctgaagtcacatgccagcgggacctatttgatccgagagcgtcctgctgaagccgagcgttttgccatctccatcaagtttaacgacgaggtcaagcatattaaagtagtagaaaaagacaactggattcacattacagaagccaaaaagttcgacagcttgctcgagctggtggaatactatcagtgtcatagcttgaaagagagtttcaaacagttagacaccaccctcaagtacccttataaatccagggagaggagcgcgtctcgggcatcaagcaggtcaccggtgttcacaccccgtgtaatcggcaccgctgtcgccagatataatttcgcggcacgggacatgagggagctgagtcttagggaaggagacgtcgtgaggatctactcacggatcgggggagatcagggctggtggaaaggcgaaacaaatggacgcatcgggtggtttccgagtacatacgtggaggaagaagggattcagtag

SEQ ID NO: 137797 - DNA, 4691 bp, Artificial Sequence
  derived and/or modified sequence
gccatggagcagtggcggcagtgcggccgctggctcatcgattgcaaggtcctgccgcccaaccaccgggtggtgtggccctcggccgtggtcttcgacctggcgcaggcgctgcgcgacggggtccttctgtgccagctgctgcacaacctctcccccggctccatcgacctcaaggacatcaacttccggccgcagatgtcccagtttctgtgtttgaagaacatacgcaccttcctgaaagtctgccacgataaatttggattaaggaacagcgagctgtttgacccctttgacctcttcgatgtgcgagactttggaaaggtcatctccgcggtgtcgaggctctccctgcacagcatcgcgcagaacaaagggatcaggccttttccctcagaggagaccacagagaatgacgatgacgtctaccgcagcctggaggagctggccgacgagcatgacctgggggaggacatctacgactgcgtcccgtgtgaggatggaggggacgacatctacgaggacatcatcaaggtggaggtgcagcagcccatgaaaatgggcatgactgaagatgacaagaggaactgctgcctgctggagatccaggagaccgaggccaagtactaccgcaccctggaggacattgagaagaactacatgagccccctgcggctggtgctgagcccggcggacatggcagctgtcttcattaacctggaggacctgatcaaggtgcatcacagcttcctgagggccatcgacgtgtccgtgatggtggggggcagcacgctggccaaggtcttcctcgatttcaaggaaaggcttctgatctacggggagtactgcagccacatggagcacgcccagaacacactgaaccagctcctggccagccgggaggacttcaggcagaaagtcgaggagtgcacactgaaggtccaggatggaaaatttaagctgcaagacctgctggtggtccccatgcagagggtgctcaaataccacctgctcttgaaggagcttctgagccattctgcggaacggcctgagaggcagcagctcaaagaagcactggaagccatgcaggacttggcgatgtacatcaatgaagttaaacgggacaaggagaccttgaggaaaatcagcgaatttcagagttctatagaaaatttgcaagtgaaactggaggaatttggaagaccaaagattgacggggaactgaaagtccggtccatagtcaaccacaccaagcaggacaggtacttgttcctgtttgacaaggtggtcatcgtctgcaagcggaagggctacagctacgagctcaaggagatcatcgagctgctgttccacaagatgaccgacgaccccatgaacaacaaggacgtcaagaagtggtcctacggcttctacctaattcaccttcaaggaaagcagggcttccagtttttctgcaaaacagaagatatgaagaggaagtggatggagcagtttgagatggccatgtcaaacatcaagccagacaaagccaatgccaaccaccacagtttccagatgtacacgtttgacaagaccaccaactgcaaagcctgcaaaatgttcctcaggggcaccttctaccagggatacatgtgtaccaagtgtggcgtcggggcacacaaggagtgcctggaagtgatacctccctgcaagttcacttctcctgcagatctggacgcctccggagcgggaccaggtcccaagatggtggccatgcagaattaccatggcaacccagcccctcccgggaagcctgtgctgaccttccagacgggcgacgtgcttgagctgctgaggggcgaccctgagtctccgtggtgggagggtcgtctggtacaaaccaggaagtcagggtatttccccagctcatctgtgaagccctgccctgtggatggaaggccgcccatcagccggccgccatcccgggagatcgactacactgcatacccctggtttgcaggtaacatggagaggcagcagacggacaacctgctcaagtcccacgccagcgggacctacctgatcagggagcggcctgccgaggctgagcgctttgcaataagcatcaagttcaatgatgaggtgaagcacatcaaggtggtggagaaggacaactggatccacatcacagaggccaagaaattcgacagcctcctggagttggtggagtactaccagtgccactcactgaaggagagcttcaagcagctggacaccacactcaagtacccctacaagtcccgggaacgttcggcctccagggcctccagccggtccccagtgttcacgccccgcgtcatcggcacagctgtggccaggtataactttgccgcccgagatatgagggagctttcgctgcgggagggtgacgtggtgaggatctacagccgcatcggcggagaccagggctggtggaagggcgagaccaacggacggattggctggtttccttcaacgtacgtagaagaggagggcatccagtgacggcaggaacgtggacaagactcgcagattttcttgggagagtcactccagccctgaagtctgtctctagctcctctgtgactcagaggggaaataccaacctcccagtcttccactgcccacagggatagggagggtgttgagaatcctaaactcgaaccgtttcactgtcagcctgccctcggcgacccatcactgggtatgctattgtacatagaggaaacctgggctagccccacccagagcgcagaggagggggcaccgacagcgctgcgagccaggctctgggtagtggctgaggccagaggcccatcgcctgcccctgtccaactgagatggccttcaggagcctaggtttgaacagcagatgctgtcccaggaagggctagggacatcggaggggacctgcccccacaccctctgctcagcccctggactcagccttgcctgtcttttcctgctgctcccagggggaggtgtcagacctcgggaggcagacgggaccagagccaggctgttcactgtgggcccacttgccccactgtgctagggcgcgggaggagagagcactgtggtcgccctctgcagccactctggctcccaagacttccctgactcccccactcccctccttgccaggggcacacccggaccccacacggcaggcccctctcttgggaggggcctttggaatgatgaaattccaaccctgctgcccggtcagcggtaccgtttcctgccctctctctgagaggccctttctggagtcctgggaaggtgtctgcctggccgcgctgccagatcagtacatcttttgtaaaaaccctgaaatgggcagggaagaaaacagggatttcccctctctagatccctgccaggtccctctccaggaggcccctctgctctcctgaagggtggtccctgagggtctgcccagccttggcacgagaggttggttccagcccctggcagggcttccttccaagggcccctgcagcctacaaactgggcctcgggcgactcaaaataagtgctcttgggggtggctctaccccattacctcccccagccacaactcctggccttcgacttctggctgggttagccagaccctggtttctctaccctgatgttgcatgagacctggtaacagtgtctccctcccagctccttgccaaagcctctgttgagacctgggcttcttgtagccccttctccctctggccagctgcacagcctgtgggaggtgcccggcccaggctgggtgtgggggaagctggtccctgctgtgggtggcgctggggacctaggggctccttctgaggttggccttgtggcctctgggctgtatgcctctggggtgtagggaagaggcgggaggagtcatggggatggggagcggcagggggagagaggggccctcgacaaaggcttgggaaatgaggggaggtggaggcagggcaggggaagcgaagagtcagccttggagagagcaccctggggcctccgtgtcggggtacacccagcactttgcgacctgcggcccagcaggcgcggaggatggcggggaggaagccagcagcccctgtgtttactgtcgtcagaaaggtcttgtgttttggttttggggtttttgttttgtttgtgttttgtttggcttgtttgttttttaaggggaaaaaagtttgtaattatttcatccaaatctcccgttatatatctgtgaataataagagattttataatagcaagaaaatgatgtatattttagtttgttgacaaataagtcatcatgatcacgaaggacactgagaaaaaataatttagaaccctggtttttgtgaatttttttgttttgtgtttctttgttttgagatttgtgtttggtttggtttttgcactgcactaaggcaggagggttggagggctgggtgcagcctgggagtccgatggttttcagcaggagacggggtgtcccctgcagggggctaaactgcaggggcctgagattagctgtgaacatgtgggagcccgatgcatgtgggtcagggatctgggggcccccccagctggcgggaaccccaaatggacacaaactgtacatttgccaatgggtttttttcagaccatggtttttacttgcaaataaacctgagttcttttctgca

SEQ ID NO: 137798 - DNA, 594 bp, Artificial Sequence
  derived and/or modified sequence
atggccgccgtgaaggacagctgcggcaagggcgagatggccaccggcaacggcagaagactgcacctgggcatccccgaggccgtgttcgtggaggacgtggacagcttcatgaagcagcccggcaacgagaccgccgacaccgtgctgaagaagctggacgagcagtaccagaagtacaagttcatggagctgaacctggcccagaagaagagaagactgaagggccagatccccgagatcaagcagaccctggagatcctgaagtacatgcagaagaagaaggagagcaccaacagcatggagaccagattcctgctggccgacaacctgtactgcaaggccagcgtgccccccaccgacaagatgtgcctgtggctgggcgccaacgtgatgctggagtacgacatcgacgaggcccaggccctgctggagaagaacctgagcaccgccaccaagaacctggacagcctggaggaggacctggacttcctgagagaccagttcaccaccaccgaggtgaacatggccagagtgtacaactgggacgtgaagagaagaaacaaggacgacagcaccaagaacaaggcctag

SEQ ID NO: 137799 - DNA, 594 bp, Artificial Sequence
  derived and/or modified sequence
atggcagccgtcaaggacagctgcgggaagggcgagatggcaactggaaacggcaggcgcctccacttaggaatccccgaggctgtgtttgttgaagatgtagactccttcatgaagcagccaggtaacgaaaccgccgacactgtcttaaagaaattagacgagcagtatcagaagtacaaatttatggagctgaacctggctcagaagaagagaagacttaaggggcagattcctgagattaagcagacactggagatcctgaaatacatgcagaagaagaaagagtctacaaatagtatggaaacgaggtttttgctcgccgacaacttgtattgcaaagcttcggtccctccaacagacaagatgtgtctgtggttgggcgcgaatgtgatgttggagtacgatatcgacgaggcccaggctttgctcgaaaagaacctctccacggccactaagaatctggacagcctagaagaagatctggactttctgcgggatcagttcaccactactgaggtcaatatggccagggtctataattgggacgtcaaacggcggaacaaggatgactccacgaagaacaaggcgtag

SEQ ID NO: 137800 - DNA, 594 bp, Artificial Sequence
  derived and/or modified sequence
atggctgctgtgaaggacagctgtgggaagggggagatggccactggaaatggaagaaggctgcacctgggcatccctgaggccgtgtttgtggaggatgtggacagcttcatgaagcagcctggaaatgaaacagctgacacagtgctgaagaagctggatgagcagtaccagaagtacaagttcatggagctgaacctggcccagaagaagaggcggctgaagggccagatccctgagatcaagcagaccctggagatcctgaagtacatgcagaagaagaaggagagcaccaacagcatggagacccgcttcctgctggccgacaacctgtactgcaaggcctctgtgcccccaacagacaagatgtgcctgtggctgggcgccaacgtgatgctggagtatgacattgatgaggcccaggccctgctggagaagaacctgagcacagccaccaagaacctggacagcctggaggaggacctggacttcctgcgggaccagttcaccaccacagaggtgaacatggcccgggtgtacaactgggatgtgaagagaagaaacaaggatgacagcaccaagaacaaggcctag

SEQ ID NO: 137801 - DNA, 594 bp, Artificial Sequence
  derived and/or modified sequence
atggccgccgtgaaggacagctgcggcaagggcgagatggccaccggtaatgggcgcagactccatctgggcatccccgaagctgtattcgtagaagacgttgatagttttatgaaacagcccggcaacgaaactgccgacaccgtcttgaaaaagctcgatgagcagtaccagaagtataagtttatggagctgaatttggctcagaaaaaacgacgcttgaaaggacagatccccgagatcaaacagaccttggaaatcctcaagtacatgcagaagaaaaaggagtccaccaacagcatggagacacgctttttgctggctgataacctttattgtaaggctagtgtcccgcccaccgataaaatgtgcttgtggctcggggcaaatgtgatgctggaatacgacattgacgaagctcaggctctgctggaaaagaacctaagcacagccaccaagaatctcgatagcctggaagaagacttggactttcttcgcgatcagttcacaactacagaagtgaacatggcaagggtatacaactgggatgtgaagcgcaggaacaaagatgacagcactaaaaacaaagcatag

SEQ ID NO: 137802 - DNA, 594 bp, Artificial Sequence
  derived and/or modified sequence
atggcggcagtgaaggatagttgtggcaaaggcgaaatggcaacaggcaatggtcggcgattgcatctgggtatccctgaagccgtctttgtcgaggatgttgattctttcatgaagcaaccagggaatgaaaccgcagacaccgtgttaaaaaagctggatgagcagtaccagaagtataaattcatggagctaaacctggctcagaagaagcgtcggctcaagggtcagatacccgaaattaagcagactctcgagatactgaaatatatgcaaaagaaaaaggaaagtacgaattcaatggaaactcggtttctgcttgcggacaatttgtactgtaaggcttcagtacctcctacagataagatgtgcctgtggctaggtgctaacgtaatgttggaatacgacatcgacgaagcccaggccctgctcgagaaaaacctctctaccgctacaaaaaatttagattctctagaggaagacctggactttttgagagatcagtttactacaaccgaggtgaacatggccagagtttacaactgggatgtgaagcgcaggaacaaagatgattctactaagaataaagcgtag

SEQ ID NO: 137803 - protein, 1066 aa, Artificial Sequence
  derived and/or modified sequence
MPVFHTRTIESILEPVAQQISHLVIMHEEGEVDGKAIPDLTAPVAAVQAAVSNLVRVGKETVQTTEDQILKRDMPPAFIKVENACTKLVQAAQMLQSDPYSVPARDYLIDGSRGILSGTSDLLLTFDEAEVRKIIRVCKGILEYLTVAEVVETMEDLVTYTKNLGPGMTKMAKMIDERQQELTHQEHRVMLVNSMNTVKELLPVLISAMKIFVTTKNSKNQGIEEALKNRNFTVEKMSAEINEIIRVLQLTSWDEDAWASKDTEAMKRALASIDSKLNQAKGWLRDPSASPGDAGEQAIRQILDEAGKVGELCAGKERREILGTCKMLGQMTDQVADLRARGQGSSPVAMQKAQQVSQGLDVLTAKVENAARKLEAMTNSKQSIAKKIDAAQNWLADPNGGPEGEEQIRGALAEARKIAELCDDPKERDDILRSLGEISALTSKLADLRRQGKGDSPEARALAKQVATALQNLQTKTNRAVANSRPAKAAVHLEGKIEQAQRWIDNPTVDDRGVGQAAIRGLVAEGHRLANVMMGPYRQDLLAKCDRVDQLTAQLADLAARGEGESPQARALASQLQDSLKDLKARMQEAMTQEVSDVFSDTTTPIKLLAVAATAPPDAPNREEVFDERAANFENHSGKLGATAEKAAAVGTANKSTVEGIQASVKTARELTPQVVSAARILLRNPGNQAAYEHFETMKNQWIDNVEKMTGLVDEAIDTKSLLDASEEAIKKDLDKCKVAMANIQPQMLVAGATSIARRANRILLVAKREVENSEDPKFREAVKAASDELSKTISPMVMDAKAVAGNISDPGLQKSFLDSGYRILGAVAKVREAFQPQEPDFPPPPPDLEQLRLTDELAPPKPPLPEGEVPPPRPPPPEEKDEEFPEQKAGEVINQPMMMAARQLHDEARKWSSKGNDIIAAAKRMALLMAEMSRLVRGGSGTKRALIQCAKDIAKASDEVTRLAKEVAKQCTDKRIRTNLLQVCERIPTISTQLKILSTVKATMLGRTNISDEESEQATEMLVHNAQNLMQSVKETVREAEAASIKIRTDAGFTLRWVRKTPWYQ

SEQ ID NO: 137804 - protein, 1006 aa, Artificial Sequence
  derived and/or modified sequence
MPPAFIKVENACTKLVQAAQMLQSDPYSVPARDYLIDGSRGILSGTSDLLLTFDEAEVRKIIRVCKGILEYLTVAEVVETMEDLVTYTKNLGPGMTKMAKMIDERQQELTHQEHRVMLVNSMNTVKELLPVLISAMKIFVTTKNSKNQGIEEALKNRNFTVEKMSAEINEIIRVLQLTSWDEDAWASKDTEAMKRALASIDSKLNQAKGWLRDPSASPGDAGEQAIRQILDEAGKVGELCAGKERREILGTCKMLGQMTDQVADLRARGQGSSPVAMQKAQQVSQGLDVLTAKVENAARKLEAMTNSKQSIAKKIDAAQNWLADPNGGPEGEEQIRGALAEARKIAELCDDPKERDDILRSLGEISALTSKLADLRRQGKGDSPEARALAKQVATALQNLQTKTNRAVANSRPAKAAVHLEGKIEQAQRWIDNPTVDDRGVGQAAIRGLVAEGHRLANVMMGPYRQDLLAKCDRVDQLTAQLADLAARGEGESPQARALASQLQDSLKDLKARMQEAMTQEVSDVFSDTTTPIKLLAVAATAPPDAPNREEVFDERAANFENHSGKLGATAEKAAAVGTANKSTVEGIQASVKTARELTPQVVSAARILLRNPGNQAAYEHFETMKNQWIDNVEKMTGLVDEAIDTKSLLDASEEAIKKDLDKCKVAMANIQPQMLVAGATSIARRANRILLVAKREVENSEDPKFREAVKAASDELSKTISPMVMDAKAVAGNISDPGLQKSFLDSGYRILGAVAKVREAFQPQEPDFPPPPPDLEQLRLTDELAPPKPPLPEGEVPPPRPPPPEEKDEEFPEQKAGEVINQPMMMAARQLHDEARKWSSKGNDIIAAAKRMALLMAEMSRLVRGGSGTKRALIQCAKDIAKASDEVTRLAKEVAKQCTDKRIRTNLLQVCERIPTISTQLKILSTVKATMLGRTNISDEESEQATEMLVHNAQNLMQSVKETVRELKLLQSKFEQMLDLHCAGLERLPGTSRHLAEPGWHRNLY

SEQ ID NO: 137805 - DNA, 3201 bp, Artificial Sequence
  derived and/or modified sequence
atgcccgtgttccacaccagaaccatcgagagcatcctggagcccgtggcccagcagatcagccacctggtgatcatgcacgaggagggcgaggtggacggcaaggccatccccgacctgaccgcccccgtggccgccgtgcaggccgccgtgagcaacctggtgagagtgggcaaggagaccgtgcagaccaccgaggaccagatcctgaagagagacatgccccccgccttcatcaaggtggagaacgcctgcaccaagctggtgcaggccgcccagatgctgcagagcgacccctacagcgtgcccgccagagactacctgatcgacggcagcagaggcatcctgagcggcaccagcgacctgctgctgaccttcgacgaggccgaggtgagaaagatcatcagagtgtgcaagggcatcctggagtacctgaccgtggccgaggtggtggagaccatggaggacctggtgacctacaccaagaacctgggccccggcatgaccaagatggccaagatgatcgacgagagacagcaggagctgacccaccaggagcacagagtgatgctggtgaacagcatgaacaccgtgaaggagctgctgcccgtgctgatcagcgccatgaagatcttcgtgaccaccaagaacagcaagaaccagggcatcgaggaggccctgaagaacagaaacttcaccgtggagaagatgagcgccgagatcaacgagatcatcagagtgctgcagctgaccagctgggacgaggacgcctgggccagcaaggacaccgaggccatgaagagagccctggccagcatcgacagcaagctgaaccaggccaagggctggctgagagaccccagcgccagccccggcgacgccggcgagcaggccatcagacagatcctggacgaggccggcaaggtgggcgagctgtgcgccggcaaggagagaagagagatcctgggcacctgcaagatgctgggccagatgaccgaccaggtggccgacctgagagccagaggccagggcagcagccccgtggccatgcagaaggcccagcaggtgagccagggcctggacgtgctgaccgccaaggtggagaacgccgccagaaagctggaggccatgaccaacagcaagcagagcatcgccaagaagatcgacgccgcccagaactggctggccgaccccaacggcggccccgagggcgaggagcagatcagaggcgccctggccgaggccagaaagatcgccgagctgtgcgacgaccccaaggagagagacgacatcctgagaagcctgggcgagatcagcgccctgaccagcaagctggccgacctgagaagacagggcaagggcgacagccccgaggccagagccctggccaagcaggtggccaccgccctgcagaacctgcagaccaagaccaacagagccgtggccaacagcagacccgccaaggccgccgtgcacctggagggcaagatcgagcaggcccagagatggatcgacaaccccaccgtggacgacagaggcgtgggccaggccgccatcagaggcctggtggccgagggccacagactggccaacgtgatgatgggcccctacagacaggacctgctggccaagtgcgacagagtggaccagctgaccgcccagctggccgacctggccgccagaggcgagggcgagagcccccaggccagagccctggccagccagctgcaggacagcctgaaggacctgaaggccagaatgcaggaggccatgacccaggaggtgagcgacgtgttcagcgacaccaccacccccatcaagctgctggccgtggccgccaccgccccccccgacgcccccaacagagaggaggtgttcgacgagagagccgccaacttcgagaaccacagcggcaagctgggcgccaccgccgagaaggccgccgccgtgggcaccgccaacaagagcaccgtggagggcatccaggccagcgtgaagaccgccagagagctgaccccccaggtggtgagcgccgccagaatcctgctgagaaaccccggcaaccaggccgcctacgagcacttcgagaccatgaagaaccagtggatcgacaacgtggagaagatgaccggcctggtggacgaggccatcgacaccaagagcctgctggacgccagcgaggaggccatcaagaaggacctggacaagtgcaaggtggccatggccaacatccagccccagatgctggtggccggcgccaccagcatcgccagaagagccaacagaatcctgctggtggccaagagagaggtggagaacagcgaggaccccaagttcagagaggccgtgaaggccgccagcgacgagctgagcaagaccatcagccccatggtgatggacgccaaggccgtggccggcaacatcagcgaccccggcctgcagaagagcttcctggacagcggctacagaatcctgggcgccgtggccaaggtgagagaggccttccagccccaggagcccgacttccccccccccccccccgacctggagcagctgagactgaccgacgagctggccccccccaagccccccctgcccgagggcgaggtgcccccccccagaccccccccccccgaggagaaggacgaggagttccccgagcagaaggccggcgaggtgatcaaccagcccatgatgatggccgccagacagctgcacgacgaggccagaaagtggagcagcaagggcaacgacatcatcgccgccgccaagagaatggccctgctgatggccgagatgagcagactggtgagaggcggcagcggcaccaagagagccctgatccagtgcgccaaggacatcgccaaggccagcgacgaggtgaccagactggccaaggaggtggccaagcagtgcaccgacaagagaatcagaaccaacctgctgcaggtgtgcgagagaatccccaccatcagcacccagctgaagatcctgagcaccgtgaaggccaccatgctgggcagaaccaacatcagcgacgaggagagcgagcaggccaccgagatgctggtgcacaacgcccagaacctgatgcagagcgtgaaggagaccgtgagagaggccgaggccgccagcatcaagatcagaaccgacgccggcttcaccctgagatgggtgagaaagaccccctggtaccagtag

SEQ ID NO: 137806 - DNA, 984 bp, Artificial Sequence
  derived and/or modified sequence
atgcccgtgttccacaccagaaccatcgagagcatcctggagcccgtggcccagcagatcagccacctggtgatcatgcacgaggagggcgaggtggacggcaaggccatccccgacctgaccgcccccgtggccgccgtgcaggccgccgtgagcaacctggtgagagtgggcaaggagaccgtgcagaccaccgaggaccagatcctgaagagagacatgccccccgccttcatcaaggtggagaacgcctgcaccaagctggtgcaggccgcccagatgctgcagagcgacccctacagcgtgcccgccagagactacctgatcgacggcagcagaggcatcctgagcggcaccagcgacctgctgctgaccttcgacgaggccgaggtgcccccccccagaccccccccccccgaggagaaggacgaggagttccccgagcagaaggccggcgaggtgatcaaccagcccatgatgatggccgccagacagctgcacgacgaggccagaaagtggagcagcaagggcaacgacatcatcgccgccgccaagagaatggccctgctgatggccgagatgagcagactggtgagaggcggcagcggcaccaagagagccctgatccagtgcgccaaggacatcgccaaggccagcgacgaggtgaccagactggccaaggaggtggccaagcagtgcaccgacaagagaatcagaaccaacctgctgcaggtgtgcgagagaatccccaccatcagcacccagctgaagatcctgagcaccgtgaaggccaccatgctgggcagaaccaacatcagcgacgaggagagcgagcaggccaccgagatgctggtgcacaacgcccagaacctgatgcagagcgtgaaggagaccgtgagagaggccgaggccgccagcatcaagatcagaaccgacgccggcttcaccctgagatgggtgagaaagaccccctggtaccagtag

SEQ ID NO: 137807 - DNA, 3021 bp, Artificial Sequence
  derived and/or modified sequence
atgccccccgccttcatcaaggtggagaacgcctgcaccaagctggtgcaggccgcccagatgctgcagagcgacccctacagcgtgcccgccagagactacctgatcgacggcagcagaggcatcctgagcggcaccagcgacctgctgctgaccttcgacgaggccgaggtgagaaagatcatcagagtgtgcaagggcatcctggagtacctgaccgtggccgaggtggtggagaccatggaggacctggtgacctacaccaagaacctgggccccggcatgaccaagatggccaagatgatcgacgagagacagcaggagctgacccaccaggagcacagagtgatgctggtgaacagcatgaacaccgtgaaggagctgctgcccgtgctgatcagcgccatgaagatcttcgtgaccaccaagaacagcaagaaccagggcatcgaggaggccctgaagaacagaaacttcaccgtggagaagatgagcgccgagatcaacgagatcatcagagtgctgcagctgaccagctgggacgaggacgcctgggccagcaaggacaccgaggccatgaagagagccctggccagcatcgacagcaagctgaaccaggccaagggctggctgagagaccccagcgccagccccggcgacgccggcgagcaggccatcagacagatcctggacgaggccggcaaggtgggcgagctgtgcgccggcaaggagagaagagagatcctgggcacctgcaagatgctgggccagatgaccgaccaggtggccgacctgagagccagaggccagggcagcagccccgtggccatgcagaaggcccagcaggtgagccagggcctggacgtgctgaccgccaaggtggagaacgccgccagaaagctggaggccatgaccaacagcaagcagagcatcgccaagaagatcgacgccgcccagaactggctggccgaccccaacggcggccccgagggcgaggagcagatcagaggcgccctggccgaggccagaaagatcgccgagctgtgcgacgaccccaaggagagagacgacatcctgagaagcctgggcgagatcagcgccctgaccagcaagctggccgacctgagaagacagggcaagggcgacagccccgaggccagagccctggccaagcaggtggccaccgccctgcagaacctgcagaccaagaccaacagagccgtggccaacagcagacccgccaaggccgccgtgcacctggagggcaagatcgagcaggcccagagatggatcgacaaccccaccgtggacgacagaggcgtgggccaggccgccatcagaggcctggtggccgagggccacagactggccaacgtgatgatgggcccctacagacaggacctgctggccaagtgcgacagagtggaccagctgaccgcccagctggccgacctggccgccagaggcgagggcgagagcccccaggccagagccctggccagccagctgcaggacagcctgaaggacctgaaggccagaatgcaggaggccatgacccaggaggtgagcgacgtgttcagcgacaccaccacccccatcaagctgctggccgtggccgccaccgccccccccgacgcccccaacagagaggaggtgttcgacgagagagccgccaacttcgagaaccacagcggcaagctgggcgccaccgccgagaaggccgccgccgtgggcaccgccaacaagagcaccgtggagggcatccaggccagcgtgaagaccgccagagagctgaccccccaggtggtgagcgccgccagaatcctgctgagaaaccccggcaaccaggccgcctacgagcacttcgagaccatgaagaaccagtggatcgacaacgtggagaagatgaccggcctggtggacgaggccatcgacaccaagagcctgctggacgccagcgaggaggccatcaagaaggacctggacaagtgcaaggtggccatggccaacatccagccccagatgctggtggccggcgccaccagcatcgccagaagagccaacagaatcctgctggtggccaagagagaggtggagaacagcgaggaccccaagttcagagaggccgtgaaggccgccagcgacgagctgagcaagaccatcagccccatggtgatggacgccaaggccgtggccggcaacatcagcgaccccggcctgcagaagagcttcctggacagcggctacagaatcctgggcgccgtggccaaggtgagagaggccttccagccccaggagcccgacttccccccccccccccccgacctggagcagctgagactgaccgacgagctggccccccccaagccccccctgcccgagggcgaggtgcccccccccagaccccccccccccgaggagaaggacgaggagttccccgagcagaaggccggcgaggtgatcaaccagcccatgatgatggccgccagacagctgcacgacgaggccagaaagtggagcagcaagggcaacgacatcatcgccgccgccaagagaatggccctgctgatggccgagatgagcagactggtgagaggcggcagcggcaccaagagagccctgatccagtgcgccaaggacatcgccaaggccagcgacgaggtgaccagactggccaaggaggtggccaagcagtgcaccgacaagagaatcagaaccaacctgctgcaggtgtgcgagagaatccccaccatcagcacccagctgaagatcctgagcaccgtgaaggccaccatgctgggcagaaccaacatcagcgacgaggagagcgagcaggccaccgagatgctggtgcacaacgcccagaacctgatgcagagcgtgaaggagaccgtgagagagctgaagctgctgcagagcaagttcgagcagatgctggacctgcactgcgccggcctggagagactgcccggcaccagcagacacctggccgagcccggctggcacagaaacctgtactag

SEQ ID NO: 137808 - DNA, 3201 bp, Artificial Sequence
  derived and/or modified sequence
atgccagtgtttcacaccagaaccatagaatctatcttggaacccgtggctcagcaaataagtcatcttgttataatgcacgaggagggcgaagtggacggaaaggctattccagatctgactgcaccggtggccgccgttcaggccgccgtgagcaatctcgtcagagttggaaaggagaccgtgcagactacggaagatcaaatcctgaaaagagacatgcctccggctttcatcaaagtagagaacgcctgtaccaagctcgtgcaggccgctcaaatgctacaatcggacccttacagtgttccggcccgcgactacctcatagatggcagcagaggcattttgagcgggacgtccgatttacttttgaccttcgacgaggccgaagtgcggaaaattattagggtctgtaaaggaattcttgaatacttaacagttgccgaagtcgttgagactatggaagatctggtgacatatacgaaaaaccttgggcctggaatgacgaagatggcaaaaatgattgacgagagacagcaggagctgacgcatcaggagcatagagtgatgcttgtgaattctatgaatacagtgaaagagctgctgcctgttttaatttcagccatgaaaatcttcgtcacaaccaaaaactccaagaatcaggggattgaggaggccttgaaaaaccggaactttaccgtcgaaaaaatgagcgctgaaatcaacgaaatcatccgcgtgctccagctgacatcctgggatgaggacgcatgggccagcaaagatacggaggctatgaaaagggccttggctagcattgactctaagttaaaccaagccaagggctggctgagagatccgtccgcttcaccgggtgacgcaggcgagcaggccattcgccagatccttgacgaagccgggaaggtaggcgagctctgcgccgggaaagaaaggagggagatactgggcacgtgtaagatgttagggcaaatgacagatcaggttgccgatctgcgagccagaggtcaggggtcctctccggtggccatgcagaaggcacagcaagtgtcacaggggctcgatgtcctgactgcgaaggttgagaatgcagcgaggaaactggaagccatgaccaatagcaagcagtcaatcgcgaaaaagatcgatgccgcacagaactggttggcagatcctaatgggggccccgagggagaagaacagatcagaggcgccctggctgaagctcgcaagatagcggagctgtgtgacgaccccaaggagcgcgacgatatcctcagaagcttgggggaaatcagtgctttaacctctaagctggccgaccttcggcgtcagggaaagggcgattcacccgaagctagggccctagccaagcaagttgccactgcactgcagaacttgcagactaaaaccaaccgcgcggtcgctaattcccgcccagctaaggctgcggtgcatctggagggaaagatcgagcaagctcagagatggatagacaaccctacagtggatgacagaggcgtgggacaggcggctataagaggactcgtggctgaaggacacaggctggctaacgtgatgatgggtccctacaggcaggacttgttggccaagtgcgaccgggtggatcagttgacagcccagcttgcagacctggctgctagaggagagggagagtcacctcaggcaagagccctggcctcacagctccaggattctcttaaggacctaaaggcccgaatgcaggaagcgatgacccaagaggttagcgacgtgtttagcgatacgaccaccccaataaagttactcgcagtggccgccactgctccccccgacgctcccaacagggaggaggtcttcgatgaaagggccgccaacttcgagaatcatagtgggaagctcggtgctacagcagaaaaggcggcggccgttggaactgccaataaatctaccgtggagggtatacaggcttcagtcaagactgcccgcgagctcaccccacaagtggtcagtgccgccagaattttgctccgtaacccaggcaatcaggcggcatatgaacattttgaaactatgaaaaaccagtggatagacaatgtggaaaaaatgacaggactagttgatgaggcaatcgatactaagagtctgttagacgcgagtgaagaggcaattaaaaaggatctcgataaatgtaaggttgccatggcaaatattcagcctcagatgttggtggctggagctacttctattgctcgaagagcaaaccgcatccttctcgtggccaagcgagaggtggaaaacagcgaggatcccaagttccgggaggccgtaaaggctgccagtgatgaactgagcaagaccatttcaccaatggtgatggatgccaaggccgttgcaggcaacatttcggacccaggactgcagaagtctttcttggacagcggatatcgcatcctgggggccgtcgcaaaagtgcgggaggcattccagccccaggagccggacttcccccccccacctcctgacctagagcagctgaggttgaccgatgaattagcccctcccaagcctccacttccagagggggaagtaccacctccaaggcctcctccccctgaagaaaaagacgaggagttcccagagcaaaaggctggtgaggtcatcaatcagcctatgatgatggcggcacgccaactgcacgacgaagcccgaaaatggagcagtaaaggcaacgatataatcgcggcggctaaacgcatggccctgttgatggcagaaatgagcaggctcgtacgggggggatcaggcacaaaacgggcgctgatccagtgtgcgaaagacattgctaaggcctctgatgaggttaccagattagccaaggaagtggccaagcagtgcaccgataaacggattcgcacaaatctgctgcaggtgtgcgagcgtattccaaccatcagtacgcagttgaagatcctatcaaccgtgaaagccaccatgctgggccgaacaaacattagcgacgaggagagtgaacaagcaactgaaatgctggttcacaatgcacaaaacttgatgcagagtgtgaaagaaacagtcagggaggcagaggcagcaagcattaagatccgcactgatgccggttttacactgcgatgggtccgcaagacaccctggtatcagtag

SEQ ID NO: 137809 - DNA, 984 bp, Artificial Sequence
  derived and/or modified sequence
atgccagtgtttcatacacgcaccatcgagagcatcctagaacccgtggcacagcaaatcagtcacttggtgattatgcatgaggaaggagaggtggatggaaaagcaattcctgacctgacggcccccgtggcagccgtgcaagcggcagtatccaacctcgtgcgagttggcaaggagaccgtacagacgacagaggatcagattctaaagcgtgacatgcctcccgcctttatcaaggtggagaatgcgtgcactaagctggtgcaagcagcacagatgctgcaaagtgatccctatagtgtacccgccagagactacttgatcgatggttctcgcggcattctatccgggacctccgacctgctcttgacctttgacgaggcagaggtgcctccacccaggccacccccgcctgaggagaaagatgaagagttcccagagcaaaaggccggggaagtgatcaatcagcccatgatgatggccgccagacagctacacgatgaggctcggaagtggtcctccaaaggcaacgatataatagctgccgcaaagagaatggccctcctcatggccgagatgagccggctggtgagaggaggctctggtactaaacgggccttaatccaatgtgccaaagatatcgcaaaagcatctgatgaggttactagactggcaaaggaggtggctaagcagtgtaccgacaagaggatcaggaccaatctgctacaagtctgtgagagaattcccaccatctctacccagcttaaaatcctctccactgtaaaggcgacaatgctggggcggacgaatatcagcgatgaggagtctgaacaggcaacagaaatgttagtccacaacgctcagaacttaatgcaaagtgttaaggagaccgttcgcgaggcggaagccgctagcattaaaatccgaacagatgccggttttactttgcggtgggtccgcaaaaccccctggtaccagtag

SEQ ID NO: 137810 - DNA, 3021 bp, Artificial Sequence
  derived and/or modified sequence
atgccaccagccttcatcaaggtcgagaatgcatgcacgaagcttgttcaggccgcccaaatgcttcagagtgacccatacagcgtgccagcccgggactatcttattgacgggtctcgggggattttatccggtacatccgatcttcttctgactttcgacgaggcagaagtgcgaaagataattagagtctgcaaaggcattctggagtatctgacggtagcagaggttgtggagactatggaagacttggttacctacacaaagaatctcgggccgggaatgacaaagatggcaaaaatgattgatgagagacagcaagaactgactcaccaagaacatagggtgatgctggtgaactccatgaataccgtgaaagagctcctgccagtactgatatccgccatgaaaatttttgtgacaaccaaaaattcaaagaatcagggaatcgaagaggcactgaaaaatagaaacttcaccgttgaaaagatgagcgcggagataaacgaaattatcagggtattgcaactgacctcctgggacgaagacgcctgggcgtcaaaagataccgaggcgatgaagagagctctcgcatctattgatagcaaactgaatcaggccaagggctggttgcgggatcctagtgcctctcccggggatgcaggtgaacaggcaatccgccagattttggacgaggcgggaaaggttggggagctgtgcgccggaaaggaaaggcgtgaaattttgggcacatgtaaaatgttggggcagatgaccgatcaggttgcagacctgcgcgcaaggggccaggggtcatctcccgtggcaatgcaaaaggctcagcaggtgtctcagggcttagacgtgctgactgctaaagttgagaacgctgcaaggaaactggaagccatgacaaattcaaagcagagtattgctaagaaaatcgatgcggcccaaaattggctggccgaccccaacggtggacccgaaggtgaggagcagatacgcggcgctctggccgaagcacgcaaaatcgcggagttatgcgatgacccaaaagaacgggatgatatcctgcgttctctaggcgaaattagcgccctgacatctaagctcgccgatctcagacggcagggaaagggagattcgccggaagcccgggcactggccaagcaggtggccaccgccctgcagaacctgcagaccaagacaaatcgggccgtagcaaacagccggcccgctaaggctgctgttcaccttgaaggaaaaatcgaacaggcgcagcggtggatcgacaatcctacagtggacgataggggcgtggggcaagctgccatacgcggcctggtggccgaagggcatcgcttagcaaatgtgatgatgggcccatataggcaagatctactcgccaagtgcgacagagtggatcagctcactgcccagttggccgacttagcagcacggggtgagggcgaatcaccgcaagccagggctctagccagccaactgcaggatagcctgaaagatctaaaagcgcggatgcaagaggcaatgacgcaagaggttagcgatgtattttctgacacaactactcccattaagctgctggcggtagctgcgacagccccaccggacgccccaaatcgggaggaagtgtttgacgagagggcggcaaatttcgaaaatcactctggaaaactgggcgcaacagcggagaaggcagccgctgtgggaacggctaacaagagtactgtagagggtatccaggccagcgttaagaccgccagggagctcactccacaggtagtcagcgcggcccgcatccttttacgcaatcctggcaatcaggctgcctacgagcacttcgaaaccatgaaaaaccagtggatcgataacgttgagaagatgactgggctggttgacgaggccatcgacaccaagtcattgctggacgcttccgaggaggctatcaaaaaagatctcgacaagtgtaaagtcgcaatggctaatatacagccacagatgttggtggcaggtgctacatccattgcacgtcgtgctaacaggattctgttagtggccaaacgcgaggttgaaaacagcgaggaccccaagttccgggaagcggtgaaagctgcttcggatgaactcagcaagaccatcagccctatggtgatggacgcgaaggccgtcgcagggaatatctctgatcccggcctgcagaagtcattcctcgacagcggttaccggattctgggcgccgtggccaaagtgagggaagcctttcaaccccaggagcctgacttccctccacctccccccgatcttgagcagctgcgcctcacggacgaactagcaccgccgaaaccacctctgcctgagggcgaagttccacccccacggccaccgcctcctgaagagaaggacgaggagtttcctgagcagaaagctggcgaggtgataaatcagccaatgatgatggcagctcggcaactgcatgatgaggcaaggaagtggtcttccaagggcaacgatataatcgccgctgcaaaaaggatggctctactaatggctgaaatgtcccgattggtccgcgggggctcaggcactaagagagccctgatccaatgtgctaaagacattgctaaagctagcgatgaggtaacgcgtcttgcaaaggaagtcgcaaagcagtgtacagacaagcgtatccggactaacctgctccaagtttgtgagagaattccaacgataagtacacagttaaaaatcctgagtacggtcaaggccaccatgttagggcgcaccaacatctctgatgaagagtcagaacaagccacagaaatgctcgttcataacgcacagaatctgatgcagtcagtcaaggagacagtgagagagctgaagctgctccagagcaaattcgaacagatgctggatctacactgtgcgggcctcgagaggcttccaggcactagtcgacacctggcggaacccggttggcaccgaaatctgtactag

SEQ ID NO: 137811 - DNA, 3201 bp, Artificial Sequence
  derived and/or modified sequence
atgcctgtgttccacaccaggaccatcgagagcatcctggagcctgtggcccagcagatcagccacctggtgatcatgcatgaggagggggaggtggatggcaaggccatcccagacctgacagcccctgtggccgctgtgcaggccgctgtgagcaacctggtgcgggtgggcaaggagaccgtgcagaccacagaggaccagatcctgaagagggacatgcccccagccttcatcaaggtggagaatgcctgcaccaagctggtgcaggccgcccagatgctgcagagcgacccctacagcgtgcctgcccgggactacctgattgatggcagccggggcatcctgagcggcaccagtgacctgctgctgacctttgatgaagctgaggtgaggaagatcatccgggtgtgcaagggcatcctggagtacctgactgtggccgaggtggtggagaccatggaggacctggtgacctacaccaagaacctgggccctggcatgaccaagatggccaagatgattgatgagcggcagcaggagctgacccaccaggagcaccgggtgatgctggtgaacagcatgaacacagtgaaggagctgctgcctgtgctgatcagcgccatgaagatctttgtgaccaccaagaacagcaagaaccagggcatcgaggaggccctgaagaacagaaacttcaccgtggagaagatgtctgctgagatcaatgagatcatccgggtgctgcagctgacctcctgggatgaagatgcctgggccagcaaggacacagaggccatgaagagggccctggccagcattgacagcaagctgaaccaggccaagggctggctgcgggaccccagcgccagccctggagatgctggggagcaggccatccggcagatcctggatgaggccggcaaggtgggggagctgtgtgccggcaaggagcggcgggagatcctgggcacctgcaagatgctgggccagatgacagaccaggtggccgacctgcgggcccggggccagggcagcagccctgtggccatgcagaaggcccagcaggtgtcccagggcctggatgtgctgacagccaaggtggagaatgctgccaggaagctggaggccatgaccaacagcaagcagagcatcgccaagaagattgatgctgcccagaactggctggccgaccccaatggaggccctgagggggaggagcagatccggggggccctggccgaggccaggaagattgctgagctgtgtgatgaccccaaggagagagatgacatcctgcggagcctgggggagatcagcgccctgaccagcaagctggccgacctgcggcggcagggcaaaggagacagccctgaggcccgggccctggccaagcaggtggccacagccctgcagaacctgcagaccaagaccaacagagctgtggccaacagcaggcctgccaaggctgctgtgcacctggagggcaagattgagcaggcccagcgctggattgacaaccccaccgtggatgacagaggagtgggccaggccgccatccggggcctggtggccgagggccaccggctggccaacgtgatgatgggcccctaccggcaggacctgctggccaagtgtgacagagtggaccagctgacagcccagctggccgacctggccgcccggggggagggggagagcccccaggcccgggccctggccagccagctgcaggacagcctgaaggacctgaaggccaggatgcaggaggccatgacccaggaggtgtctgatgtgttcagtgacaccaccacccccatcaagctgctggccgtggccgccacagcccccccagatgcccccaaccgggaggaggtgtttgatgagcgggccgccaactttgagaaccacagcggcaagctgggcgccacagctgagaaggctgctgctgtgggcacagccaacaagagcacagtggagggcatccaggcctctgtgaagacagcccgggagctgaccccccaggtggtgtctgctgcccgcatcctgctgaggaaccctggcaaccaggccgcctatgagcactttgagaccatgaagaaccagtggattgacaacgtggagaagatgacaggcctggtggatgaggccatcgacaccaagagcctgctggatgccagcgaggaggccatcaagaaggacctggacaagtgcaaggtggccatggccaacatccagccccagatgctggtggccggggccaccagcatcgcccggcgggccaaccgcatcctgctggtggccaagcgggaggtggagaacagcgaggaccccaagttccgggaggccgtgaaggccgccagtgatgagctgagcaagaccatcagccccatggtgatggatgccaaggctgtggccggcaacatcagtgaccccggcctgcagaagagcttcctggacagcggctaccgcatcctgggcgctgtggccaaggtgcgggaggccttccagccccaggagccagacttccccccacctcctccagacctggagcagctgcggctgacagatgagctggccccacccaagccacccctgcctgagggggaggtgcccccacccaggcctcctcctcctgaggagaaggatgaggagttccctgagcagaaggccggggaggtgatcaaccagcccatgatgatggccgcccggcagctgcatgatgaggccaggaagtggagcagcaaaggaaatgacatcatcgccgccgccaagaggatggccctgctgatggccgagatgagccggctggtgcggggcggcagcggcaccaagagggccctgatccagtgtgccaaggacatcgccaaggccagtgatgaggtgacccggctggccaaggaggtggccaagcagtgcacagacaagaggatccgcaccaacctgctgcaggtgtgtgagcgcatccccaccatcagcacccagctgaagatcctgagcacagtgaaggccaccatgctgggccgcaccaacatcagtgatgaggagagcgagcaggccacagagatgctggtgcacaatgcccagaacctgatgcagagcgtgaaggagaccgtgcgggaggccgaggccgccagcatcaagatcagaacagatgctggcttcaccctgcgctgggtgaggaagaccccctggtaccagtag

SEQ ID NO: 137812 - DNA, 984 bp, Artificial Sequence
  derived and/or modified sequence
atgcctgtgttccacaccaggaccatcgagagcatcctggagcctgtggcccagcagatcagccacctggtgatcatgcatgaggagggggaggtggatggcaaggccatcccagacctgacagcccctgtggccgctgtgcaggccgctgtgagcaacctggtgcgggtgggcaaggagaccgtgcagaccacagaggaccagatcctgaagagggacatgcccccagccttcatcaaggtggagaatgcctgcaccaagctggtgcaggccgcccagatgctgcagagcgacccctacagcgtgcctgcccgggactacctgattgatggcagccggggcatcctgagcggcaccagtgacctgctgctgacctttgatgaagctgaggtgcccccaccccggcccccacctcctgaggagaaggatgaggagttccctgagcagaaggccggggaggtgatcaaccagcccatgatgatggccgcccggcagctgcatgatgaggccaggaagtggagcagcaaaggaaatgacatcatcgctgctgccaagaggatggccctgctgatggccgagatgagccggctggtgcggggcggcagcggcaccaagagggccctgatccagtgtgccaaggacatcgccaaggccagtgatgaggtgacccggctggccaaggaggtggccaagcagtgcacagacaagaggatccgcaccaacctgctgcaggtgtgtgagcgcatccccaccatcagcacccagctgaagatcctgagcacagtgaaggccaccatgctgggccgcaccaacatcagtgatgaggagagcgagcaggccacagagatgctggtgcacaatgcccagaacctgatgcagagcgtgaaggagaccgtgcgggaggccgaggccgccagcatcaagatcagaacagatgctggcttcaccctgcgctgggtgaggaagaccccctggtaccagtag

SEQ ID NO: 137813 - DNA, 3021 bp, Artificial Sequence
  derived and/or modified sequence
atgcccccagccttcatcaaggtggagaatgcctgcaccaagctggtgcaggccgcccagatgctgcagagcgacccctacagcgtgcctgcccgggactacctgattgatggcagccggggcatcctgagcggcaccagtgacctgctgctgacctttgatgaggccgaggtgaggaagatcatccgggtgtgcaagggcatcctggagtacctgactgtggccgaggtggtggagaccatggaggacctggtgacctacaccaagaacctgggccctggcatgaccaagatggccaagatgattgatgagcggcagcaggagctgacccaccaggagcaccgggtgatgctggtgaacagcatgaacacagtgaaggagctgctgcctgtgctgatcagcgccatgaagatctttgtgaccaccaagaacagcaagaaccagggcatcgaggaggccctgaagaacagaaacttcaccgtggagaagatgtctgctgagatcaatgagatcatccgggtgctgcagctgacctcctgggatgaagatgcctgggccagcaaggacacagaggccatgaagagggccctggccagcattgacagcaagctgaaccaggccaagggctggctgcgggaccccagcgccagccctggagatgctggggagcaggccatccggcagatcctggatgaagctgggaaggtgggggagctgtgtgccggcaaggagcggcgggagatcctgggcacctgcaagatgctgggccagatgacagaccaggtggccgacctgcgggcccggggccagggcagcagccctgtggccatgcagaaggcccagcaggtgtcccagggcctggatgtgctgacagccaaggtggagaatgctgccaggaagctggaggccatgaccaacagcaagcagagcatcgccaagaagattgatgctgcccagaactggctggccgaccccaacggcggccctgagggggaggagcagatccggggggccctggccgaggccaggaagattgctgagctgtgtgatgaccccaaggagagagatgacatcctgcggagcctgggggagatcagcgccctgaccagcaagctggccgacctgcggcggcagggcaagggggacagccctgaggcccgggccctggccaagcaggtggccacagccctgcagaacctgcagaccaagaccaacagagctgtggccaacagcaggcctgccaaggctgctgtgcacctggagggcaagattgagcaggcccagcgctggattgacaaccccaccgtggatgaccggggcgtgggccaggccgccatccggggcctggtggccgagggccaccggctggccaacgtgatgatgggcccctaccggcaggacctgctggccaagtgtgacagagtggaccagctgacagcccagctggccgacctggccgcccggggggagggggagagcccccaggcccgggccctggccagccagctgcaggacagcctgaaggacctgaaggccaggatgcaggaggccatgacccaggaggtgtctgatgtgttcagtgacaccaccacccccatcaagctgctggccgtggccgccacagcccccccagatgcccccaaccgggaggaggtgtttgatgaaagagctgccaactttgagaaccacagcggcaagctgggcgccacagctgagaaggctgctgctgtgggcacagccaacaagagcacagtggagggcatccaggcctctgtgaagacagcccgggagctgaccccccaggtggtgtctgctgcccgcatcctgctgagaaatcctggcaaccaggccgcctatgagcactttgagaccatgaagaaccagtggattgacaacgtggagaagatgacaggcctggtggatgaggccatcgacaccaagagcctgctggatgccagcgaggaggccatcaagaaggacctggacaagtgcaaggtggccatggccaacatccagccccagatgctggtggccggggccaccagcatcgcccggcgggccaaccgcatcctgctggtggccaagcgggaggtggagaacagcgaggaccccaagttccgggaggccgtgaaggccgccagtgatgagctgagcaagaccatcagccccatggtgatggatgccaaggctgtggccggcaacatcagtgaccccggcctgcagaagagcttcctggacagcggctaccgcatcctgggcgctgtggccaaggtgcgggaggccttccagccccaggagccagacttccccccacctcctccagacctggagcagctgcggctgacagatgagctggccccacccaagccacccctgcctgagggggaggtgcccccaccccggcccccacctcctgaggagaaggatgaggagttccctgagcagaaggccggggaggtgatcaaccagcccatgatgatggccgcccggcagctgcatgatgaggccaggaagtggagcagcaaaggaaatgacatcatcgctgctgccaagaggatggccctgctgatggccgagatgagccggctggtgcggggcggcagcggcaccaagagggccctgatccagtgtgccaaggacatcgccaaggccagtgatgaggtgacccggctggccaaggaggtggccaagcagtgcacagacaagaggatccgcaccaacctgctgcaggtgtgtgagcgcatccccaccatcagcacccagctgaagatcctgagcacagtgaaggccaccatgctgggccgcaccaacatcagtgatgaggagagcgagcaggccacagagatgctggtgcacaatgcccagaacctgatgcagagcgtgaaggagaccgtgcgggagctgaagctgctgcagagcaagtttgagcagatgctggacctgcactgtgccggcctggagcggctgcccggcaccagccgccacctggccgagcccggctggcacaggaacctgtactag

SEQ ID NO: 137814 - DNA, 3201 bp, Artificial Sequence
  derived and/or modified sequence
atgcccgtgttccacacccggaccatcgagagcatcctggagcccgtcgcacaacagatctcgcatttggttattatgcatgaggagggtgaggttgatgggaaggcaatacccgatcttactgccccagttgctgcagtgcaggctgctgtatccaatctggtaagagttggaaaggaaaccgtccagactacagaggaccaaatcctgaagagggacatgccccctgcattcattaaggtggagaatgcttgtacaaagctagtacaggcagcccagatgcttcagtctgatccgtattctgtaccagcaagggactacctgatagatggcagtaggggtatcctgtcaggcacttctgacttgctgctgaccttcgacgaggctgaagtgcggaaaatcatcagagtgtgtaagggtatcctcgagtaccttaccgtcgctgaggtcgtcgagacaatggaggatcttgtcacgtacactaagaacttgggtccgggcatgacaaaaatggccaaaatgatcgacgagcgacagcaggaattaactcaccaggagcacagggtgatgctggttaacagtatgaataccgttaaagagctcctgcctgtactgataagtgccatgaagattttcgtaactaccaagaacagcaagaaccagggaatcgaggaggcgttaaaaaatcgaaacttcacagtggaaaagatgtctgccgaaatcaatgagattatccgggtgctgcaactgacttcttgggatgaggacgcatgggcctctaaagatactgaagccatgaagagggcgctggctagcattgattcaaagctgaatcaagccaaggggtggctccgagatccttccgcctcacccggggatgccggagagcaggcaatccgacaaatcctagacgaagccggcaaggtgggcgagctgtgcgctggaaaggagaggcgggagatactggggacttgtaagatgctgggtcagatgactgatcaggttgcagatttacgcgcacgaggtcagggcagcagcccagttgcaatgcagaaggctcagcaggtctctcagggcctggatgtgctgaccgccaaagtcgaaaacgctgcacggaaactcgaagccatgactaatagtaagcagagcattgcaaaaaagatagacgctgctcagaactggcttgcagaccccaacgggggtcctgaaggagaggagcaaatacggggtgcgctggcagaggcccgtaaaatcgcagagctctgcgatgaccccaaagagcgtgatgacatcctgcgttccttaggagaaatcagcgctcttaccagcaagctagccgatctgcggagacaggggaagggggatagccctgaggccagggcattagccaagcaagtagcaacagctctgcagaatttgcagaccaaaactaatagggctgtggccaacagcaggcctgctaaggccgctgtccatctagaaggaaagattgaacaggcccaacggtggattgataatcctactgtggacgacagaggtgttgggcaggccgcaattcggggcctggtggccgagggccaccgcctggcgaacgtgatgatgggcccataccgtcaggatcttctggccaagtgtgatcgggtggatcagctcactgcacaactcgctgatttggcagctcggggcgagggagaaagcccccaggctcgcgctttggcctcacagctgcaggactctctcaaggatttgaaggcacgcatgcaggaggctatgacacaagaagtgtctgatgtgttctcagatacaacaacacctatcaagctcctggcagtggctgcgactgcccccccagacgctcccaaccgcgaagaggtgttcgacgagcgcgccgccaattttgagaaccactctgggaagctcggggctactgctgaaaaagcagcagccgtaggcacagcaaacaaaagcacggttgaaggaattcaggcttctgtgaagaccgccagggagctgacaccacaagtggtttcagcagcacggattctgctccgaaatcctggtaaccaggccgcgtacgagcattttgaaacaatgaaaaatcaatggattgacaacgtagaaaagatgactggtctggtggacgaggccattgacacaaaatcccttctagacgcgagcgaggaggctataaagaaagacctcgacaaatgtaaggtggctatggctaatattcagcctcagatgctggtcgctggggctacctctatcgcccggagggccaataggattctcttggtcgctaagagagaggtggaaaacagcgaagacccaaaatttagggaagccgtaaaagccgccagtgacgaattaagcaaaacaatttccccaatggttatggatgccaaggcagttgccggcaacatttctgatcctggattgcaaaaatccttccttgacagcggctaccgcattttaggagctgtggccaaggtgcgagaagcatttcagcctcaagaaccagactttccacccccaccaccagatctcgaacagctgaggctgacagatgagctggctccgcccaagcctcccctgcctgaaggagaggtccctccaccacgacctcctccacctgaagaaaaggatgaggaattccccgaacagaaggccggggaggtaattaaccagcccatgatgatggcagccaggcaactgcatgacgaggctcgcaaatggagctcaaaaggaaacgacatcatcgctgcggctaagcggatggccctgcttatggcggaaatgagtcgcctcgtcagaggtggtagcggcactaaaagagccctgattcagtgcgcgaaggacatcgcaaaagccagtgacgaggtcacaagattggccaaagaggtggcaaagcaatgtaccgacaagcgcattcgcaccaatttgttacaggtctgcgaacgcatcccgaccatttccactcagctcaaaattctctctacggttaaggccacaatgttgggtaggacgaacatatcagacgaggagtccgagcaagccacggagatgctggtccacaatgcgcagaacctgatgcagtccgtgaaagaaactgtgagagaagcagaggctgcgagcataaagatacggaccgacgcaggctttacactccggtgggtccgcaagacaccttggtatcagtag

SEQ ID NO: 137815 - DNA, 984 bp, Artificial Sequence
  derived and/or modified sequence
atgcccgtgttccacacccggaccatcgagagcatcctggagcccgtggcccagcagattagccacctagtgatcatgcatgaagaaggcgaagtcgacggcaaggccatacctgatttgacagctccagttgcggccgtgcaggctgccgtatcaaatctcgttcgggttgggaaggaaacggtccagacgacggaggatcagatcttgaagcgggatatgccccctgcctttatcaaagtcgaaaatgcttgcacaaagttggtacaagctgctcaaatgcttcaatctgatccctatagtgtgcctgcccgcgactacttaatcgatgggagcaggggaattctctctggaacctccgatctcctgctgacttttgatgaagccgaagtgccacccccccgccccccgcctcctgaagaaaaagatgaggaattccctgaacagaaggcaggagaagttatcaaccagcccatgatgatggccgcccgacagttgcatgatgaagccaggaagtggagttctaaaggcaatgacatcatcgccgccgccaagaggatggctttgcttatggctgagatgagtcggctggtcagaggcgggagcgggaccaaacgggccctgatccagtgcgcaaaggacattgccaaggcttcagacgaagtcacccgcttggccaaagaggtggcaaagcagtgtactgacaaaaggataaggaccaacctgcttcaggtttgtgagcgtataccaactatctcgacacaacttaaaattctctctaccgtcaaagcgaccatgctgggaagaacaaatatctccgatgaggagtccgaacaggccacggagatgctggtgcataatgctcagaatctcatgcaatcagtgaaagagacagtgagagaggcagaggccgccagcatcaaaatcaggactgacgcaggcttcaccttgcgctgggtgagaaaaactccctggtatcagtag

SEQ ID NO: 137816 - DNA, 3021 bp, Artificial Sequence
  derived and/or modified sequence
atgccccccgccttcatcaaggtggagaacgcctgcaccaagctggttcaggccgcccagatgttgcagagcgatccatattctgtacccgcaagagattatctcattgacggctcaaggggtatcctcagcgggacatctgatttattgcttaccttcgacgaggccgaggtgcgaaagattattagagtctgtaagggcatcctggagtacctgaccgtggcggaagtagttgaaaccatggaagacttggtgacctataccaaaaatttgggacccggtatgacaaagatggctaaaatgattgatgaacggcagcaagaacttacacaccaggaacaccgggttatgctggttaattctatgaacaccgtgaaagagctgttgcctgtccttatatctgctatgaagatattcgtgacaaccaaaaactccaaaaaccagggtatagaggaagccctgaagaacaggaactttaccgttgagaagatgagcgctgaaattaacgagattattcgagtgctccagcttacaagttgggatgaggatgcatgggcgagcaaggacacggaagctatgaagagagccctggccagcatagactccaagctgaaccaggccaaaggctggcttcgcgacccaagtgcatcacccggcgacgctggcgaacaggcaatcagacagatccttgatgaagcaggaaaggtgggtgaactgtgtgccgggaaagaaaggcgcgaaatactgggcacctgcaaaatgcttgggcagatgactgatcaggtagccgatcttcgtgctagaggacagggctcgtcaccggtcgcaatgcagaaagctcagcaagtttcacagggcctagatgtcttaaccgcaaaggtggaaaacgccgctcgaaagcttgaagccatgacaaattcaaaacaaagtattgctaagaaaattgatgcagcgcagaactggctggccgatccaaacgggggaccggaaggtgaagaacagatcaggggtgctctggctgaagctcgtaagattgcggaactctgcgacgaccccaaagaacgtgatgatatattacgctcactgggcgagatctcagccctgacctctaagctagccgatctgcggcgccagggcaaaggggattcacccgaggcaagggcgcttgccaaacaagtggccaccgctctacaaaatctccaaaccaaaacgaacagggcagtagctaacagtcgtccagccaaagctgcagtccatctcgaaggcaagatcgaacaggcccagagatggattgacaaccccaccgtcgacgacaggggggtaggacaggccgccatcagaggccttgtcgctgagggccatcgactggccaacgtgatgatgggcccgtaccgacaggatctgctcgccaaatgtgacagggtggatcagctgactgcacaactggccgacctggcggcgaggggtgagggagagagcccccaggcccgcgccctggcctctcagctgcaggacagtctgaaagacttaaaagcgagaatgcaggaggccatgacccaggaggtaagcgacgtgttttctgacactacaaccccaattaaactgctcgcagtggccgcgactgcccctcctgacgcccccaaccgggaggaagtgtttgatgaacgagctgcaaactttgaaaaccattccgggaagctgggcgcgacggccgaaaaggccgccgccgtcggaaccgccaacaaaagtaccgtagaaggaatccaggcttccgtaaaaacggccagagagcttactcctcaagttgtttctgcggcccgcattctcctcaggaaccccggaaatcaggccgcctatgagcatttcgaaaccatgaagaaccagtggatagataacgtggaaaagatgactggcctagtggacgaagctatcgataccaaaagcctgctggacgcttctgaggaggcaataaagaaagatctcgacaagtgtaaagttgccatggcgaatatccagccacaaatgctagttgcaggcgccactagtatcgctagacgggccaaccgtattctgctcgtagctaagcgagaggtcgagaactccgaagatcccaagttccgcgaggcggtaaaagcggcttccgatgagctgagcaaaactatctcccccatggtcatggatgctaaagccgtggctgggaatatctcagatccaggtttgcaaaaatcttttctggactctggatacagaattctcggggcagtggctaaggttcgcgaagccttccagccgcaagaacccgatttcccacctccgccgccagacctggaacagctgcgtctcactgacgagctggcacccccaaaaccacccctgccagagggggaggtgcctcccccccgcccgccaccaccggaggaaaaggatgaggagttcccggagcaaaaggcaggggaagttatcaaccaacccatgatgatggctgcaaggcagctgcatgacgaggctaggaagtggtcgagcaaaggaaatgatattatagcggctgctaaaagaatggctctcctgatggcggagatgtccaggttggtgcgtggcggctcaggtaccaagagggcactgatccagtgcgccaaagatattgcaaaagcaagcgacgaggtcactcgattagcaaaggaagtggccaagcagtgtacagacaagaggatccgcaccaatctgctgcaggtctgtgaaagaatccccacaatctcaacccagttgaagatcttaagtaccgttaaagctacgatgctgggccgtacgaatatctctgacgaggagagtgagcaagcgaccgaaatgctcgtccacaacgcccagaacctcatgcagtccgtgaaggagaccgtgcgggaattgaaactgctccaaagcaagtttgaacagatgctggatcttcattgtgctggtctagagcggctcccaggaacaagccgacacctggcagaaccaggatggcacaggaacctatattag

SEQ ID NO: 137817 - DNA, 3201 bp, Artificial Sequence
  derived and/or modified sequence
atgcccgtgttccatactagaaccattgagtccatcttagaacccgtggctcaacaaatttcccatctggttataatgcacgaagaaggggaagttgatggcaaagccatacctgatttaacagcacccgttgccgctgttcaggccgctgtttctaatttggtccgtgtgggaaaagaaaccgtgcagaccaccgaggatcagatcctgaaacgcgatatgcctcccgcttttataaaagtggagaacgcctgtaccaaattggtccaagccgctcagatgctgcaatcagatccctacagtgtgccagcgagagattatctgatcgacggcagccgaggtattctctccggaactagtgacctgttgttgacatttgatgaggccgaagtgaggaagataataagagtgtgcaagggcattctggaatacctgacagtggccgaagtggttgagaccatggaagacttagtgacttataccaagaatctcggcccagggatgacgaagatggctaagatgattgatgaacgccagcaggaacttactcatcaagagcatagagtgatgcttgtcaacagcatgaatactgtcaaagagctcctgcccgtactcatcagcgcaatgaagattttcgtaaccaccaagaactccaagaatcagggcattgaagaggccttaaagaacagaaactttacggtcgaaaaaatgtctgcagagattaatgagatcataagagtcctccagctgacctcttgggacgaggacgcatgggcttctaaagatacggaggctatgaaacgcgcattggcttcaattgattccaaacttaatcaggcaaaaggatggctcagagatccgagtgcctccccgggagatgctggcgagcaggctatcaggcagattcttgacgaagccggtaaggtgggagagctgtgtgcaggcaaggaaagaagggagatcctgggaacatgcaaaatgctgggacagatgacggatcaggtagccgacctcagggctaggggtcagggtagttctcccgtggccatgcagaaggcccagcaggttagccaggggctggatgtgctgactgctaaggtcgagaacgccgcacgaaagctcgaggcaatgaccaacagcaagcagtccattgccaagaaaatcgacgccgcacagaattggttggcagacccgaacggcggaccggagggagaggagcaaatacggggtgccttagctgaagcccgtaaaatagcagagctgtgtgacgatccaaaggaacgggacgatatcctccggtccctcggcgagatcagcgccctcacctctaagctggccgatctgaggcggcagggaaagggagacagcccggaggcccgagcactcgcaaagcaggtggccactgccctgcagaacctccaaaccaagacaaaccgtgccgtggcgaactccaggcccgcaaaggcagccgtgcacctcgagggcaaaatagagcaggcacagagatggattgacaatcctacagtcgatgaccggggtgttggccaggcagccattagagggctcgtggcggaaggccataggcttgctaacgtgatgatgggaccatacaggcaagatctgctggctaaatgcgaccgcgttgaccagctcactgctcagctcgctgacctagccgctcggggagaaggcgagagccctcaggccagagcacttgccagtcaactccaggatagtctgaaggacttaaaagcgaggatgcaggaagctatgactcaggaagtttccgatgtgttttctgatacaactactccaatcaagctgctcgccgtggccgctaccgcaccccctgacgcccctaatcgcgaggaagtattcgatgaaagggctgctaactttgaaaaccacagcgggaaactcggtgcgaccgcggagaaggccgctgctgtgggtacagcaaataaatctacagtcgagggtatccaagcaagtgtcaagactgccagggagttgacaccccaggtggtgtccgctgctaggatactgctgaggaacccagggaaccaagctgcctacgagcactttgaaaccatgaagaatcagtggatcgataacgtggagaagatgactggactcgttgatgaagcaatcgatacaaagagtctgctggatgcttccgaagaagccatcaaaaaagatctggataagtgcaaagtcgcgatggcaaatatacagccacagatgctggtcgccggtgccacctcaatcgcgaggcgagctaatcgaatccttcttgtagccaaaagggaggtggagaattccgaggatcctaagttccgggaggctgttaaggcagccagcgatgagctgagcaagacaattagccccatggttatggacgccaaggcagtggccggaaacatctctgatcctggactccagaagtcctttctggattccgggtataggatattgggagcagttgccaaagtcagagaagccttccaaccacaagagcctgattttcctcccccacctcccgatctcgagcaacttcggttaacagacgagcttgctccaccaaaaccccctctcccggaaggtgaggtgcctccgcctcgacctccaccccctgaagagaaggacgaagaatttccagagcagaaagccggagaagtcataaaccaacccatgatgatggctgcaaggcagttgcatgatgaggccaggaagtggtcgagcaaaggtaacgatatcatcgctgccgcaaagcggatggccttgctgatggcagaaatgagtaggctggttcggggaggcagcgggaccaagcgcgcactgatccagtgcgcaaaggacatcgctaaggccagtgatgaggtaacacggctcgctaaggaggtagcaaagcagtgtacagacaagagaattaggactaatttactccaagtttgcgagcggatacccaccatctccacacaattgaagatcctgtctaccgttaaggctaccatgctgggtcgaactaatatcagtgatgaagagtccgaacaggccaccgagatgttggtccacaacgcgcagaatctcatgcaaagcgtaaaggagactgtacgtgaggctgaagccgcatctataaaaattcgaaccgacgccggttttaccctgcgctgggtgcgaaagaccccttggtatcagtag

SEQ ID NO: 137818 - DNA, 984 bp, Artificial Sequence
  derived and/or modified sequence
atgcctgtgttccacacgagaaccatcgagtcgattctggagcccgttgcccagcagatctcacatctggtaattatgcacgaggaaggtgaagtagacggtaaagctattcccgatcttaccgcacccgtggctgccgtccaggccgctgtgtcgaatctcgtccgggttggaaaggagaccgtgcagactaccgaagaccagatcctcaagagggatatgcctccagcatttataaaagtggaaaacgcctgcacaaaactcgtgcaagcagcccagatgctgcaatccgatccatattcagttccggctcgcgattacctgattgatggctcacgcggtatcctatccggcacatcagatctgctgttaacttttgatgaagccgaggtcccacccccacggcctccgccacccgaagagaaggacgaggagttccccgagcaaaaggccggtgaggtgataaatcagcccatgatgatggcagcacgccagctgcacgatgaagctcgcaaatggagtagcaaggggaacgatatcatcgcggctgcaaaacggatggcccttctcatggctgagatgtctagactggtccgcggaggatcaggtaccaagcgggctttaatacagtgtgccaaggatatcgctaaggcttcagatgaggttacaaggctagccaaagaagtggccaagcagtgcacagacaagagaattcgcacgaatctgttacaagtctgcgagaggatccctacaatttccacacagctcaaaattctgtctacagtaaaggccacaatgttaggtcggacaaacatcagcgacgaggagagtgagcaggccactgaaatgctggtgcacaatgcccagaacttgatgcagagtgttaaagaaacagttcgggaggcagaagcagcttcaatcaagatcagaaccgacgccggatttaccctgagatgggttcgcaagacaccttggtaccagtag

SEQ ID NO: 137819 - DNA, 3021 bp, Artificial Sequence
  derived and/or modified sequence
atgccccctgcctttatcaaggtcgaaaatgcatgcactaagctggtgcaggctgcccagatgctgcaatccgatccatacagcgtgcccgctagagattacctcatcgacgggtcacggggtatattgagcggtactagtgacctcctgctcacctttgacgaagctgaggtgaggaagattattagggtgtgcaaggggattttggaatatctaactgtggcagaagtggtagagacaatggaggatctggtcacttacaccaagaaccttggaccaggtatgactaagatggccaagatgatcgacgagaggcagcaggagctgacccatcaggagcatcgagttatgctcgttaactcgatgaacacggttaaagagctcttaccagtgctaatctctgccatgaaaatctttgtgactactaaaaactctaaaaaccaaggtatcgaagaggccctcaagaacagaaatttcactgtcgaaaaaatgtcagcagaaattaacgaaatcattcgtgtgctgcagctcacctcctgggatgaggacgcatgggccagcaaggacaccgaggccatgaaacgcgcactcgcctctatcgattcgaagctcaatcaagccaagggctggctgcgggacccctccgctagcccaggcgatgctggggagcaggcaatccgtcaaatcctcgacgaggcaggaaaggttggcgaactgtgcgcgggtaaggagagacgggaaatcttaggtacttgtaagatgctcgggcaaatgaccgaccaggtggctgatctcagggctcggggtcagggctctagtccagtcgcaatgcagaaggctcaacaggtatcccaaggactagatgtgttaacggccaaagtggagaacgccgcacgtaaactggaggccatgaccaattctaaacagtcaattgccaagaagatagacgccgctcaaaactggctggcggatcctaacggtggccctgaaggagaagagcagatcagaggcgcactcgcggaggctaggaaaatcgccgagctctgcgacgatccgaaagagcgcgatgatattttgcggtctctgggagaaattagcgccctcacgagtaagcttgccgacctgcgccgtcagggcaaaggggatagcccagaagcccgtgctttagcaaagcaggtagccaccgccctccagaacctgcaaacaaaaacaaatcgggcagtggctaacagtaggcccgctaaagcagctgtgcacctggaaggaaagattgaacaggcccagcgctggattgacaatcctacggttgatgaccggggagtgggacaggctgctatccgcggattggtggctgagggacatcgactggcgaatgtcatgatggggccttatagacaggacttgctggcaaagtgcgacagagtagatcagttaaccgctcaactggctgatctggccgctcgaggtgaaggagagagccctcaggcccgagcactggcatcacagctgcaggattcactcaaggacttgaaggcacgaatgcaggaggccatgacccaggaggtctcggatgtattcagcgacactacaactcccataaagctcctggccgtagccgctaccgccccaccagatgccccaaaccgagaagaagtattcgacgagcgggctgccaacttcgagaatcactctggcaaactgggcgctacagccgagaaagccgctgccgtgggcaccgcgaacaaaagcacagtcgaagggatccaggcctctgtaaagactgccagagagttaactccacaagttgtgtcggccgcacgcatcttacttcgcaacccaggcaaccaggccgcatatgaacatttcgagacaatgaagaatcagtggattgataatgtagagaagatgactggcctcgtggatgaagccattgacactaagtctctcctggacgctagcgaagaggccattaagaaggacctggataaatgtaaggtggcaatggccaatatacaaccacagatgttagttgccggagcgacatcgattgcaagacgagccaatcggattctgctggtggccaagagggaagtcgagaactcagaggacccaaagttccgggaagctgtgaaggctgcctccgatgagctctccaagacgatttctcctatggttatggacgccaaagccgtggccggaaacatttcagatccagggcttcaaaagagctttctagacagcgggtaccgaattttgggtgccgtggccaaagtgagggaggcatttcagccccaggaaccagattttcccccacctcctccagatttggagcaattaaggcttaccgacgaacttgcccctccaaaacccccattgcctgaaggggaagtgcctcctcccaggccccctccacctgaggagaaagacgaggagttccccgaacagaaagcaggagaagtgataaaccagcccatgatgatggccgctagacagctccatgacgaggccagaaagtggtcttccaaggggaatgatatcatcgccgctgccaagcgaatggctctgctcatggcagaaatgtccagactagtgagaggagggagcggtaccaagcgggctctgatccaatgcgcgaaagacatcgcaaaagctagtgacgaggtcaccaggctggctaaagaggtggctaagcagtgcacagataaacgaatccgcaccaacctgctacaagtatgtgaacgcattcccacaatatccactcaattaaagatcctgtccaccgttaaggcaacaatgttgggccgaacaaacatcagcgacgaggagagcgagcaggcaacagaaatgctcgttcataatgcgcagaacctgatgcagtctgtcaaagagaccgttagggagctaaaactgctgcagagtaaatttgaacaaatgctagacctgcactgtgctggcctcgaacggctgccaggcacatccagacaccttgcagagcctggatggcatcgaaacttgtattag

SEQ ID NO: 137820 - DNA, 5286 bp, Artificial Sequence
  derived and/or modified sequence
gtagtcgctgcacagtctgtctcttcgccggttcccggccccgtggatcctacttctctgtcgcccgcggttcgccgccccgctcgccgccgcgatgccagtgtttcatacgcgcacgatcgagagcatcctggagccggtggcacagcagatctcccacctggtgataatgcacgaggagggcgaggtggacggcaaagccattcctgacctcaccgcgcccgtggccgccgtgcaggcggccgtcagcaacctcgtccgggttggaaaagagactgttcaaaccactgaggatcagattttgaagagagatatgccaccagcatttattaaggttgagaatgcttgcaccaagcttgtccaggcagctcagatgcttcagtcagacccttactcagtgcctgctcgagattatctaattgatgggtcaaggggcatcctctctggaacatcagacctgctccttaccttcgatgaggctgaggtccgtaaaattattagagtttgcaaaggaattttggaatatcttacagtggcagaggtggtggagactatggaagatttggtcacttacacaaagaatcttgggccaggaatgactaagatggccaagatgattgacgagagacagcaggagctcactcaccaggagcaccgagtgatgttggtgaactcgatgaacaccgtgaaagagttgctgccagttctcatttcagctatgaagatttttgtaacaactaaaaactcaaaaaaccaaggcatagaggaagctttaaaaaatcgcaattttactgtagaaaaaatgagtgctgaaattaatgagataattcgtgtgttacaactcacctcttgggatgaagatgcctgggccagcaaggacactgaagccatgaagagagcattggcctccatagactccaaactgaaccaggccaaaggttggctccgtgaccctagtgcctccccaggggatgctggtgagcaggccatcagacagatcttagatgaagctggaaaagttggtgaactctgtgcaggcaaagaacgcagggagattctgggaacttgcaaaatgctagggcagatgactgatcaagtggctgacctccgtgccagaggacaaggatcctcaccggtggccatgcagaaagctcagcaggtatctcagggtctggatgtgctcacagcaaaagtggaaaatgcagctcgcaagctggaagccatgaccaactcaaagcagagcattgcaaagaagatcgatgctgctcagaactggcttgcagatccaaatggtggaccggaaggagaagagcagattcgaggtgctttggctgaagctcggaaaatagcagaattatgtgatgatcctaaagaaagagatgacattctacgttcccttggggaaatatctgctctgacttctaaattagcagatctacgaagacaggggaaaggagattctccagaggctcgagccttggccaaacaggtggccacggccctgcagaacctgcagaccaaaaccaaccgggctgtggccaacagcagaccggccaaagcagctgtacaccttgagggcaagattgagcaagcacagcggtggattgataatcccacagtggatgaccgtggagtcggtcaggctgccatccgggggcttgtggccgaagggcatcgtctggctaatgttatgatggggccttatcggcaagatcttctcgccaagtgtgaccgagtggaccagctgacagcccagctggctgacctggctgccagaggggaaggggagagtcctcaggcacgagcacttgcatctcagctccaagactccttaaaggatctaaaagctcggatgcaggaggccatgactcaggaagtgtcagatgttttcagcgataccacaactcccatcaagctgttggcagtggcagccacggcgcctcctgatgcgcctaacagggaagaggtatttgatgagagggcagctaactttgaaaaccattcaggaaagcttggtgctacggccgagaaggcggctgcggttggtactgctaataaatcaacagtggaaggcattcaggcctcagtgaagacggcccgagaactcacaccccaggtggtctcggctgctcgtatcttacttaggaaccctggaaatcaagctgcttatgaacattttgagaccatgaagaaccagtggatcgataatgttgaaaaaatgacagggctggtggacgaagccattgataccaaatctctgttggatgcttcagaagaagcaattaaaaaagacctggacaagtgcaaggtagctatggccaacattcagcctcagatgctggttgctggggcaaccagtattgctcgtcgggccaaccggatcctgctggtggctaagagggaggtggagaattccgaggatcccaagttccgtgaggctgtgaaagctgcctctgatgaattgagcaaaaccatctccccgatggtgatggatgcaaaagctgtggctggaaacatttccgaccctggactgcaaaagagcttcctggactcaggatatcggatcctgggagctgtggccaaggtcagagaagccttccaacctcaggagcctgacttcccgccgcctccaccagaccttgaacaactccgactaacagatgagcttgctcctcccaaaccacctctgcctgaaggtgaggtccctccacctaggcctccaccaccagaggaaaaggatgaagagttccctgagcagaaggccggggaggtgattaaccagccaatgatgatggctgccagacagctccatgatgaagctcgcaaatggtccagcaagggcaatgacatcattgcagcagccaagcgcatggctctgctgatggctgagatgtctcggctggtaagagggggcagtggtaccaagcgggcactcattcagtgtgccaaggacatcgccaaggcctcagatgaggtgactcggttggccaaggaggttgccaagcagtgcacagataaacggattagaaccaacctcttacaggtatgtgagcgaatcccaaccataagcacccagctcaaaatcctgtccacagtgaaggccaccatgctgggccggaccaacatcagtgatgaggagtctgagcaggccacagagatgctggttcacaatgcccagaacctcatgcagtctgtgaaggagactgtgcgggaagctgaagctgcttcaatcaaaattcgaacagatgctggatttacactgcgctgggttagaaagactccctggtaccagtaggcacctggctgagcctggctggcacagaaacctctactaaaaagaaggaaaatgatctgagtcccaggagctgcccagagttgctgggagctgaaaaatcacatcctggcctggcacatcagaaaggaatgggggcctcttcaaattagaagacatttatactcttttttcatggacactttgaaatgtgtttctgtataaagcctgtattctcaaacacagttacacttgtgcaccctctatcccaataggcagactgggtttctagcccatggacttcacataagctcagaatccaagtgaacactagccagacactctgctctgcccttgttccctaggggacacttccctctgtttctctttccttggctcccattcactcttccagaatcccaagacccagggcccaggcaaatcagttactaagaagaaaattgctgtgcctcccaaaattgttttgagctttccatgttgctgccaaccataccttccttccctgggctgtgctacctgggtccttttcagaagtgagctttgctgctacaggggaaggtggcctctgtggagccccagcatatgggggcctggattcatttcctgcccttcctcagtttaatccttctagtttcccacaatataaaactgtacttcactgtcaggaagaaatcacagaatcatatgattctgcttttaccatgcccctgagcaatgtctgtgctagggaaacttcccgtcccatatcctgcctcagcccgccaaggtagccatcccatgaacacactgtgtcctggtgctctctgccactggaagggcagagtagccagggtgtggccctgccatcttcccagcagggccactcccggcactccatgcttagtcactgcctgcagaggtctgtgctgaggccttatcattcattcttagctcttaattgttcattttgagctgaaatgctgcattttaattttaaccaaaacatgtctcctatcctggtttttgtagccttcctccacatcctttctaaacaagattttaaagacatgtaggtgtttgttcatctgtaactctaaaagatcctttttaaattcagtcctaagaaagaggagtgcttgtcccctaagagtgtttaatggcaaggcagccctgtctgaaggacacttcctgcctaagggagagtggtatttgcagactagaattctagtgctgctgaagatgaatcaatgggaaatactactcctgtaattcctacctccctgcaaccaactacaaccaagctctctgcatctactcccaagtatggggttcaagagagtaatgggtttcatatttcttatcaccacagtaagttcctactaggcaaaatgagagggcagtgtttcctttttggtacttattactgctaagtatttcccagcacatgaaaccttattttttcccaaagccagaaccagatgagtaaaggagtaagaaccttgcctgaacatccttccttcccacccatcgctgtgtgttagttcccaacatcgaatgtgtacaacttaagttggtcctttacactcaggctttcactatttcctttataatgaggatgattattttcaaggccctcagcatatttgtatagttgcttgcctgatataaatgcaatattaatgcctttaaagtatgaatctatgccaaagatcacttgttgttttactaaagaaagattacttagaggaaataagaaaaatcatgtttgctctcccggttcttccagtggtttgagacactggtttacactttatgccggatgtgcttttctccaatatcagtgctcgagacacagtgaagcaaattaaaaaaaaaaaaaaaaaaaatccctgaatgatgattagagacatcaccgctaaaaaactacatttataagctaggatttgttatatgcaaatattttctgcctcttcttttgttctgtttaaaacaataaaatgcatttgtataaaaaa

SEQ ID NO: 137821 - DNA, 1386 bp, Artificial Sequence
  derived and/or modified sequence
agtcgctgcacagtctgtctcttcgccggttcccggccccgtggatcctacttctctgtcgcccgcggttcgccgccccgctcgccgccgcgatgccagtgtttcatacgcgcacgatcgagagcatcctggagccggtggcacagcagatctcccacctggtgataatgcacgaggagggcgaggtggacggcaaagccattcctgacctcaccgcgcccgtggccgccgtgcaggcggccgtcagcaacctcgtccgggttggaaaagagactgttcaaaccactgaggatcagattttgaagagagatatgccaccagcatttattaaggttgagaatgcttgcaccaagcttgtccaggcagctcagatgcttcagtcagacccttactcagtgcctgctcgagattatctaattgatgggtcaaggggcatcctctctggaacatcagacctgctccttaccttcgatgaggctgaggtccctccacctaggcctccaccaccagaggaaaaggatgaagagttccctgagcagaaggccggggaggtgattaaccagccaatgatgatggctgccagacagctccatgatgaagctcgcaaatggtccagcaagggcaatgacatcattgcagcagccaagcgcatggctctgctgatggctgagatgtctcggctggtaagagggggcagtggtaccaagcgggcactcattcagtgtgccaaggacatcgccaaggcctcagatgaggtgactcggttggccaaggaggttgccaagcagtgcacagataaacggattagaaccaacctcttacaggtatgtgagcgaatcccaaccataagcacccagctcaaaatcctgtccacagtgaaggccaccatgctgggccggaccaacatcagtgatgaggagtctgagcaggccacagagatgctggttcacaatgcccagaacctcatgcagtctgtgaaggagactgtgcgggaagctgaagctgcttcaatcaaaattcgaacagatgctggatttacactgcgctgggttagaaagactccctggtaccagtaggcacctggctgagcctggctggcacagaaacctctactaaaaagaaggaaaatgatctgagtcccaggagctgcccagagttgctgggagctgaaaaatcacatcctggcctggcacatcagaaaggaatgggggcctcttcaaattagaagacatttatactcttttttcatggacactttgaaatgtgtttctgtataaagcctgtattctcaaacacagttacacttgtgcaccctctatcccaataggcagactgggtttctagcccatggacttcacataagctcagaatccaagtgaacactag

SEQ ID NO: 137822 - DNA, 5534 bp, Artificial Sequence
  derived and/or modified sequence
tagggatccttatttgagccacgttgtcctcctttctaatacttctgcccctcaccctgagacccgcctcgcccacccccgctccccagagctccctgtattccgcccttttattcacttgcctcactctctgtcgcctcctcctccctcctgggcattttacttatgctcactcctctggcactctcacacctttatgcagtcattcgtgaccacaagcccggtttttccttccgctcagccctgctgcccttcctttcattccctcctgtggacattttcacctggcgttacctgctgtcaaacggcctcctcccactggggcctttctagactcgggggccctccttggcccctcctcctggcaggaagcaagatggagctgttgggagaggcctgtggaatctgggatctgccgcccctgccggagagaaggctggggcatccgctccccatccacaactttcctggtggctctgcagacccctgtaacccacagctgtgactcataaccgaggttggaaaagagactgttcaaaccactgaggatcagattttgaagagagatatgccaccagcatttattaaggttgagaatgcttgcaccaagcttgtccaggcagctcagatgcttcagtcagacccttactcagtgcctgctcgagattatctaattgatgggtcaaggggcatcctctctggaacatcagacctgctccttaccttcgatgaggctgaggtccgtaaaattattagagtttgcaaaggaattttggaatatcttacagtggcagaggtggtggagactatggaagatttggtcacttacacaaagaatcttgggccaggaatgactaagatggccaagatgattgacgagagacagcaggagctcactcaccaggagcaccgagtgatgttggtgaactcgatgaacaccgtgaaagagttgctgccagttctcatttcagctatgaagatttttgtaacaactaaaaactcaaaaaaccaaggcatagaggaagctttaaaaaatcgcaattttactgtagaaaaaatgagtgctgaaattaatgagataattcgtgtgttacaactcacctcttgggatgaagatgcctgggccagcaaggacactgaagccatgaagagagcattggcctccatagactccaaactgaaccaggccaaaggttggctccgtgaccctagtgcctccccaggggatgctggtgagcaggccatcagacagatcttagatgaagctggaaaagttggtgaactctgtgcaggcaaagaacgcagggagattctgggaacttgcaaaatgctagggcagatgactgatcaagtggctgacctccgtgccagaggacaaggatcctcaccggtggccatgcagaaagctcagcaggtatctcagggtctggatgtgctcacagcaaaagtggaaaatgcagctcgcaagctggaagccatgaccaactcaaagcagagcattgcaaagaagatcgatgctgctcagaactggcttgcagatccaaatggtggaccggaaggagaagagcagattcgaggtgctttggctgaagctcggaaaatagcagaattatgtgatgatcctaaagaaagagatgacattctacgttcccttggggaaatatctgctctgacttctaaattagcagatctacgaagacaggggaaaggagattctccagaggctcgagccttggccaaacaggtggccacggccctgcagaacctgcagaccaaaaccaaccgggctgtggccaacagcagaccggccaaagcagctgtacaccttgagggcaagattgagcaagcacagcggtggattgataatcccacagtggatgaccgtggagtcggtcaggctgccatccgggggcttgtggccgaagggcatcgtctggctaatgttatgatggggccttatcggcaagatcttctcgccaagtgtgaccgagtggaccagctgacagcccagctggctgacctggctgccagaggggaaggggagagtcctcaggcacgagcacttgcatctcagctccaagactccttaaaggatctaaaagctcggatgcaggaggccatgactcaggaagtgtcagatgttttcagcgataccacaactcccatcaagctgttggcagtggcagccacggcgcctcctgatgcgcctaacagggaagaggtatttgatgagagggcagctaactttgaaaaccattcaggaaagcttggtgctacggccgagaaggcggctgcggttggtactgctaataaatcaacagtggaaggcattcaggcctcagtgaagacggcccgagaactcacaccccaggtggtctcggctgctcgtatcttacttaggaaccctggaaatcaagctgcttatgaacattttgagaccatgaagaaccagtggatcgataatgttgaaaaaatgacagggctggtggacgaagccattgataccaaatctctgttggatgcttcagaagaagcaattaaaaaagacctggacaagtgcaaggtagctatggccaacattcagcctcagatgctggttgctggggcaaccagtattgctcgtcgggccaaccggatcctgctggtggctaagagggaggtggagaattccgaggatcccaagttccgtgaggctgtgaaagctgcctctgatgaattgagcaaaaccatctccccgatggtgatggatgcaaaagctgtggctggaaacatttccgaccctggactgcaaaagagcttcctggactcaggatatcggatcctgggagctgtggccaaggtcagagaagccttccaacctcaggagcctgacttcccgccgcctccaccagaccttgaacaactccgactaacagatgagcttgctcctcccaaaccacctctgcctgaaggtgaggtccctccacctaggcctccaccaccagaggaaaaggatgaagagttccctgagcagaaggccggggaggtgattaaccagccaatgatgatggctgccagacagctccatgatgaagctcgcaaatggtccagcaagggcaatgacatcattgcagcagccaagcgcatggctctgctgatggctgagatgtctcggctggtaagagggggcagtggtaccaagcgggcactcattcagtgtgccaaggacatcgccaaggcctcagatgaggtgactcggttggccaaggaggttgccaagcagtgcacagataaacggattagaaccaacctcttacaggtatgtgagcgaatcccaaccataagcacccagctcaaaatcctgtccacagtgaaggccaccatgctgggccggaccaacatcagtgatgaggagtctgagcaggccacagagatgctggttcacaatgcccagaacctcatgcagtctgtgaaggagactgtgcgggaactgaagctgcttcaatcaaaattcgaacagatgctggatttacactgcgctgggttagaaagactccctggtaccagtaggcacctggctgagcctggctggcacagaaacctctactaaaaagaaggaaaatgatctgagtcccaggagctgcccagagttgctgggagctgaaaaatcacatcctggcctggcacatcagaaaggaatgggggcctcttcaaattagaagacatttatactcttttttcatggacactttgaaatgtgtttctgtataaagcctgtattctcaaacacagttacacttgtgcaccctctatcccaataggcagactgggtttctagcccatggacttcacataagctcagaatccaagtgaacactagccagacactctgctctgcccttgttccctaggggacacttccctctgtttctctttccttggctcccattcactcttccagaatcccaagacccagggcccaggcaaatcagttactaagaagaaaattgctgtgcctcccaaaattgttttgagctttccatgttgctgccaaccataccttccttccctgggctgtgctacctgggtccttttcagaagtgagctttgctgctacaggggaaggtggcctctgtggagccccagcatatgggggcctggattcatttcctgcccttcctcagtttaatccttctagtttcccacaatataaaactgtacttcactgtcaggaagaaatcacagaatcatatgattctgcttttaccatgcccctgagcaatgtctgtgctagggaaacttcccgtcccatatcctgcctcagcccgccaaggtagccatcccatgaacacactgtgtcctggtgctctctgccactggaagggcagagtagccagggtgtggccctgccatcttcccagcagggccactcccggcactccatgcttagtcactgcctgcagaggtctgtgctgaggccttatcattcattcttagctcttaattgttcattttgagctgaaatgctgcattttaattttaaccaaaacatgtctcctatcctggtttttgtagccttcctccacatcctttctaaacaagattttaaagacatgtaggtgtttgttcatctgtaactctaaaagatcctttttaaattcagtcctaagaaagaggagtgcttgtcccctaagagtgtttaatggcaaggcagccctgtctgaaggacacttcctgcctaagggagagtggtatttgcagactagaattctagtgctgctgaagatgaatcaatgggaaatactactcctgtaattcctacctccctgcaaccaactacaaccaagctctctgcatctactcccaagtatggggttcaagagagtaatgggtttcatatttcttatcaccacagtaagttcctactaggcaaaatgagagggcagtgtttcctttttggtacttattactgctaagtatttcccagcacatgaaaccttattttttcccaaagccagaaccagatgagtaaaggagtaagaaccttgcctgaacatccttccttcccacccatcgctgtgtgttagttcccaacatcgaatgtgtacaacttaagttggtcctttacactcaggctttcactatttcctttataatgaggatgattattttcaaggccctcagcatatttgtatagttgcttgcctgatataaatgcaatattaatgcctttaaagtatgaatctatgccaaagatcacttgttgttttactaaagaaagattacttagaggaaataagaaaaatcatgtttgctctcccggttcttccagtggtttgagacactggtttacactttatgccggatgtgcttttctccaatatcagtgctcgagacacagtgaagcaaattaaaaaaaaaaaaaaaaaaaatccctgaatgatgattagagacatcaccgctaaaaaactacatttataagctaggatttgttatatgcaaatattttctgcctcttcttttgttctgtttaaaacaataaaatgcatttgtat

SEQ ID NO: 137823 - protein, 395 aa, Artificial Sequence
  derived and/or modified sequence
LTDRQTDTAPSPSYHLLPGRRRTVDAAASRGQGPEPAPGGGVEGVGARGVALKLFVQLLGCSRFGGAVVRAGEAEPSGAARSASSGREEPQPEEGEEEEEKEEERGPQWRLGARKPGSWTGEAAVCADSAPAARAPQALARASGRGGRVARRGAEESGPPHSPSRRGSASRAGPGRASETMNFLLSWVHWSLALLLYLHHAKWSQAAPMAEGGGQNHHEVVKFMDVYQRSYCHPIETLVDIFQEYPDEIEYIFKPSCVPLMRCGGCCNDEGLECVPTEESNITMQIMRIKPHQGQHIGEMSFLQHNKCECRPKKDRARQEKKSVRGKGKGQKRKRKKSRYKSWSVPCGPCSERRKHLFVQDPQTCKCSCKNTDSRCKARQLELNERTCRCDKPRR

SEQ ID NO: 137824 - protein, 215 aa, Artificial Sequence
  derived and/or modified sequence
MNFLLSWVHWSLALLLYLHHAKWSQAAPMAEGGGQNHHEVVKFMDVYQRSYCHPIETLVDIFQEYPDEIEYIFKPSCVPLMRCGGCCNDEGLECVPTEESNITMQIMRIKPHQGQHIGEMSFLQHNKCECRPKKDRARQEKKSVRGKGKGQKRKRKKSRYKSWSVPCGPCSERRKHLFVQDPQTCKCSCKNTDSRCKARQLELNERTCRCDKPRR

SEQ ID NO: 137825 - protein, 395 aa, Artificial Sequence
  derived and/or modified sequence
MTDRQTDTAPSPSYHLLPGRRRTVDAAASRGQGPEPAPGGGVEGVGARGVALKLFVQLLGCSRFGGAVVRAGEAEPSGAARSASSGREEPQPEEGEEEEEKEEERGPQWRLGARKPGSWTGEAAVCADSAPAARAPQALARASGRGGRVARRGAEESGPPHSPSRRGSASRAGPGRASETMNFLLSWVHWSLALLLYLHHAKWSQAAPMAEGGGQNHHEVVKFMDVYQRSYCHPIETLVDIFQEYPDEIEYIFKPSCVPLMRCGGCCNDEGLECVPTEESNITMQIMRIKPHQGQHIGEMSFLQHNKCECRPKKDRARQEKKSVRGKGKGQKRKRKKSRYKSWSVPCGPCSERRKHLFVQDPQTCKCSCKNTDSRCKARQLELNERTCRCDKPRR

SEQ ID NO: 137826 - DNA, 3626 bp, Artificial Sequence
  derived and/or modified sequence
tcgcggaggcttggggcagccgggtagctcggaggtcgtggcgctgggggctagcaccagcgctctgtcgggaggcgcagcggttaggtggaccggtcagcggactcaccggccagggcgctcggtgctggaatttgatattcattgatccgggttttatccctcttcttttttcttaaacatttttttttaaaactgtattgtttctcgttttaatttatttttgcttgccattccccacttgaatcgggccgacggcttggggagattgctctacttccccaaatcactgtggattttggaaaccagcagaaagaggaaagaggtagcaagagctccagagagaagtcgaggaagagagagacggggtcagagagagcgcgcgggcgtgcgagcagcgaaagcgacaggggcaaagtgagtgacctgcttttgggggtgaccgccggagcgcggcgtgagccctcccccttgggatcccgcagctgaccagtcgcgctgacggacagacagacagacaccgcccccagccccagctaccacctcctccccggccggcggcggacagtggacgcggcggcgagccgcgggcaggggccggagcccgcgcccggaggcggggtggagggggtcggggctcgcggcgtcgcactgaaacttttcgtccaacttctgggctgttctcgcttcggaggagccgtggtccgcgcgggggaagccgagccgagcggagccgcgagaagtgctagctcgggccgggaggagccgcagccggaggagggggaggaggaagaagagaaggaagaggagagggggccgcagtggcgactcggcgctcggaagccgggctcatggacgggtgaggcggcggtgtgcgcagacagtgctccagccgcgcgcgctccccaggccctggcccgggcctcgggccggggaggaagagtagctcgccgaggcgccgaggagagcgggccgccccacagcccgagccggagagggagcgcgagccgcgccggccccggtcgggcctccgaaaccatgaactttctgctgtcttgggtgcattggagccttgccttgctgctctacctccaccatgccaagtggtcccaggctgcacccatggcagaaggaggagggcagaatcatcacgaagtggtgaagttcatggatgtctatcagcgcagctactgccatccaatcgagaccctggtggacatcttccaggagtaccctgatgagatcgagtacatcttcaagccatcctgtgtgcccctgatgcgatgcgggggctgctgcaatgacgagggcctggagtgtgtgcccactgaggagtccaacatcaccatgcagattatgcggatcaaacctcaccaaggccagcacataggagagatgagcttcctacagcacaacaaatgtgaatgcagaccaaagaaagatagagcaagacaagaaaaaaaatcagttcgaggaaagggaaaggggcaaaaacgaaagcgcaagaaatcccggtataagtcctggagcgttccctgtgggccttgctcagagcggagaaagcatttgtttgtacaagatccgcagacgtgtaaatgttcctgcaaaaacacagactcgcgttgcaaggcgaggcagcttgagttaaacgaacgtacttgcagatgtgacaagccgaggcggtgagccgggcaggaggaaggagcctccctcagggtttcgggaaccagatctctcaccaggaaagactgatacagaacgatcgatacagaaaccacgctgccgccaccacaccatcaccatcgacagaacagtccttaatccagaaacctgaaatgaaggaagaggagactctgcgcagagcactttgggtccggagggcgagactccggcggaagcattcccgggcgggtgacccagcacggtccctcttggaattggattcgccattttatttttcttgctgctaaatcaccgagcccggaagattagagagttttatttctgggattcctgtagacacacccacccacatacatacatttatatatatatatattatatatatataaaaataaatatctctattttatatatataaaatatatatattctttttttaaattaacagtgctaatgttattggtgtcttcactggatgtatttgactgctgtggacttgagttgggaggggaatgttcccactcagatcctgacagggaagaggaggagatgagagactctggcatgatcttttttttgtcccacttggtggggccagggtcctctcccctgcccaggaatgtgcaaggccagggcatgggggcaaatatgacccagttttgggaacaccgacaaacccagccctggcgctgagcctctctaccccaggtcagacggacagaaagacagatcacaggtacagggatgaggacaccggctctgaccaggagtttggggagcttcaggacattgctgtgctttggggattccctccacatgctgcacgcgcatctcgcccccaggggcactgcctggaagattcaggagcctgggcggccttcgcttactctcacctgcttctgagttgcccaggagaccactggcagatgtcccggcgaagagaagagacacattgttggaagaagcagcccatgacagctccccttcctgggactcgccctcatcctcttcctgctccccttcctggggtgcagcctaaaaggacctatgtcctcacaccattgaaaccactagttctgtccccccaggagacctggttgtgtgtgtgtgagtggttgaccttcctccatcccctggtccttcccttcccttcccgaggcacagagagacagggcaggatccacgtgcccattgtggaggcagagaaaagagaaagtgttttatatacggtacttatttaatatccctttttaattagaaattaaaacagttaatttaattaaagagtagggttttttttcagtattcttggttaatatttaatttcaactatttatgagatgtatcttttgctctctcttgctctcttatttgtaccggtttttgtatataaaattcatgtttccaatctctctctccctgatcggtgacagtcactagcttatcttgaacagatatttaattttgctaacactcagctctgccctccccgatcccctggctccccagcacacattcctttgaaataaggtttcaatatacatctacatactatatatatatttggcaacttgtatttgtgtgtatatatatatatatatgtttatgtatatatgtgattctgataaaatagacattgctattctgttttttatatgtaaaaacaaaacaagaaaaaatagagaattctacatactaaatctctctccttttttaattttaatatttgttatcatttatttattggtgctactgtttatccgtaataattgtggggaaaagatattaacatcacgtctttgtctctagtgcagtttttcgagatattccgtagtacatatttatttttaaacaacgacaaagaaatacagatatatcttaaaaaaaaaaaagcattttgtattaaagaatttaattctgatctcaaaaaaaaaaaaaaaaaa

SEQ ID NO: 137827 - DNA, 1185 bp, Artificial Sequence
  derived and/or modified sequence
ctgaccgaccgccagaccgacaccgcccccagccccagctaccacctgctgcccggccgccgccgcaccgtggacgccgccgccagccgcggccagggccccgagcccgcccccggcggcggcgtggagggcgtgggcgcccgcggcgtggccctgaagctgttcgtgcagctgctgggctgcagccgcttcggcggcgccgtggtgcgcgccggcgaggccgagcccagcggcgccgcccgcagcgccagcagcggccgcgaggagccccagcccgaggagggcgaggaggaggaggagaaggaggaggagcgcggcccccagtggcgcctgggcgcccgcaagcccggcagctggaccggcgaggccgccgtgtgcgccgacagcgcccccgccgcccgcgccccccaggccctggcccgcgccagcggccgcggcggccgcgtggcccgccgcggcgccgaggagagcggccccccccacagccccagccgccgcggcagcgccagccgcgccggccccggccgcgccagcgagaccatgaacttcctgctgagctgggtgcactggagcctggccctgctgctgtacctgcaccacgccaagtggagccaggccgcccccatggccgagggcggcggccagaaccaccacgaggtggtgaagttcatggacgtgtaccagcgcagctactgccaccccatcgagaccctggtggacatcttccaggagtaccccgacgagatcgagtacatcttcaagcccagctgcgtgcccctgatgcgctgcggcggctgctgcaacgacgagggcctggagtgcgtgcccaccgaggagagcaacatcaccatgcagatcatgcgcatcaagccccaccagggccagcacatcggcgagatgagcttcctgcagcacaacaagtgcgagtgccgccccaagaaggaccgcgcccgccaggagaagaagagcgtgcgcggcaagggcaagggccagaagcgcaagcgcaagaagagccgctacaagagctggagcgtgccctgcggcccctgcagcgagcgccgcaagcacctgttcgtgcaggacccccagacctgcaagtgcagctgcaagaacaccgacagccgctgcaaggcccgccagctggagctgaacgagcgcacctgccgctgcgacaagccccgccgc

SEQ ID NO: 137828 - DNA, 1188 bp, Artificial Sequence
  derived and/or modified sequence
ctgaccgacagacagaccgacaccgcccccagccccagctaccacctgctgcccggcagaagaagaaccgtggacgccgccgccagcagaggccagggccccgagcccgcccccggcggcggcgtggagggcgtgggcgccagaggcgtggccctgaagctgttcgtgcagctgctgggctgcagcagattcggcggcgccgtggtgagagccggcgaggccgagcccagcggcgccgccagaagcgccagcagcggcagagaggagccccagcccgaggagggcgaggaggaggaggagaaggaggaggagagaggcccccagtggagactgggcgccagaaagcccggcagctggaccggcgaggccgccgtgtgcgccgacagcgcccccgccgccagagccccccaggccctggccagagccagcggcagaggcggcagagtggccagaagaggcgccgaggagagcggccccccccacagccccagcagaagaggcagcgccagcagagccggccccggcagagccagcgagaccatgaacttcctgctgagctgggtgcactggagcctggccctgctgctgtacctgcaccacgccaagtggagccaggccgcccccatggccgagggcggcggccagaaccaccacgaggtggtgaagttcatggacgtgtaccagagaagctactgccaccccatcgagaccctggtggacatcttccaggagtaccccgacgagatcgagtacatcttcaagcccagctgcgtgcccctgatgagatgcggcggctgctgcaacgacgagggcctggagtgcgtgcccaccgaggagagcaacatcaccatgcagatcatgagaatcaagccccaccagggccagcacatcggcgagatgagcttcctgcagcacaacaagtgcgagtgcagacccaagaaggacagagccagacaggagaagaagagcgtgagaggcaagggcaagggccagaagagaaagagaaagaagagcagatacaagagctggagcgtgccctgcggcccctgcagcgagagaagaaagcacctgttcgtgcaggacccccagacctgcaagtgcagctgcaagaacaccgacagcagatgcaaggccagacagctggagctgaacgagagaacctgcagatgcgacaagcccagaagatag

SEQ ID NO: 137829 - DNA, 1188 bp, Artificial Sequence
  derived and/or modified sequence
ttgaccgataggcaaaccgacactgcccctagtccatcctaccacctcctcccaggccgacgtcggactgtggacgctgccgcatctcggggacagggacctgagccggcaccgggtgggggagttgagggagtcggagctagaggggttgcattgaaactgttcgtacaactcctgggatgctccaggttcgggggcgctgtggtgagagctggagaggctgagccatccggggccgccaggtccgcgtcctctgggcgggaagagccacagcccgaagaaggcgaggaagaggaggagaaagaagaagagcgaggcccacaatggcgtctgggcgcccgaaagcctggaagttggacgggcgaagccgcagtgtgtgcagatagcgctcctgcagccagggcccctcaagccctggctcgggctagcgggaggggggggcgcgtcgcccggcggggagctgaggaatccggaccgccacactccccatctcgccgaggcagtgcctctcgtgctggcccaggcagagcgtcggaaaccatgaatttcttgctcagttgggtgcactggagtttggcattgctgctgtatcttcatcacgctaagtggagccaggcagcacccatggccgaaggcggaggacagaaccaccatgaggttgtgaaatttatggatgtgtaccagaggtcatactgtcacccaatcgaaacccttgtggacatctttcaagaatacccggatgagatcgaatacatctttaaaccctcttgtgttcctttgatgcgctgtggagggtgctgcaacgacgagggacttgaatgcgtcccaaccgaggagtctaatatcactatgcagataatgcggatcaagccgcaccagggtcaacatattggggagatgtctttcctccagcacaacaaatgtgaatgccgtccaaagaaggaccgcgcccggcaggaaaagaagtccgtgcggggcaagggaaaaggacagaaacggaagaggaaaaaatcacgatacaaatcttggagcgtgccgtgcggcccatgtagcgaaagaagaaagcaccttttcgtacaggatccacagacttgcaagtgctcctgcaaaaatactgattcccggtgcaaggccaggcagctggaattgaatgaacgcacctgcagatgcgataagcctcggcgatag

SEQ ID NO: 137830 - DNA, 1188 bp, Artificial Sequence
  derived and/or modified sequence
ctgacagaccggcagacagacacagcccccagccccagctaccacctgctgcccggcagaagaagaacagtggatgctgctgccagccggggccagggccctgagcccgcccctgggggcggcgtggagggcgtgggcgcccggggcgtggccctgaagctgtttgtgcagctgctgggctgcagcagatttggaggagctgtggtgcgggccggggaggccgagcccagcggggccgcccggagcgccagcagcggccgggaggagccccagcctgaggagggggaggaggaggaggagaaggaggaggagcggggcccccagtggaggctgggcgccaggaagccaggctcctggacaggagaggccgctgtgtgtgccgacagcgccccagctgcccgggccccccaggccctggcccgggccagcggccggggcggccgggtggccaggagaggagctgaggagagcggccccccccacagccccagcagaagaggcagcgccagccgggccggccctggccgggccagcgagaccatgaacttcctgctgtcctgggtgcactggagcctggccctgctgctgtacctgcaccacgccaagtggagccaggccgcccccatggccgagggcggcggccagaaccaccacgaggtggtgaagttcatggatgtgtaccagaggagctactgccaccccatcgagaccctggtggacatcttccaggagtacccagatgaaattgagtacatcttcaagcccagctgtgtgcccctgatgagatgtggcggctgctgcaatgatgagggcctggagtgtgtgcccacagaggagagcaacatcaccatgcagatcatgaggatcaagccccaccagggccagcacatcggggagatgtccttcctgcagcacaacaagtgtgaatgtcggcccaagaaggaccgggcccggcaggagaagaagtctgtgcggggcaagggcaagggccagaagaggaagaggaagaagagccgctacaagtcctggagcgtgccctgtggcccctgcagcgagaggaggaagcacctgtttgtgcaggacccccagacctgcaagtgcagctgcaagaacacagacagccgctgcaaggcccggcagctggagctgaatgaaagaacctgccgctgtgacaagcccaggaggtag

SEQ ID NO: 137831 - DNA, 1188 bp, Artificial Sequence
  derived and/or modified sequence
ctgaccgaccggcagaccgacaccgcccccagccccagctaccacctcctgcctgggcggcgcaggactgtggatgcggctgcatcaagggggcagggaccagagccggcacctggcggcggggtggaaggcgtgggggcccggggggtggccctcaagctgttcgtccagctgctgggttgctcccgcttcgggggtgccgttgttcgcgcaggggaggctgaaccatccggagcagcaaggtcagcttcgtcaggcagagaggaaccacagcctgaggagggggaagaggaggaagaaaaggaagaagagcggggtcctcagtggcgcctaggcgctagaaaacccggtagttggacaggcgaggccgcagtgtgtgctgatagcgcccctgccgcaagggccccacaggctctcgctcgtgcttcagggaggggcggaagagtcgctaggagaggtgcagaagaaagtggcccgcctcactcgccttcccggagaggatccgcatccagagctggccccggtagggccagcgaaacgatgaactttttattgagctgggtacactggtctctggcgctactgctgtaccttcaccatgctaagtggtctcaggctgcccctatggccgagggaggcggacagaaccaccatgaggtagtcaaattcatggatgtgtaccagaggagctactgccaccctatagagacgctagttgacatcttccaggaataccccgacgaaatcgagtatattttcaaaccttcgtgcgtgcccttgatgcgctgcgggggctgttgcaacgatgaggggctagagtgtgtacccaccgaggaatcaaatattaccatgcagatcatgcggatcaagcctcatcagggccagcatatcggggagatgagctttcttcagcataacaaatgtgagtgccggcctaaaaaagatagggcccgccaggagaagaaatccgtgaggggaaaagggaaggggcagaagaggaaacgaaaaaagagcaggtataagtcctggtccgtcccatgcggaccttgttcagaacggcgcaaacacttgtttgtccaggacccccagacctgtaaatgctcttgcaaaaacactgatagtcgatgtaaagctagacagctcgagttaaatgaaagaacctgcaggtgcgataagccacggaggtag

SEQ ID NO: 137832 - DNA, 1188 bp, Artificial Sequence
  derived and/or modified sequence
ctcaccgacaggcagacggatactgccccttctccctcataccaccttctgcctgggagacggaggacagtggacgcagctgcctcccgtggacagggtcccgagccagccccagggggaggggttgagggagttggcgctaggggagtggccctgaagttattcgtccagttgcttggatgctcccgcttcggcggtgctgtggtgagggccggagaagctgagccctcaggggctgccagaagcgcttcttctggtcgagaggagccgcaacccgaagaaggcgaagaggaagaggagaaggaggaagagagaggccctcaatggcgtctaggcgctagaaagccaggctcttggacaggcgaggcggcagtgtgtgcagactccgcacccgctgctcgcgctccacaggccctggccagggcctcgggtcgtggcggtcgagtggctagacgaggcgctgaagaatcaggccctcctcacagccccagtcggaggggttcagcatccagagccggtcccggtagggcctccgagaccatgaactttttgttatcgtgggtgcattggagtcttgcactgcttctgtatctccaccatgcaaagtggtcccaggccgctcccatggccgagggaggaggccaaaatcaccacgaggtggttaagttcatggatgtctaccagcgtagttactgtcatcccattgaaacgcttgttgacatttttcaggagtacccggacgagatcgagtacatttttaagccatcatgtgttccgctgatgcgttgtgggggatgctgcaatgacgagggcctggaatgtgtgccgaccgaagaaagcaacataactatgcagatcatgcggattaaaccccaccaagggcagcacataggcgagatgtcatttctgcagcacaacaaatgtgagtgtaggcccaagaaggaccgtgccaggcaggaaaagaagtccgtgaggggaaagggtaaggggcaaaaaagaaaacgcaagaagtctcgttacaagagctggtcagtcccgtgcggcccatgctctgagagaaggaaacacttatttgttcaagatccccagacctgtaaatgcagttgtaaaaatacagatagcagatgcaaagcccgacaactggagctgaatgagcgcacttgcagatgcgataagccgcgacggtag

SEQ ID NO: 137833 - DNA, 1188 bp, Artificial Sequence
  derived and/or modified sequence
ctcaccgacagacagaccgacacagcaccgtcaccatcttaccatctgctgcccggtcgcagaaggacagtggacgcagccgcatctagagggcaagggcctgaaccagctcccggagggggtgtggagggcgtgggcgcgcgaggcgtggctctcaagctgttcgttcaattattgggatgtagccgctttggtggcgcagtcgtaagagcgggagaagccgagccttcgggcgccgcaagatccgcctcatcaggtagggaggagccgcaacccgaagagggagaagaagaggaagaaaaagaggaggaaaggggaccgcagtggcgacttggggccaggaagccgggaagctggactggcgaagccgctgtgtgtgcagattccgctcccgctgctagagcgcctcaggcactggccagggctagtggccgcgggggcagggtggctcgaagaggagctgaggagagtggcccacctcactcccccagcaggagaggcagcgcctcgcgagcgggccccgggagagcctcagagaccatgaattttttgctgagctgggttcattggagcttggcccttttgctttacctgcaccacgctaaatggagtcaggccgccccaatggcagaaggcggcggacagaatcaccatgaggtagttaagttcatggatgtctatcagaggagctattgtcatcccatcgagaccctggtcgatatttttcaagaataccccgacgagatcgaatatattttcaaaccttcatgcgttccccttatgaggtgcggagggtgctgtaacgacgagggcctcgagtgcgttccgaccgaagaaagcaatatcaccatgcaaatcatgagaatcaaaccccaccaaggccaacatataggagaaatgagtttccttcaacataacaagtgcgaatgcagacccaagaaagacagggcaagacaggagaaaaagtcagtgcgggggaaggggaaaggtcaaaaacggaaaagaaagaaatctaggtacaagagctggagcgtaccttgtggtccctgcagcgagagacgcaagcacctgttcgtccaagatccacagacttgtaagtgctcatgcaaaaacactgactccaggtgcaaggcgcgccagctggaactcaatgagcggacttgtcgctgcgacaagcccaggaggtag

SEQ ID NO: 137834 - DNA, 1188 bp, Artificial Sequence
  derived and/or modified sequence
ctcaccgacagacagaccgacacagcaccgtcaccatcttaccatctgctgcccggtcgcagaaggacagtggacgcagccgcatctagagggcaagggcctgaaccagctcccggagggggtgtggagggcgtgggcgcgcgaggcgtggctctcaagctgttcgttcaattattgggatgtagccgctttggtggcgcagtcgtaagagcgggagaagccgagccttcgggcgccgcaagatccgcctcatcaggtagggaggagccgcaacccgaagagggagaagaagaggaagaaaaagaggaagaaagggggcctcaatggaggttgggggcccggaaacccggatcgtggactggggaggcagccgtgtgtgctgacagtgcgcctgccgctagggccccgcaagcactagctagagcgtcaggcagaggcggccgcgtagctagacggggtgccgaggagtctggacctccccatagcccttctcgacgaggtagcgcctcacgagccgggcccggaagagcttctgaaacaatgaattttctgctgtcttgggtacattggagcttggccttgctgctttacttacaccacgctaaatggagtcaggccgccccaatggcagaaggcggcggacagaatcaccatgaggtagttaagttcatggatgtctatcagaggagctattgtcatcccatcgagaccctggtcgatatttttcaagaataccccgacgagatcgaatatattttcaaaccttcatgcgttccccttatgaggtgcggagggtgctgtaacgacgagggcctcgagtgcgttccgaccgaagaaagcaatatcaccatgcaaatcatgagaatcaaaccccaccaaggccaacatataggagaaatgtccttcctgcagcacaacaagtgcgaatgtagaccgaagaaggaccgggcgaggcaggaaaagaaatccgtgagaggcaagggcaaaggacagaaaagaaagagaaaaaagagtcggtataaatcatggagcgtaccgtgcggaccttgtagcgagagaagaaagcacctgttcgtgcaggacccacaaacctgtaaatgctcctgcaagaacactgactcccgctgtaaggctagacagctggaactaaatgaaagaacatgtcgctgtgataaaccaagaagatag

SEQ ID NO: 137835 - DNA, 1575 bp, Artificial Sequence
  derived and/or modified sequence
ctgacggacagacagacagacaccgcccccagccccagctaccacctcctccccggccggcggcggacagtggacgcggcggcgagccgcgggcaggggccggagcccgcgcccggaggcggggtggagggggtcggggctcgcggcgtcgcactgaaacttttcgtccaacttctgggctgttctcgcttcggaggagccgtggtccgcgcgggggaagccgagccgagcggagccgcgagaagtgctagctcgggccgggaggagccgcagccggaggagggggaggaggaagaagagaaggaagaggagagggggccgcagtggcgactcggcgctcggaagccgggctcatggacgggtgaggcggcggtgtgcgcagacagtgctccagccgcgcgcgctccccaggccctggcccgggcctcgggccggggaggaagagtagctcgccgaggcgccgaggagagcgggccgccccacagcccgagccggagagggagcgcgagccgcgccggccccggtcgggcctccgaaaccatgaactttctgctgtcttgggtgcattggagccttgccttgctgctctacctccaccatgccaagtggtcccaggctgcacccatggcagaaggaggagggcagaatcatcacgaagtggtgaagttcatggatgtctatcagcgcagctactgccatccaatcgagaccctggtggacatcttccaggagtaccctgatgagatcgagtacatcttcaagccatcctgtgtgcccctgatgcgatgcgggggctgctgcaatgacgagggcctggagtgtgtgcccactgaggagtccaacatcaccatgcagattatgcggatcaaacctcaccaaggccagcacataggagagatgagcttcctacagcacaacaaatgtgaatgcagaccaaagaaagatagagcaagacaagaaaaaaaatcagttcgaggaaagggaaaggggcaaaaacgaaagcgcaagaaatcccggtataagtcctggagcgttccctgtgggccttgctcagagcggagaaagcatttgtttgtacaagatccgcagacgtgtaaatgttcctgcaaaaacacagactcgcgttgcaaggcgaggcagcttgagttaaacgaacgtacttgcagatgtgacaagccgaggcggtgagccgggcaggaggaaggagcctccctcagggtttcgggaaccagatctctcaccaggaaagactgatacagaacgatcgatacagaaaccacgctgccgccaccacaccatcaccatcgacagaacagtccttaatccagaaacctgaaatgaaggaagaggagactctgcgcagagcactttgggtccggagggcgagactccggcggaagcattcccgggcgggtgacccagcacggtccctcttggaattggattcgccattttatttttcttgctgctaaatcaccgagcccggaagattagagagttttatttctgggattcctgtagacacacccacccacatacatacatttatatatatatatattatatatatataaa

SEQ ID NO: 137836 - RNA, 1188 nt, Artificial Sequence
  derived and/or modified sequence
cucaccgacagacagaccgacacagcaccgucaccaucuuaccaucugcugcccggucgcagaaggacaguggacgcagccgcaucuagagggcaagggccugaaccagcucccggaggggguguggagggcgugggcgcgcgaggcguggcucucaagcuguucguucaauuauugggauguagccgcuuugguggcgcagucguaagagcgggagaagccgagccuucgggcgccgcaagauccgccucaucagguagggaggagccgcaacccgaagagggagaagaagaggaagaaaaagaggaggaaaggggaccgcaguggcgacuuggggccaggaagccgggaagcuggacuggcgaagccgcugugugugcagauuccgcucccgcugcuagagcgccucaggcacuggccagggcuaguggccgcgggggcaggguggcucgaagaggagcugaggagaguggcccaccucacucccccagcaggagaggcagcgccucgcgagcgggccccgggagagccucagagaccaugaauuuuuugcugagcuggguucauuggagcuuggcccuuuugcuuuaccugcaccacgcuaaauggagucaggccgccccaauggcagaaggcggcggacagaaucaccaugagguaguuaaguucauggaugucuaucagaggagcuauugucaucccaucgagacccuggucgauauuuuucaagaauaccccgacgagaucgaauauauuuucaaaccuucaugcguuccccuuaugaggugcggagggugcuguaacgacgagggccucgagugcguuccgaccgaagaaagcaauaucaccaugcaaaucaugagaaucaaaccccaccaaggccaacauauaggagaaaugaguuuccuucaacauaacaagugcgaaugcagacccaagaaagacagggcaagacaggagaaaaagucagugcgggggaaggggaaaggucaaaaacggaaaagaaagaaaucuagguacaagagcuggagcguaccuuguggucccugcagcgagagacgcaagcaccuguucguccaagauccacagacuuguaagugcucaugcaaaaacacugacuccaggugcaaggcgcgccagcuggaacucaaugagcggacuugucgcugcgacaagcccaggagguag

SEQ ID NO: 137837 - RNA, 1188 nt, Artificial Sequence
  derived and/or modified sequence
cucaccgacagacagaccgacacagcaccgucaccaucuuaccaucugcugcccggucgcagaaggacaguggacgcagccgcaucuagagggcaagggccugaaccagcucccggaggggguguggagggcgugggcgcgcgaggcguggcucucaagcuguucguucaauuauugggauguagccgcuuugguggcgcagucguaagagcgggagaagccgagccuucgggcgccgcaagauccgccucaucagguagggaggagccgcaacccgaagagggagaagaagaggaagaaaaagaggaagaaagggggccucaauggagguugggggcccggaaacccggaucguggacuggggaggcagccgugugugcugacagugcgccugccgcuagggccccgcaagcacuagcuagagcgucaggcagaggcggccgcguagcuagacggggugccgaggagucuggaccuccccauagcccuucucgacgagguagcgccucacgagccgggcccggaagagcuucugaaacaaugaauuuucugcugucuuggguacauuggagcuuggccuugcugcuuuacuuacaccacgcuaaauggagucaggccgccccaauggcagaaggcggcggacagaaucaccaugagguaguuaaguucauggaugucuaucagaggagcuauugucaucccaucgagacccuggucgauauuuuucaagaauaccccgacgagaucgaauauauuuucaaaccuucaugcguuccccuuaugaggugcggagggugcuguaacgacgagggccucgagugcguuccgaccgaagaaagcaauaucaccaugcaaaucaugagaaucaaaccccaccaaggccaacauauaggagaaauguccuuccugcagcacaacaagugcgaauguagaccgaagaaggaccgggcgaggcaggaaaagaaauccgugagaggcaagggcaaaggacagaaaagaaagagaaaaaagagucgguauaaaucauggagcguaccgugcggaccuuguagcgagagaagaaagcaccuguucgugcaggacccacaaaccuguaaaugcuccugcaagaacacugacucccgcuguaaggcuagacagcuggaacuaaaugaaagaacaugucgcugugauaaaccaagaagauag

SEQ ID NO: 137838 - protein, 207 aa, Artificial Sequence
  derived and/or modified sequence
MSPLLRRLLLAALLQLAPAQAPVSQPDAPGHQRKVVSWIDVYTRATCQPREVVVPLTVELMGTVAKQLVPSCVTVQRCGGCCPDDGLECVPTGQHQVRMQILMIRYPSSQLGEMSLEEHSQCECRPKKKDSAVKPDRAATPHHRPQPRSVPGWDSAPGAPSPADITHPTPAPGPSAHAAPSTTSALTPGPAAAAADAAASSVAKGGA

SEQ ID NO: 137839 - DNA, 624 bp, Artificial Sequence
  derived and/or modified sequence
atgagccccctgctgagaagactgctgctggccgccctgctgcagctggcccccgcccaggcccccgtgagccagcccgacgcccccggccaccagagaaaggtggtgagctggatcgacgtgtacaccagagccacctgccagcccagagaggtggtggtgcccctgaccgtggagctgatgggcaccgtggccaagcagctggtgcccagctgcgtgaccgtgcagagatgcggcggctgctgccccgacgacggcctggagtgcgtgcccaccggccagcaccaggtgagaatgcagatcctgatgatcagataccccagcagccagctgggcgagatgagcctggaggagcacagccagtgcgagtgcagacccaagaagaaggacagcgccgtgaagcccgacagagccgccaccccccaccacagaccccagcccagaagcgtgcccggctgggacagcgcccccggcgcccccagccccgccgacatcacccaccccacccccgcccccggccccagcgcccacgccgcccccagcaccaccagcgccctgacccccggccccgccgccgccgccgccgacgccgccgccagcagcgtggccaagggcggcgcctag

SEQ ID NO: 137840 - DNA, 624 bp, Artificial Sequence
  derived and/or modified sequence
atgtcaccattgcttcggcggctgctgctggccgcacttctgcaactggcgcctgcccaagccccggtttctcaacccgatgcgccaggacaccaaaggaaggtggtgtcttggattgacgtctatacccgggctacctgtcaaccacgggaggttgttgtgcccctgaccgtggaacttatgggaactgtggcaaagcagttagttccttcctgtgttactgtccaacggtgcggcggctgctgccctgacgatggcttggagtgtgttccaactggtcaacaccaggttaggatgcagatattgatgattaggtaccctagttctcagcttggagagatgagcttggaagagcactctcagtgtgagtgcagacctaaaaagaaggatagcgcagttaagcctgacagggccgccacacctcaccatcgaccacaaccgagatctgttcccggctgggattctgcacccggtgccccttccccagccgacatcacccatcccacgcctgcccccggtcccagtgcacacgcagctccttccaccaccagcgctctcacacccgggccagcggcggcagccgccgacgctgccgcttcttccgtggctaagggcggcgcgtag

SEQ ID NO: 137841 - DNA, 624 bp, Artificial Sequence
  derived and/or modified sequence
atgagccccctgctgcggcggctgctgctggccgccctgctgcagctggccccagcccaggcccctgtgtcccagccagatgcccctggccaccagaggaaggtggtgtcctggattgatgtgtacacccgggccacctgccagccccgggaggtggtggtgcccctgactgtggagctgatgggcaccgtggccaagcagctggtgcccagctgtgtgacagtgcagagatgtggcggctgctgcccagatgatggcctggagtgtgtgcccaccggccagcaccaggtgaggatgcagatcctgatgatccgctaccccagcagccagctgggggagatgagcctggaggagcacagccagtgtgaatgtcggcccaagaagaaggacagcgctgtgaagccagaccgggccgccaccccccaccaccggccccagcccaggtctgtgcccggctgggacagcgcccctggggcccccagccctgctgacatcacccaccccaccccagcccctggccccagcgcccacgccgcccccagcaccaccagcgccctgaccccaggccctgctgctgctgctgctgatgctgctgccagctctgtggccaagggcggggcctag

SEQ ID NO: 137842 - DNA, 624 bp, Artificial Sequence
  derived and/or modified sequence
atgagccccctgctgcggcggctgctgctggccgccctgctgcagctggcccccgctcaggcccccgtgtcccagcccgacgcccccggacaccaaaggaaagtggtctcctggattgacgtgtacaccagagctacttgccagcccagggaggtggtcgtgcccctgaccgttgagctcatgggaacagtggcaaaacagctcgtgcccagctgtgtaaccgtacaacgatgcgggggctgctgcccagatgatggcttggagtgcgtgccgactggacaacaccaagtgcggatgcagatcctgatgataagatacccctcctcacagctgggagagatgtctctggaagaacactcacaatgcgaatgtagaccaaagaagaaagattccgccgtgaagcctgatagagcagccactcctcaccaccggcctcaacctcggtctgtccccgggtgggacagcgcacctggagccccatcgcctgctgacattacacatcctactccagccccaggcccttcggcccatgccgccccctctaccactagcgctctgactcccggaccagccgctgcagctgccgacgctgcggcttctagcgttgctaaaggaggggcctag

SEQ ID NO: 137843 - DNA, 624 bp, Artificial Sequence
  derived and/or modified sequence
atgagcccactccttcgtcggcttcttcttgccgctctgctacagttggccccagcacaggcacctgtaagccagcctgacgctccaggccatcagagaaaggtggtcagttggattgacgtgtatacccgggctacctgtcagccgagggaggtggtagttccactaacagtcgagctgatggggacggttgccaaacagttggttccaagctgcgtcacagtgcaacgctgcggagggtgttgcccagatgacggactggaatgtgtgccaacaggccagcaccaggtccggatgcagattctaatgatccgctatccaagctcacaacttggagaaatgagcttggaagagcactcacaatgcgaatgtcgtcctaagaagaaagactctgcggttaagcccgatcgggcagccactcctcaccatcggcctcagccgaggagcgtgccagggtgggactcagcaccgggtgcccctagccctgccgatattacccaccccactccagcgccaggcccttcagctcacgccgctcctagcactacctcagcactcacaccagggcctgctgctgccgcagcagacgctgctgcttcatccgtagccaagggaggcgcttag

SEQ ID NO: 137844 - DNA, 1374 bp, Artificial Sequence
  derived and/or modified sequence
atgagccgcctgcccgccagcccgggcccagccccccgccgcccccgccgtccccgccgccgctgcccgccgccaccggccgcccgcccgcccggctcctccggccgcctccgctgcgctgcgctgcgctgcctgcacccagggctcgggagggggccgcggaggagtcgccccccgcgcccggcccccgcccgccgcgcccgggcccgcgccatggggctctggctgtcgccgccccccgcgccgccgggctagggcgatgcgggcgcccccggcgggcggccccggcgggcaccatgagccctctgctccgccgcctgctgctcgccgcactcctgcagctggcccccgcccaggcccctgtctcccagcctgatgcccctggccaccagaggaaagtggtgtcatggatagatgtgtatactcgcgctacctgccagccccgggaggtggtggtgcccttgactgtggagctcatgggcaccgtggccaaacagctggtgcccagctgcgtgactgtgcagcgctgtggtggctgctgccctgacgatggcctggagtgtgtgcccactgggcagcaccaagtccggatgcagatcctcatgatccggtacccgagcagtcagctgggggagatgtccctggaagaacacagccagtgtgaatgcagacctaaaaaaaaggacagtgctgtgaagccagacagggctgccactccccaccaccgtccccagccccgttctgttccgggctgggactctgcccccggagcaccctccccagctgacatcacccatcccactccagccccaggcccctctgcccacgctgcacccagcaccaccagcgccctgacccccggacctgccgctgccgctgccgacgccgcagcttcctccgttgccaagggcggggcttagagctcaacccagacacctgcaggtgccggaagctgcgaaggtgacacatggcttttcagactcagcagggtgacttgcctcagaggctatatcccagtgggggaacaaagaggagcctggtaaaaaacagccaagcccccaagacctcagcccaggcagaagctgctctaggacctgggcctctcagagggctcttctgccatcccttgtctccctgaggccatcatcaaacaggacagagttggaagaggagactgggaggcagcaagaggggtcacataccagctcaggggagaatggagtactgtctcagtttctaaccactctgtgcaagtaagcatcttacaactggctcttcctcccctcactaagaagacccaaacctctgcataatgggatttgggctttggtacaagaactgtgacccccaaccctgataaaagagatggaagga

SEQ ID NO: 137845 - DNA, 1822 bp, Artificial Sequence
  derived and/or modified sequence
gccgtccccgccgccgctgcccgccgccaccggccgcccgcccgcccggctcctccggccgcctccgctgcgctgcgctgcgctgcctgcacccagggctcgggagggggccgcggaggagtcgccccccgcgcccggcccccgcccgccgcgcccgggcccgcgccatggggctctggctgtcgccgccccccgcgccgccgggctagggcgatgcgggcgcccccggcgggcggccccggcgggcaccatgagccctctgctccgccgcctgctgctcgccgcactcctgcagctggcccccgcccaggcccctgtctcccagcctgatgcccctggccaccagaggaaagtggtgtcatggatagatgtgtatactcgcgctacctgccagccccgggaggtggtggtgcccttgactgtggagctcatgggcaccgtggccaaacagctggtgcccagctgcgtgactgtgcagcgctgtggtggctgctgccctgacgatggcctggagtgtgtgcccactgggcagcaccaagtccggatgcagatcctcatgatccggtacccgagcagtcagctgggggagatgtccctggaagaacacagccagtgtgaatgcagacctaaaaaaaaggacagtgctgtgaagccagacagggctgccactccccaccaccgtccccagccccgttctgttccgggctgggactctgcccccggagcaccctccccagctgacatcacccatcccactccagccccaggcccctctgcccacgctgcacccagcaccaccagcgccctgacccccggacctgccgctgccgctgccgacgccgcagcttcctccgttgccaagggcggggcttagagctcaacccagacacctgcaggtgccggaagctgcgaaggtgacacatggcttttcagactcagcagggtgacttgcctcagaggctatatcccagtgggggaacaaagaggagcctggtaaaaaacagccaagcccccaagacctcagcccaggcagaagctgctctaggacctgggcctctcagagggctcttctgccatcccttgtctccctgaggccatcatcaaacaggacagagttggaagaggagactgggaggcagcaagaggggtcacataccagctcaggggagaatggagtactgtctcagtttctaaccactctgtgcaagtaagcatcttacaactggctcttcctcccctcactaagaagacccaaacctctgcataatgggatttgggctttggtacaagaactgtgacccccaaccctgataaaagagatggaaggagctgtccctgcctgtgtcactgtttgtcactgtccaggctggctggtttgggcatgaatgtctgcatcactaaatccagagcttgtcttgctccctcattgtgcagatggaggaaatgaggactaaggccccacagcagatcccaggcagggccagaattatgtattcatcactttcaagttattgccacgcatgggagtcagggatagcccagtcaatacagactgcctgccctcctgctcttcaccagggttcttttctagaaggagacagccttctgtggccagagagcttggggtaggacccagatctactgagtgaccttgcttgtcactacccctgcctctctgagcagcagtttccacatgtgcacatagagggaacagaagattgctgtggttggcgtcctcgggccccagagaagtttgagactatctttacgtaatagaaaagaacacttgttcttcctgccaggcaaaaaaaaaaaaaaaaaa

SEQ ID NO: 137846 - protein, 170 aa, Artificial Sequence
  derived and/or modified sequence
MDTRNKAQLLVLLTLLSVLFSQTSAWPLYRAPSALRLGDRIPFEGANEPDQVSLKEDIDMLQNALAENDTPYYDVSRNARHADGVFTSDFSKLLGQLSAKKYLESLMGKRVSSNISEDPVPVKRHSDAVFTDNYTRLRKQMAVKKYLNSILNGKRSSEGESPDFPEELEK

SEQ ID NO: 137847 - DNA, 510 bp, Artificial Sequence
  derived and/or modified sequence
atggacacccgcaacaaggcccagctgctggtgctgctgaccctgctgagcgtgctgttcagccagaccagcgcctggcccctgtaccgcgcccccagcgccctgcgcctgggcgaccgcatccccttcgagggcgccaacgagcccgaccaggtgagcctgaaggaggacatcgacatgctgcagaacgccctggccgagaacgacaccccctactacgacgtgagccgcaacgcccgccacgccgacggcgtgttcaccagcgacttcagcaagctgctgggccagctgagcgccaagaagtacctggagagcctgatgggcaagcgcgtgagcagcaacatcagcgaggaccccgtgcccgtgaagcgccacagcgacgccgtgttcaccgacaactacacccgcctgcgcaagcagatggccgtgaagaagtacctgaacagcatcctgaacggcaagcgcagcagcgagggcgagagccccgacttccccgaggagctggagaag

SEQ ID NO: 137848 - DNA, 510 bp, Artificial Sequence
  derived and/or modified sequence
atggatactcgaaataaggcgcaactacttgtgctcctgactctcctgtcagtgctgttttcccagacctcagcatggcccctgtacagggcgcctagcgcacttcgcttgggcgacaggatcccatttgaaggtgctaatgagccagaccaggtctcactgaaggaagatatcgacatgctgcagaatgcccttgctgagaatgacactccttattacgatgtctcaaggaacgccaggcacgctgacggcgtctttacatcagacttttcaaagctactcggccagttatccgcgaaaaaatacctggagagcctgatgggaaagagggtaagtagcaacattagcgaggatccggttcccgtaaaaaggcacagtgatgctgtttttaccgacaactatactcgcctgcggaagcagatggcggtgaaaaagtatctgaactcaatcctaaatggtaagaggagttcagaaggtgaaagccctgattttcctgaagagctggagaag

SEQ ID NO: 137849 - DNA, 510 bp, Artificial Sequence
  derived and/or modified sequence
atggacactagaaataaggcccaactgctggtactactcaccttacttagcgtgttattctcacagaccagtgcatggcccctgtatagagccccatcggccctgcgcctcggcgaccgaattccgttcgagggagccaatgagcccgatcaggtgagccttaaagaggatattgatatgctccaaaacgccctggcggagaacgacacaccatattatgacgtttctcgcaacgcccgccatgcggatggcgtatttacctctgattttagcaaattgctgggtcagttgtccgccaagaaatatctggagagtcttatggggaagcgggtgtcttcaaacatcagcgaagatccagtgcctgtaaaacggcatagcgatgccgtgttcaccgacaactatacccggcttcgtaaacagatggcagtgaagaaatatctgaacagcatcctgaacggtaagcgcagtagcgagggtgagtctccggattttcccgaagagctggagaag

SEQ ID NO: 137850 - DNA, 510 bp, Artificial Sequence
  derived and/or modified sequence
atggacacgcgcaataaggcccaacttctggtactgttgacattgttgtcggtgttgttctcccaaacgagcgcctggcccttgtacagagcgccgtcggcccttagactcggagatcgaattccgttcgaaggagccaatgaaccagaccaggtctccttgaaggaagacattgacatgctgcaaaatgctctggcggagaatgatacgccgtattatgatgttagtcgcaacgctcgccacgccgacggagtattcacatccgatttttctaagctcctggggcagttgagcgccaagaaatatttggaaagcttgatgggcaagcgcgtgagttcaaacataagcgaggacccggtgcctgtgaagcgtcattcggatgccgtgttcacagataactacacacgacttcgtaagcaaatggcagtaaagaagtacctgaatagtatactgaacgggaagcggtcgtcggagggcgagtcaccagatttccccgaagagctggaaaag

SEQ ID NO: 137851 - DNA, 510 bp, Artificial Sequence
  derived and/or modified sequence
atggatactcggaacaaggcccagctccttgtgctcctgactctcctgtcggtgctgttctcccaaacctcagcctggccgctgtaccgcgcacccagtgctctgcgcttgggggaccgcatcccgttcgagggagctaacgagccggatcaagtcagtctcaaggaagatatcgatatgcttcagaacgccctggccgaaaatgacactccttactatgacgtttcgaggaacgcgaggcacgccgatggtgtctttacgtcagatttcagcaaattgctgggtcagctctccgcaaagaaataccttgaatcgctgatgggaaagcgcgtctcttcgaatatctccgaggaccccgtgccggtcaagagacattcagacgctgtgtttaccgacaattacacccggcttcgcaagcagatggcagtgaaaaagtacctcaatagcattctgaacggaaaaagaagttccgaaggcgagtcacctgatttcccggaagagcttgaaaag

SEQ ID NO: 137852 - DNA, 510 bp, Artificial Sequence
  derived and/or modified sequence
atggataccaggaataaggctcagcttctggtccttctgaccttgctgtcggtccttttttcacaaaccagcgcatggccgctgtacagggcacctagcgcactgcggctgggtgaccggatccctttcgaaggtgccaacgagccagatcaagtgtcacttaaagaagatattgacatgctgcaaaacgcgcttgccgagaacgacactccatactacgatgtctcgagaaacgcaaggcacgcggacggcgtgtttacctcagatttcagtaaacttctgggacaactgtcggcaaaaaagtaccttgaatcccttatggggaagagagtctcgtccaacatatccgaagatcctgttccagtgaagcggcatagcgatgctgtgttcactgataactacactcggctgaggaagcaaatggcagtgaagaagtaccttaactcgatcctcaacgggaagcgaagctccgaaggcgagtccccagactttccagaagaacttgagaag

SEQ ID NO: 137853 - DNA, 510 bp, Artificial Sequence
  derived and/or modified sequence
atggatacccggaacaaagcccagttgctcgtgctgctcactctcctgagcgtcttgttctcccaaacgtccgcatggccactgtaccgagcgccgtccgcccttaggctgggagacagaatcccgtttgaaggtgcgaacgaacccgatcaggtcagcctgaaagaggacatcgacatgctgcagaacgctttggcagaaaatgacaccccgtattacgacgtgagcagaaatgcacggcacgccgatggcgtgttcacttccgatttttcgaaactcctcgggcagctgtccgcgaagaagtacctggagtcgcttatgggaaagcgcgtcagcagtaatatctcagaggacccagtgcctgttaagcgccattcggacgccgtgttcaccgacaactacactcgcctgcgcaagcaaatggctgtgaaaaagtaccttaactcaattctgaacggaaagcggtcatcggagggcgaatctcctgatttcccggaagagctggaaaag

SEQ ID NO: 137854 - DNA, 510 bp, Artificial Sequence
  derived and/or modified sequence
atggatactagaaacaaggcacaacttctggtgttgcttacccttctttcggtgcttttctcacaaacttcagcgtggcctctgtacagggccccatcagctctccggcttggagacagaattccatttgaaggtgccaatgaacccgatcaagtcagtctcaaagaggatattgatatgcttcagaacgcactcgcagaaaacgatactccatactacgatgtgtcgaggaacgcaagacacgccgatggagtctttacttccgacttctccaaactgcttggacagctttcagccaagaaataccttgagagccttatgggcaagcgtgtctcaagcaacatatccgaagatccggtccctgtgaaacgacatagcgatgcagtgtttaccgacaactacacccgactgagaaagcaaatggcagttaagaagtatctgaactcaattctcaatggtaaacgctcgtccgaaggagaatcccccgattttccagaggaactggaaaag

SEQ ID NO: 137855 - DNA, 510 bp, Artificial Sequence
  derived and/or modified sequence
atggacacccggaacaaggcccaactgctggtcctccttactctcttgtcagtgcttttcagccagacttcagcgtggccgctctaccgggcaccaagtgcactgagactgggcgatcgtatcccattcgaaggagccaacgagccggaccaagtatccctcaaggaagatatcgatatgctccagaatgccctcgctgaaaatgataccccttattacgatgtttcgcgcaatgctcggcatgcggacggagtctttacctccgatttctcaaaacttctggggcagctgtcagctaagaagtacctggaatccctgatgggtaagcgggtgagctccaacattagcgaggacccggtgcctgtgaagcgccactcggacgccgtgtttactgacaattacactcgactgcgcaaacagatggcagtgaagaagtacttgaacagcatactcaacggcaaaaggtcgtcggaaggagagagcccggactttcccgaggagttggagaag

SEQ ID NO: 137856 - DNA, 510 bp, Artificial Sequence
  derived and/or modified sequence
atggatacaagaaataaagctcagttacttgttcttttaacattattatctgttctattctcccaaactagtgcatggccattgtatagagcaccatcagcattaagattaggtgacagaattccatttgaaggagcaaatgaaccagaccaagtttcacttaaagaagatattgatatgttacaaaatgcattggcagaaaatgacacaccatactatgatgttagtagaaatgctagacatgcagatggggtttttacatctgatttttcaaaattattaggacaacttagtgcaaaaaaatatttagaatctcttatggggaaacgagtatctagtaatatatctgaagatccagtaccagtaaaaagacattctgacgctgtattcacagataattatactcgtttaagaaagcaaatggctgttaaaaaatatcttaattcaattttaaatggaaagagatcctcagaaggagaatcaccagacttccctgaagaattggaaaaa

SEQ ID NO: 137857 - DNA, 510 bp, Artificial Sequence
  derived and/or modified sequence
atggatacgcggaacaaggcgcagttattggttttgctcacattactttcggtcttgttttcacagacttctgcgtggcctctgtatcgggccccttccgcactgcgccttggagaccgcattccgtttgagggcgctaacgaacctgatcaggtaagccttaaagaggacattgatatgttacagaatgctctcgctgagaatgatacaccgtattacgacgtatctcgtaatgctagacatgctgatggtgttttcacgtctgacttttctaagttgcttggacaactgtcagctaagaaatatcttgaatctttaatgggaaagcgggtttcttctaatatttcagaggatccggtcccggtgaaaagacactccgatgcggtctttactgataactatacacgattgagaaaacaaatggcggttaagaaatacctcaattctatcctcaatgggaagagaagcagcgaaggagagagcccggacttcccggaagaacttgaaaaa

SEQ ID NO: 137858 - DNA, 510 bp, Artificial Sequence
  derived and/or modified sequence
atggacacacgaaacaaggcacagctattggtccttctcacacttctgtctgttttattttctcagacgagcgcctggccactatatagggctccctccgccttgcggctcggagatagaatcccttttgaaggcgcaaacgaacctgatcaagttagtttaaaagaggatattgacatgctccagaacgccctcgctgagaacgacaccccatactatgacgtgtcgcgaaacgctcgccacgctgacggggtgtttacaagcgatttttccaaactgctgggtcaactctcagctaagaagtatcttgagtccctgatgggcaaaagggtttccagcaacatttccgaagatcctgtgccagttaagaggcacagcgatgctgtttttactgacaattatacacgcctgcggaaacagatggctgtgaaaaagtacctgaactccatcctgaacgggaaaaggtctagtgagggtgagagtcctgatttcccagaagagttagagaaa

SEQ ID NO: 137859 - DNA, 510 bp, Artificial Sequence
  derived and/or modified sequence
atggacacgcgcaataaggcgcagctcttggtgcttctcactctcctctcggtgcttttttcacaaacctcggcatggcctctgtatcgagccccaagcgcattgaggctgggagatagaatcccgttcgagggcgcaaacgagcccgaccaggtgtcgttgaaggaggatatcgacatgcttcaaaacgcgctggccgaaaatgataccccatactacgacgtgagccggaacgctagacacgcggatggagttttcacttccgatttctctaaactgctgggccagctctccgccaagaaatacctcgagtccctgatgggtaagagagtcagctctaacatctcggaggacccggtcccggtgaagcggcattccgacgccgtttttactgacaattacaccagactgcggaagcagatggcggtgaaaaagtacctgaactccattctcaacgggaaaaggtcgtcggaaggagagtctccggatttcccagaagaattggaaaag

SEQ ID NO: 137860 - DNA, 510 bp, Artificial Sequence
  derived and/or modified sequence
atggatactcgcaataaagcccagctgctggttctgctgacgctactgtccgtcctgttttcacagacctctgcttggcccctctacagagccccctcagccctgcggttgggggataggatacctttcgagggtgccaatgagcctgaccaagtttctcttaaagaggacatcgatatgctgcagaatgcattagccgagaacgatactccctattatgacgtgtcaaggaatgccagacatgcagatggagtcttcacctccgatttctcgaagctcctcgggcagttgtctgccaagaaatacttggaaagccttatgggtaaaagggtgtcctccaatatctccgaagaccctgtgccagtgaaacgccatagcgacgccgtgtttacggacaactatacccgcctccgcaaacagatggccgtgaaaaagtatcttaacagcattctcaacgggaagcgctcttcagagggggaatctcccgattttcccgaagaactggaaaag

SEQ ID NO: 137861 - DNA, 510 bp, Artificial Sequence
  derived and/or modified sequence
atggataccaggaacaaggcccaactcttggtgttgctgacccttctatcggtcctgtttagccagacatccgcttggcccttgtacagggctccctctgcattaaggctgggagataggatccctttcgaaggcgctaacgaaccagaccaggtatccttgaaagaggatattgacatgctacagaacgcccttgccgagaacgataccccttactatgacgtgtcccggaatgcacgccacgctgacggcgtttttactagtgacttttctaaactattaggacagctgagcgccaaaaagtatttggagagccttatggggaagcgagttagctcaaatatttctgaagatcctgtaccagtgaagagacattccgacgctgtgtttaccgataactatacaaggctgaggaaacagatggctgttaagaaatatcttaacagtatcctgaatgggaagagatcgtcggaaggtgaaagccccgattttccagaggaactcgaaaag

SEQ ID NO: 137862 - DNA, 510 bp, Artificial Sequence
  derived and/or modified sequence
atggatacaagaaataaagcgcaattactggtcctgctgactttgttgagcgtgctgttttctcagactagcgcttggcccctttatcgggcaccatcggcgctccggctaggcgatagaatacccttcgaaggagccaatgaaccagatcaggtttctctcaaggaagatatcgatatgctgcagaacgccctggcagaaaacgacacaccatactatgatgtctctcgcaacgcgcggcatgctgatggcgtgtttacttctgattttagcaagcttctggggcaactaagtgccaagaagtacctagagagtctgatgggaaagcgggtgagttccaatatatctgaggaccccgtgccggtcaagaggcattccgatgctgtcttcacagacaattatactcggctgcggaaacagatggcagttaagaagtatttaaacagcatcctgaatggaaagcgaagctctgaaggagagagccccgactttccagaggagttggaaaaa

SEQ ID NO: 137863 - DNA, 510 bp, Artificial Sequence
  derived and/or modified sequence
atggacacccggaataaggcccaacttctcgtgttgctaacactgcttagcgttttgttttcccagacttccgcctggcctctttaccgcgctccgagcgccctgcgtttgggcgataggataccatttgagggcgcgaacgaaccggatcaagtatccttgaaggaagacattgatatgcttcaaaacgccttggctgagaacgataccccatactacgacgtatctcggaatgcaaggcatgcagacggggtgttcacatcagatttttcaaagctgctgggccaactgagcgcgaagaagtaccttgagtctttaatgggaaagcgcgtttctagcaatatctccgaggacccagttccggtaaaacgccactctgacgctgtgttcacagataactacacgcggttgaggaagcagatggcagtaaaaaagtatttaaattctatcttgaacggtaagaggtcaagtgagggtgaatcaccggatttcccagaggagcttgagaag

SEQ ID NO: 137864 - DNA, 510 bp, Artificial Sequence
  derived and/or modified sequence
atggatacgcggaacaaggcacaactgctcgtgctgttgactcttctgagcgtccttttttcgcaaacctcggcctggcccctttaccgagcaccctccgcacttcggcttggcgatagaattccttttgaaggcgctaacgaacccgaccaagtttcactcaaggaggacattgatatgctgcagaacgcgctcgcggagaatgatactccttactatgatgtgtccagaaatgctagacacgccgatggagtgttcacctcagacttctccaagctgcttggacaactctcggcaaagaaataccttgaatcgctcatgggtaagcgggtgtcatccaacattagcgaagatcctgtgcctgttaagcgccacagcgacgcagtgtttaccgacaattacacccgtctgcgcaagcaaatggcagtgaaaaagtaccttaattccatcttgaacggtaaaagatcctctgagggtgaatcacctgacttcccagaagaactcgaaaaa

SEQ ID NO: 137865 - DNA, 510 bp, Artificial Sequence
  derived and/or modified sequence
atggatactcgaaacaaagctcagctgctggtgctgctgactttgctctcagtgcttttctcccagacctcggcatggcccctttatagggcaccctcagcgcttcggcttggcgatcggatcccatttgagggagccaacgagcctgatcaagtgtccctcaaagaagatatcgacatgcttcagaacgcgctggcagagaacgataccccatactacgacgtcagccgcaatgctcgtcacgcagatggagtgttcaccagcgatttttccaaacttctcggtcaactgtcagcgaagaagtacttggaatcacttatgggcaagcgcgtctctagcaacattagcgaagatccggtgcctgttaagcggcattcggacgcagtatttacggataactacacccggcttcggaagcaaatggcggtgaaaaagtatctgaactccatactcaacgggaagcgttcgagcgaaggagaatcacctgattttcccgaagagctggagaag

SEQ ID NO: 137866 - DNA, 510 bp, Artificial Sequence
  derived and/or modified sequence
atggacacccggaataaagcacagctgcttgtgctgctgaccctgctcagcgtgctcttctcccagactagcgcctggccgctgtaccgggctccgtcggccctgcggctgggggaccggattccattcgagggcgccaatgaaccggatcaagtgagcctcaaggaagatatcgatatgctgcagaacgctctcgctgaaaatgacaccccatactacgacgtgagcagaaatgccagacatgccgatggagtgttcacctcggacttcagcaagctgcttggccaactgtcggcaaaaaagtacctggagtccctcatgggcaagcgcgtctcctctaatatctcggaagatccagtgcccgtgaagcgccattccgacgcggtgtttactgacaattacaccagattgcgcaaacagatggccgttaagaagtatctgaattccatcctcaacggaaagcgctccagcgagggagaatcgcccgatttcccggaggagctcgaaaag

SEQ ID NO: 137867 - DNA, 510 bp, Artificial Sequence
  derived and/or modified sequence
atggatactagaaacaaggcccagctgctcgtcctcctgactttgctctcggtgctgttctcgcaaacctctgcctggcccctctacagagcaccttcggcactgaggctcggtgatcggattccatttgagggcgccaacgaacccgaccaagtgagcctgaaagaagatattgacatgctccagaacgcacttgcagagaacgataccccatactacgacgtctcgcggaacgcccgccatgcagatggagtgtttacttctgatttttcgaagttgcttgggcaactgagcgccaaaaagtaccttgaatcccttatggggaagcgcgtttcgtcgaatatctccgaagatcctgtgcctgtcaagagacactcggacgcagtgtttaccgacaattacactagattgcgcaagcagatggcggtcaagaaatacctgaactctatcctgaacggtaagagatcaagcgagggagaatcgcctgactttccggaagaacttgaaaag

SEQ ID NO: 137868 - DNA, 510 bp, Artificial Sequence
  derived and/or modified sequence
atggataccagaaacaaggctcaactgctcgtcctcctaactctgctcagcgtcttgttctcgcagacctccgcctggcccttgtaccgggcccctagcgctttgcgcttgggggaccgcattccatttgagggtgctaacgagcccgaccaggtttcgctgaaagaggacatagacatgctccaaaacgcgctggcggagaatgatacgccctactatgacgtcagtcggaacgctcgccacgctgacggtgtcttcacgagcgacttctccaagctcttgggccaactgtctgccaagaagtacctagaatccctcatgggtaaacgcgtctcctcgaacatctcggaggatcctgtgccggttaagcgccacagcgacgcagtcttcaccgataactacacacggctgcgaaagcagatggccgtcaagaagtacttgaattccatactcaacggaaaacgtagttctgagggtgaatccccagactttcctgaggaacttgagaaa

SEQ ID NO: 137869 - DNA, 510 bp, Artificial Sequence
  derived and/or modified sequence
atggatacaagaaataaagcgcagcttctggtgttgcttaccttgttgtcggttcttttttcgcaaacttctgcttggccactttatagagctccttcggctcttagacttggagatagaattcctttcgaaggagcaaatgagccagatcaagtctccttaaaagaagacatcgatatgctccagaatgctcttgcggagaatgacacaccgtattacgatgtgagtagaaatgctcgacatgctgatggagtatttacatcagattttagtaagctgcttggacaacttagtgcgaaaaaatatctggaatctttgatgggtaagcgtgtctcttctaacatctcagaggatcctgtcccggtgaagagacattctgacgcagtattcacagataattatacaagattacggaaacagatggcagttaagaaatatttgaatagtattcttaatggtaaaagatcatcggagggggaaagtccggactttccagaggagcttgagaaa

SEQ ID NO: 137870 - DNA, 510 bp, Artificial Sequence
  derived and/or modified sequence
atggatacgcggaacaaggcacagctcctggtgctgctaactctgctctcagtcttgttctctcaaacctccgcctggcctctgtatagagcaccatcggcgttgcgcttgggagatcgtatcccgtttgaaggtgccaatgagcctgaccaggtctcactgaaagaagatatcgatatgttgcaaaatgctttagccgaaaacgataccccgtactacgacgttagccgaaatgccaggcacgctgacggggtcttcaccagtgacttctccaaattactgggccagctgagcgcaaaaaagtacctcgaatccctaatgggaaagcgcgttagttcgaacatttccgaggatcctgttcccgtcaagcgtcacagcgatgctgtgttcactgataactacacgaggctgcgaaaacaaatggccgtgaaaaaatatttgaatagcatcctgaatgggaaaaggtctagtgaaggtgagtctccggactttcccgaagaacttgaaaaa

SEQ ID NO: 137871 - DNA, 510 bp, Artificial Sequence
  derived and/or modified sequence
atggacaccaggaacaaagcacagctgttggtcctcctgaccctgctcagcgtgttgttcagccaaacttccgcatggcctctgtacagggcaccttcagcccttcggcttggtgatcgaattccatttgaaggagccaacgaacccgaccaggtgtcgctgaaggaggacattgatatgctccagaacgcgctggcggagaatgacacgccttattacgatgtcagccgcaacgcccggcacgccgatggggtttttactagcgattttagcaaactccttgggcaactcagtgcaaagaagtaccttgaatcccttatggggaaacgcgtgtcgtctaatatctccgaagatccagtgcctgtgaagcgtcattccgatgcggtattcactgataactacacccgactcagaaagcaaatggcagtgaagaagtacctgaactccatactgaacggtaagaggagctccgagggagaatcgcccgattttcctgaagagttggagaag

SEQ ID NO: 137872 - DNA, 510 bp, Artificial Sequence
  derived and/or modified sequence
atggacacccgaaacaaggcgcaactgctggtcttgttgactctgctctcggtgctgttctcccagacctcggcatggcctctgtaccgcgcccccagtgcattgagactcggagatcgcattccgtttgagggagcaaacgaacccgatcaagtatcgctgaaagaagatattgatatgctgcaaaacgctctggccgaaaacgatactccgtactacgatgtgagccgcaatgccagacatgctgacggtgtgtttacttccgatttctccaagctgctcggtcaacttagcgcaaagaagtaccttgaatcgctgatgggaaagcgcgtgtcgagcaatatctccgaggacccagtgcctgtgaagagacattctgacgccgtctttaccgataactacactagacttaggaagcagatggccgtgaaaaagtacctgaattcgattcttaacggcaaaaggtcaagcgagggagaatcaccagacttcccagaagagctggaaaaa

SEQ ID NO: 137873 - DNA, 510 bp, Artificial Sequence
  derived and/or modified sequence
atggacacaaggaataaggctcagctcctggtgttgctcactctactttccgttttattttctcaaacaagcgcctggcctttgtatcgggctccaagcgcgctccggctcggggatagaataccttttgagggggccaatgaaccagaccaggtgtccctgaaggaggatatcgacatgctgcagaatgctctggctgagaacgatacaccttattatgacgtgtcccggaatgcacgacatgctgatggcgtattcacctcggactttagtaagctgctgggccagttgagcgccaagaaatacctcgaatcattaatgggtaagcgggtcagttcaaacattagcgaagatcctgtaccagtgaagagacactctgacgctgtgttcactgacaattatacacgcctgcgaaagcagatggccgtgaaaaagtatttaaattccatcctaaacggaaagcgatcaagtgagggcgaatctcctgattttccagaggagctcgagaag

SEQ ID NO: 137874 - DNA, 510 bp, Artificial Sequence
  derived and/or modified sequence
atggacacccgcaacaaggctcagttactcgtcttacttactctgctgagcgtcctgttcagccagacgagtgcctggccactatatcgcgccccgagcgccctccgcctgggtgacagaattccctttgagggggccaacgagcccgatcaggttagtcttaaggaagatatagacatgctgcagaatgcgcttgcagaaaatgataccccatactacgacgtttcaagaaacgcacgacatgccgacggtgtgttcaccagtgactttagtaaactccttggtcagctcagtgctaagaaatatctggagtctctaatgggcaagagagtaagctcaaacattagcgaagatccagtgcccgtcaagaggcatagcgacgcagtcttcaccgataattacaccaggctgcgcaagcagatggccgttaagaagtacctcaattcaattctcaacggaaagcggtcttccgagggggagtcacccgacttcccagaagagttggaaaaa

SEQ ID NO: 137875 - DNA, 510 bp, Artificial Sequence
  derived and/or modified sequence
atggacactcgcaataaggcgcagctgctcgtgctgttgaccctgctgagcgtgctgttctctcaaacctcagcttggccgctctaccgcgccccgtccgctttgcgcttgggggaccgcatccctttcgaaggagccaacgagccggaccaggtttccctcaaagaggacattgatatgctgcagaacgcgctcgcagaaaacgacacgccgtactatgatgtgtcccgcaatgcacggcacgccgacggtgtctttacctcggatttcagcaagttgctgggccaactctctgcgaagaagtacctcgagtcgctcatgggaaaacgcgtgtcgtcgaacatctccgaggacccagttcccgtcaaacggcattcagacgccgtctttacggataactacacccggctgcggaagcaaatggccgtgaaaaagtatctgaactccatccttaatggcaagaggtcgtccgaaggagaatcccccgatttcccagaggagctggagaaa

SEQ ID NO: 137876 - DNA, 510 bp, Artificial Sequence
  derived and/or modified sequence
atggacactcggaacaaggcccaactgctggtactcctgacccttttaagcgtactcttttcacagacatctgcttggcctctgtaccgcgctccctcagccctgagattgggcgataggatcccttttgagggggccaatgagcctgaccaggtttccttgaaggaggacatcgacatgttgcagaatgccctggccgagaacgacacgccgtattacgacgtatctcgcaacgcaaggcatgccgacggagtgttcacatcagacttcagcaagctgctggggcagctttcagctaaaaaatatctcgagtccctcatgggaaagcgtgtgtcatccaatatatccgaggacccggtcccagtgaagcggcacagcgatgccgtgttcacagataactacacaagattgaggaagcagatggcagtgaaaaagtatctcaactccatactcaatggcaaaagatcctctgagggtgagtctccagatttccctgaagagctcgaaaag

SEQ ID NO: 137877 - DNA, 510 bp, Artificial Sequence
  derived and/or modified sequence
atggacacccgcaataaagctcagcttttggtgctgctgactctgctgagcgtgctcttctcccaaacttccgcctggccgttgtatcgcgctccgtctgccctccggctgggtgaccggatcccgttcgaaggggcaaatgagcctgatcaggtgtcgctcaaggaagatatcgacatgctgcaaaacgccctggctgagaatgatactccttactacgacgtgtccaggaacgcacgccatgcggatggggtttttacttcagatttcagcaaacttctggggcagttgagtgctaagaagtaccttgaatctcttatgggaaagcgggtgtcgtcaaacatctcggaggacccagtcccagtgaagagacactccgatgcagtgtttaccgacaattacaccaggctcaggaagcaaatggccgtgaagaaatacttgaactccatcctcaatggaaagcggtccagcgaaggcgagagcccagatttccctgaagagctcgaaaaa

SEQ ID NO: 137878 - DNA, 510 bp, Artificial Sequence
  derived and/or modified sequence
atggatactagaaataaagcacagctgctcgtgcttttgacactgcttagtgttttatttagccagacttccgcctggccattgtacagggcgccttcggcccttagactgggagaccgcattccattcgaaggagctaatgagccagatcaggtgtcacttaaagaggacattgacatgttacagaatgcgctcgctgagaatgatacgccctattacgacgtaagcaggaacgccagacacgccgacggcgtatttacttcagacttttccaaactgctcggccagctgagcgcgaaaaaatacctggagtcactgatgggtaaacgggtgagctccaatatcagcgaagatcccgtgcctgtgaaacggcactccgacgccgtgtttaccgataattataccaggctgcgcaaacagatggcggtaaaaaagtaccttaactctatcctcaatggtaaacgcagttccgaaggagagagccccgacttccctgaagaattggagaag

SEQ ID NO: 137879 - DNA, 510 bp, Artificial Sequence
  derived and/or modified sequence
atggatacccgtaacaaagcccagctgttggtgctcctcaccctgctttcggtccttttctctcaaacttccgcgtggcctctgtaccgcgccccaagcgcactccgcctcggagatcggatccccttcgaaggcgccaatgaaccggaccaggtgagcctgaaagaggatatcgacatgctccagaacgcccttgcagagaatgataccccgtattatgacgtgtcgcgcaatgcgcgccatgctgatggagttttcacctcagacttctccaaactgctcggacaactgtcggctaaaaagtacctggaatcgttgatgggaaagagagtgagttcgaacatttccgaggaccctgtacctgtcaagcggcattcagacgccgtgtttaccgataactacaccagactccgcaaacagatggcggtgaagaagtacctcaattccatcctgaacgggaagaggtcgagcgagggcgaatcgccagacttccccgaagagctggaaaag

SEQ ID NO: 137880 - DNA, 510 bp, Artificial Sequence
  derived and/or modified sequence
atggacactagaaacaaggcccagctgctcgtgcttctgactttactgtcagttcttttttcacagacctccgcctggccattatacagagcccccagcgcgttacggctgggcgacagaatcccgttcgagggggcgaacgagcccgatcaagtgagcttgaaagaagatattgacatgctgcagaatgctcttgccgaaaatgacacgccctactacgatgtatcacgaaatgcccgccacgcagacggagtcttcacatccgatttctctaagcttttaggacagttgtcagctaagaaatacctggagagccttatgggtaagcgagtgagctctaacataagcgaggaccccgtgcccgtgaagaggcattccgatgccgtttttaccgataactatactcgcctcagaaaacaaatggctgtgaagaagtacttgaacagcatactcaatgggaagcgcagcagtgagggtgagtcaccagatttccccgaggaactggagaaa

SEQ ID NO: 137881 - DNA, 510 bp, Artificial Sequence
  derived and/or modified sequence
atggataccagaaataaggcgcaactgcttgtcctcctcactcttctgtccgtcctcttttcccaaacgtcagcatggccactctatagagcaccttcagcgctccgtctgggtgatcgcattcctttcgagggagccaacgaacctgatcaagtgtcgcttaaggaagatatcgacatgctccagaacgcactcgcagaaaacgatactccttactacgatgtgtctcgcaacgcacgccatgcggacggggtgtttactagcgatttctctaagctgcttgggcagctttcagccaagaagtacctggaatccctgatggggaaacgcgtgtcgtccaacatttcagaggaccccgtgcccgtgaagagacactccgatgcggtgttcaccgacaactatacccgactgcggaagcagatggcagtcaaaaagtacctcaactcgattcttaatggtaagaggtcgtcagagggagaatcccctgatttcccggaggaattggagaag

SEQ ID NO: 137882 - DNA, 510 bp, Artificial Sequence
  derived and/or modified sequence
atggatacccggaacaaagcccagctgttggtgttgctgacactgcttagcgtgttgttcagccagacgtctgcatggccactttacagggcaccgagcgccttgcggctgggggacagaatccccttcgaaggtgccaacgaaccagaccaggttagcctcaaagaggacatcgacatgcttcaaaatgccctggcggaaaatgatactccctactatgatgtgagtaggaacgctagacatgctgacggtgtctttacaagtgatttttcgaaactgttaggccagttgtccgccaagaagtatttggagtccctgatggggaagcgtgtctcctcgaacatttccgaggacccagttcccgtaaaacggcatagcgatgctgtttttacagacaattacactagactgagaaaacagatggctgtcaagaaatacctgaatagcatcctgaacgggaagaggtccagcgagggcgaatcacctgatttcccagaggagcttgaaaaa

SEQ ID NO: 137883 - DNA, 510 bp, Artificial Sequence
  derived and/or modified sequence
atggatactaggaataaggcccagctgctggtcctccttaccttgctgtctgtcttgttctcacagacatctgcgtggccgctctacagagccccaagtgcactgaggctgggtgatcgaatcccattcgagggagccaatgagccagatcaggtttccctgaaggaggatatcgacatgctgcagaacgccctggcagagaacgataccccctactatgatgtgagccgaaatgcacgccatgctgatggggtattcacatccgactttagcaaactccttgggcagctctccgctaagaaataccttgagtctctgatgggcaaacgcgtgagcagcaacatctccgaggatcctgtccctgttaaacgccatagcgatgcagtctttacagataattatacacgccttaggaaacaaatggctgtgaaaaagtatctcaactcaattttgaacgggaaaaggagtagcgaaggtgagtcacccgattttccagaggaactggagaag

SEQ ID NO: 137884 - DNA, 510 bp, Artificial Sequence
  derived and/or modified sequence
atggatacaaggaacaaggctcagctacttgttctgctaactttgctctctgtgttgttttctcagacttccgcctggcctctttatagggcaccctcagctctgcgactcggagataggattccattcgaaggagccaatgaacccgatcaggtttctttgaaagaggatatcgatatgctacagaacgccctggccgaaaatgacactccttactatgatgtttctagaaatgctaggcatgctgacggggtctttacatccgatttctctaaacttctagggcagcttagtgccaaaaaatatcttgaatcattaatggggaaacgagtgtctagtaatatctctgaggatccagtccccgtaaaaaggcattctgatgccgtctttacagataattacacacgcctcaggaagcagatggcagtcaaaaagtacctaaactccattctcaacgggaaaagaagttccgaaggagaatcaccagactttcccgaagaactagaaaaa

SEQ ID NO: 137885 - DNA, 510 bp, Artificial Sequence
  derived and/or modified sequence
atggacacgcggaataaggctcagctgctcgtactcctgacgttgcttagcgtgctgttcagccagacatctgcatggccactttatcgagctccctccgcacttcggttgggggatagaattcccttcgaaggtgctaacgagccagatcaggtatctctgaaggaggacatagatatgttgcagaacgccttggcagagaacgatacaccatactacgatgtgtcacggaatgcaaggcacgcggatggagtgttcacttccgacttctctaagcttcttgggcaactgagtgccaagaagtacctcgagagtctcatgggaaaaagggtcagttctaatatctctgaagatccggtcccagtgaaaaggcactctgacgctgtcttcacagataattatacccgattgagaaaacagatggcggtcaagaaatatttgaacagcatactgaatggcaaacgctcatccgaaggtgagagtccggattttcctgaagaactggaaaag

SEQ ID NO: 137886 - DNA, 510 bp, Artificial Sequence
  derived and/or modified sequence
atggacacccgcaacaaggcccaactgctggtgttgctcaccctgctgtcagtgcttttttcccagacttcggcctggcccttgtaccgagccccgtcggccctgaggctgggagacagaatcccgttcgaaggggcaaatgagccagaccaagtctccctgaaggaagatatagacatgctgcaaaacgccttggcggaaaacgatactccgtactacgatgtttcacgaaatgctaggcatgcggatggcgtgttcacctccgacttctcaaaactcctgggtcagttgtcggcgaagaagtacctggaatccctcatgggaaagagagtgtcgtccaacatctccgaggatccggtgcctgtcaaaaggcactccgacgcagtctttaccgataactacactcggctgcgcaagcagatggctgtaaagaaatatctcaattcgattctcaacggaaaacggtccagcgaaggggagtcgccagacttcccagaggagttggaaaag

SEQ ID NO: 137887 - DNA, 510 bp, Artificial Sequence
  derived and/or modified sequence
atggacactcggaacaaagcccagcttctggtgctactgacactgctctcagtactcttctcccagacaagtgcttggcctctctatcgcgcacccagcgcgctgcggctgggtgacagaatccccttcgagggtgctaacgaacctgatcaagtgtccctgaaagaggatatcgacatgctccagaatgccctagctgaaaacgacacaccgtactatgatgtaagccgtaacgcccggcacgctgacggcgtcttcaccagtgacttctcgaagctgttaggccagctgtctgccaaaaagtatttggaatccctgatgggcaaacgggtttcatccaacatttctgaggatcctgtgcccgttaagcgccatagcgacgccgtgtttacagataactatacaaggctgagaaagcaaatggccgtaaaaaagtacctgaatagcatcctgaacggtaaacgaagcagtgagggggagtcacccgacttcccagaggaactcgagaag

SEQ ID NO: 137888 - DNA, 510 bp, Artificial Sequence
  derived and/or modified sequence
atggacacccgcaacaaagcccagctgctggtcctgttgacgctcctttcggtgcttttctcacagacttctgcatggccgctctacagagcgccgtcggccctgaggctgggagatcgcatcccattcgaaggcgctaatgaacctgaccaggtcagcctcaaggaggatatcgacatgctgcagaacgcgctggccgagaacgacaccccgtactatgacgtgtccaggaacgctcgccacgctgatggggtgtttacctcggacttctcgaagttgctcggacaactctcagcgaagaaataccttgaatccctgatgggaaagagggtgagtagtaacatcagcgaggatcccgtccctgtcaagcgccatagcgatgccgtgttcactgacaattacactcggttgcgaaaacaaatggccgtgaaaaagtacttgaatagcattctgaacggtaagcggagcagcgaaggcgaaagtccggattttccagaggaactcgaaaag

SEQ ID NO: 137889 - DNA, 510 bp, Artificial Sequence
  derived and/or modified sequence
atggataccagaaacaaggcccagctgcttgtgctccttaccctgctgtccgtgctgttttcacaaacttccgcgtggccactctacagggcaccttcggcccttcgattgggcgatcggatcccatttgagggagcaaatgagccggatcaagtctcgctgaaagaggatattgatatgctgcaaaacgcactcgcagagaacgacactccttactacgacgtgtccagaaatgctagacacgcagatggagtgttcaccagcgatttctcgaagttgctgggacaactgtcggcaaagaaataccttgaatccctgatgggcaaaagagtgtcctcgaacatttcagaggaccctgtcccagtgaaacgccatagcgatgcagtgtttaccgacaattacactcgacttaggaaacagatggcagttaagaagtatcttaacagcattctgaatggtaagaggtcaagcgaaggggaatcgcctgattttccagaagagctggaaaag

SEQ ID NO: 137890 - DNA, 510 bp, Artificial Sequence
  derived and/or modified sequence
atggatacaagaaacaaagcccagctgctggttctgcttacgctcttgagcgtgcttttttcccagacgagcgcctggcccctgtatcgggcgccttctgctctcaggctgggtgaccggatccctttcgagggtgctaatgagcctgatcaggtgtctctgaaggaggatattgacatgctccagaatgcccttgccgaaaatgatacgccctattatgatgtgtcccggaatgcaagacacgcggacggcgtgtttacaagcgacttcagcaagctccttggccagctcagcgctaagaaatatctggagagcttaatgggcaagcgcgtctcctccaatatctctgaggaccctgtaccagtcaagaggcactcagacgctgtttttaccgataattacacacggctgcgtaagcagatggcagtcaaaaaatatctgaactcgatcttgaatgggaaacggtccagtgagggggagagccctgattttccggaggaacttgagaaa

SEQ ID NO: 137891 - DNA, 510 bp, Artificial Sequence
  derived and/or modified sequence
atggatacccgtaataaagcacagctgcttgttctgctgactctgctgtccgtgctgttctcccaaacatcagcctggccattgtaccgtgctcctagcgcattgagacttggcgaccgtattccctttgagggcgccaacgagcccgatcaggtcagcctgaaagaagatatcgacatgttgcagaatgccctcgcagagaatgacaccccctactatgatgtcagccgtaatgccaggcacgctgacggcgttttcacaagcgacttcagcaaactgttgggtcagctgagcgccaagaagtacctggagagccttatgggaaagagggtgagctcaaatatctccgaagacccagtacctgttaagaggcactcagatgctgtgttcacagataattatactcgtctgaggaaacagatggccgtcaagaagtacctgaacagcattttgaatggcaagcgttccagcgaaggtgaatcccctgacttccctgaggagctggagaag

SEQ ID NO: 137892 - DNA, 510 bp, Artificial Sequence
  derived and/or modified sequence
atggacacccgaaataaggcacagctgctcgtactgctgactcttctgtccgttctcttttcccaaacttctgcctggcccctttacagagccccctctgcgctacgactcggagaccgaatcccctttgagggcgctaatgagcctgatcaggtgagcttgaaagaagatatagatatgcttcagaacgcgctcgccgaaaatgatacaccctactatgacgtgtctcgcaatgctcgccatgctgatggcgtgttcacctctgacttttccaaactgctggggcagctttccgctaaaaagtacttagaatccttaatggggaagagagtgtccagcaacattagcgaggaccccgtaccggtcaaacggcactctgatgctgtgttcacagataattacacacggctgaggaagcaaatggccgtgaagaagtacctcaactcaattctgaacggaaaacgttcgtctgagggggaatctccagacttccctgaggagctcgaaaaa

SEQ ID NO: 137893 - DNA, 510 bp, Artificial Sequence
  derived and/or modified sequence
atggacactaggaacaaggctcagcttttggtgctgctgaccctcctgtcggttttgttcagccaaacctccgcatggccgctttaccgcgcaccctctgccctgcggcttggggaccgcattccgttcgaaggagccaatgaaccggaccaggtgtcactgaaagaggacatcgacatgctgcagaatgccctggctgaaaatgatactccatactacgacgtatcccgaaacgcgagacacgctgatggagtgttcacttcggattttagcaagctcttgggccaactctccgcgaagaagtacctggagtcactgatgggcaagagagtgtcatcgaacatcagtgaggacccggtgcctgtgaagcgccattcagacgcggtgtttaccgataactacacgcgtctgcggaaacagatggccgtcaagaagtatttgaactcgatcctcaacggaaaacgctcctctgaaggagaatcaccagacttccctgaggagctcgaaaaa

SEQ ID NO: 137894 - DNA, 510 bp, Artificial Sequence
  derived and/or modified sequence
atggatacgagaaacaaagctcagctgttggtgctgcttacgcttctgagcgtgctgttcagccaaactagtgcatggcccctgtaccgggccccgtctgcactgaggctgggcgataggatacccttcgaaggggccaacgagccagatcaggtgtcattgaaggaggacatcgacatgctgcagaacgctcttgccgaaaatgatactccgtactacgatgtgagccggaatgctcgtcacgccgatggggtgtttacgagtgacttttcaaaactgcttgggcagctgagcgccaaaaaatacctggagtccctgatgggaaaacgtgtcagttctaatatcagtgaggacccagtgcccgtaaaaaggcattctgatgccgtgtttacggacaattataccagactgcgaaagcagatggccgtgaaaaagtacctgaactccatactgaacggtaagcgctctagcgagggtgagtccccggactttcccgaggagttagagaag

SEQ ID NO: 137895 - DNA, 510 bp, Artificial Sequence
  derived and/or modified sequence
atggataccagaaataaggcacagttgctggtgcttcttaccctcctttcggtgcttttctcgcaaacttcggcgtggccgctgtaccgggcaccttcagcattgcggcttggggaccggattccgtttgaaggtgcaaacgagcctgaccaagtgtcccttaaggaagatattgatatgctgcaaaatgcgcttgcagaaaacgataccccttactacgacgtgtcgcggaacgcgcgccacgcagacggcgtgtttaccagtgacttctcgaaactcctggggcagttgtcagctaaaaagtaccttgaatcactcatgggcaagagagtgtcctcaaacattagcgaagatcctgtgccagtgaagcggcatagcgacgccgtctttactgataactatacgagactgcgaaaacagatggcagtcaagaaatacctgaattcgatactgaacggaaaacggtcgagcgagggagaatcgccagattttccagaggaactcgagaaa

SEQ ID NO: 137896 - DNA, 510 bp, Artificial Sequence
  derived and/or modified sequence
atggacactaggaacaaagctcagctgctcgtccttctcactctgctatccgtcctttttagccagacatccgcttggccattatacagagccccttccgccctgaggcttggggatcgaatacctttcgagggcgctaacgagcctgaccaagtttccctgaaagaggacatcgacatgctgcaaaacgccctggccgaaaacgacaccccatattacgatgtttcccggaacgccaggcacgccgacggagtgttcacctccgattttagcaaactgctggggcagctctcggcgaaaaaatacctcgagtcccttatgggcaagcgagtgtcttccaacatctctgaagaccctgtacccgttaagaggcacagcgatgccgtatttactgacaattacacgaggctgcgcaaacagatggctgtgaaaaagtacctcaactcaatattgaacggaaaacgcagtagcgagggcgaaagtccagactttcccgaagagctagaaaag

SEQ ID NO: 137897 - DNA, 510 bp, Artificial Sequence
  derived and/or modified sequence
atggatacccgaaataaggcccagttgcttgtgctgctgacccttctctccgtgcttttttcacaaacgtcagcttggccactttaccgggcccctagcgctttgcgtcttggagatcgtattccgttcgagggggccaacgaaccagaccaggtgtcccttaaggaggacattgatatgctgcaaaacgcgcttgccgaaaacgatactccttactatgatgtgtctcgaaatgcgagacatgctgacggcgtgtttactagcgacttctcaaagctcctggggcagctctctgccaagaagtaccttgaatcgttgatgggaaagcgtgtctcgtcgaacatcagcgaggaccctgtgccagttaagagacactccgatgcggtctttaccgacaattacaccagactgagaaaacaaatggcagtcaaaaagtacctgaactcgattctgaatggtaaaaggtcctccgaaggtgaatcacccgattttcccgaagagctggagaag

SEQ ID NO: 137898 - DNA, 510 bp, Artificial Sequence
  derived and/or modified sequence
atggacacccgaaataaggcgcaactactcgttctgcttactcttcttagcgttctgttctctcaaacaagtgcctggcctttgtaccgggcaccttccgcacttcggttgggtgacagaattccttttgagggggcaaacgaacctgaccaggtgagcctcaaggaggacatagatatgctgcaaaatgccctggccgagaacgatacaccctattatgatgtgtcgcggaacgcgaggcacgctgacggagtcttcaccagcgactttagtaagttgctgggacagttgagtgcgaagaagtacctggagagtcttatgggcaagagggtttctagtaatatttccgaagaccccgtcccggttaaacgccactcggacgcggttttcaccgataattacaccaggctaaggaaacagatggccgtgaagaagtacctgaactccatcctgaacggcaagcgcagctctgaaggtgaaagcccagatttccctgaggagcttgagaaa

SEQ ID NO: 137899 - DNA, 510 bp, Artificial Sequence
  derived and/or modified sequence
atggatactcgcaataaggcccaattactggttctgcttaccctgctgagcgtcctgttttcgcagactagtgcctggcccctgtaccgagcccccagcgcgctgagactgggggatcggattccgttcgagggcgccaacgagccagatcaggtgtctcttaaggaggatatcgatatgctgcagaatgctctggcggaaaatgacacaccatattatgacgtgtccaggaatgcaaggcatgcggacggggtattcacaagcgatttttctaagttgctcggacagctctctgcaaagaagtatctcgagagtctgatgggtaaacgcgtcagctcaaacatctccgaggaccccgtgcccgtcaagagacatagtgatgccgtcttcaccgacaactacaccaggttaaggaaacaaatggctgtgaagaagtatctgaatagtatcctaaatggtaagcggagctctgaaggcgaaagtccagattttcctgaggagttggaaaag

SEQ ID NO: 137900 - DNA, 510 bp, Artificial Sequence
  derived and/or modified sequence
atggatactcgcaacaaagcccaactcttggtgcttctcaccctgctctcggtgctgttctcacagaccagcgcatggccgttgtaccgcgccccctcggccctgcggctgggagacagaatcccgttcgagggtgcgaacgagccagaccaggtgtcgcttaaggaggatatcgatatgcttcagaacgccctggccgagaacgatactccgtactacgacgtctcgagaaatgcccggcacgcggatggagtctttacctcggacttctcgaagctgctgggccaactgtcagcgaagaaatacctcgagagcctgatgggtaagcgggtgtcctccaacatctccgaggaccccgtgccggtaaagcgccactccgacgccgtctttactgataactacactagactgcggaaacaaatggctgtgaagaagtacctgaacagcattctcaatggcaaaaggagcagcgagggagagtcccccgacttcccggaagagctggagaag

SEQ ID NO: 137901 - DNA, 510 bp, Artificial Sequence
  derived and/or modified sequence
atggacacacgcaacaaggcccagctcctggtgctgctgaccctgctgtctgtactcttttcccaaacgagcgcttggcctctgtatagagctccctccgcccttagactcggagacaggataccttttgagggagcaaacgaacccgatcaggtatcactgaaggaagacattgatatgctgcagaacgctctcgctgagaatgacaccccctattacgacgtttctagaaatgctaggcacgcagacggcgtgtttacatccgacttcagcaagctgttgggtcaattgtccgctaagaagtatcttgagagccttatgggcaagagggtctcctctaatattagtgaagatccagtgccagtcaaaagacatagcgacgccgtttttaccgataactacactagattgcgcaagcagatggccgtcaagaagtacttgaattccatccttaacggcaaaagatctagcgagggcgagtccccagactttccggaggaactcgaaaag

SEQ ID NO: 137902 - DNA, 510 bp, Artificial Sequence
  derived and/or modified sequence
atggataccaggaataaagcccagctcctggtcctcttgactctgctgagtgttctgttctcccagacctccgcttggccgctctaccgcgcgcctagtgccctgagacttggcgatagaattcccttcgagggggccaatgaacccgaccaggtcagtctgaaagaggacatcgacatgctgcaaaatgctctcgccgagaacgatacaccgtattacgacgtgagtaggaacgccaggcatgcggacggggtgttcacatctgatttctccaagctgctcggccagctgagcgctaagaagtacttggagagccttatgggcaaacgcgtctcatcaaacatctcagaggatcccgtccctgtcaaacgccactcagacgccgtatttacggacaattacactcgcctgagaaaacagatggccgtgaagaagtacctgaattcaatcctgaacggcaagcggtcaagcgagggagaatctcccgactttcccgaggaactcgagaaa

SEQ ID NO: 137903 - DNA, 510 bp, Artificial Sequence
  derived and/or modified sequence
atggacacccggaacaaggcgcaactgcttgtcctgttgactctgctgtcagtcttgttctcccagacctcggcctggcccctttacagagcaccttcggccctgcgcctcggagatcgcataccatttgaaggagctaacgaaccggaccaagtgtcgctcaaagaagatatcgacatgctgcaaaacgcccttgcagaaaacgacaccccttactacgacgtgtcaagaaatgcacgacacgcagatggcgtctttacgtctgatttttctaaactgcttggtcaactgtcggcaaagaaatacctcgaatcgttgatgggcaagcgcgtgtccagcaacattagtgaagatcctgtcccagtgaaacggcattcggatgcagtgttcaccgataactacaccaggctcaggaaacagatggccgtgaagaaatacctgaattccattctgaacggcaagcgatcgtcagagggggaatcgcccgatttccctgaggagctcgagaag

SEQ ID NO: 137904 - DNA, 510 bp, Artificial Sequence
  derived and/or modified sequence
atggatacccggaataaagcacagctgctcgtgctgttgactctcctctcggtgctgttttcccagacttcagcctggccactgtaccgcgcaccgtcggcactgcggctcggcgatcggattcccttcgagggcgctaatgaaccagaccaggtgtcgctcaaggaggatattgacatgctccaaaatgccctggccgagaacgacactccgtactacgacgtgtcgcgcaacgcacgacatgcagacggcgtgttcacctctgacttcagcaagctgctgggtcagctgtccgcgaagaagtacctggaatccctcatggggaagcgcgtgtcgtcaaacatctccgaagatcctgtcccagttaagcgccactcggatgcggtgttcactgacaactacaccagactcaggaaacagatggccgtgaaaaagtacctgaactcgatcctcaacggaaagaggtcaagcgagggtgaatcccctgacttcccagaagaactggaaaaa

SEQ ID NO: 137905 - DNA, 510 bp, Artificial Sequence
  derived and/or modified sequence
atggacacacgtaataaagcacagcttttggtgctgcttacactgctgagtgtactgttttctcagacaagcgcttggcccttatatagggcaccaagcgccttaaggctgggggacaggattccgttcgaaggggcgaatgagcccgaccaggtctcgctgaaggaagacattgacatgctacagaacgctctcgctgagaacgacacgccgtattacgacgtaagtcgcaacgctcgccatgctgacggggtgttcacttccgatttctccaagctgctcggacaactgtctgccaagaaatatctggagtcgttgatgggcaaacgcgtgtctagtaacatatccgaggaccccgtcccagtcaagcggcattctgacgcagtattcacagacaactacactcggttaaggaagcagatggctgtgaagaagtacctgaatagtatcctgaatggtaagaggtcctcagagggtgaatcaccagacttcccagaggaattggagaag

SEQ ID NO: 137906 - DNA, 510 bp, Artificial Sequence
  derived and/or modified sequence
atggacacacgcaataaggcccaactactggtacttctaacgttattgtctgtactttttagccagacatcagcttggcctctttaccgggctccatctgccttgagacttggtgatcggattcccttcgaaggagcgaacgagcccgaccaagtgtcattgaaagaagatatagatatgttgcagaatgctctcgccgagaatgatactccttattatgatgttagtcgtaatgctcgacatgcagatggtgtttttactagcgatttttctaaattgttgggtcaactctcagctaaaaaatacctggagtcacttatgggtaagagagtatcatccaatataagtgaagatcctgtgcctgtgaaaaggcatagcgacgctgtatttactgataactacactcgtcttaggaaacagatggccgttaaaaaatacttgaatagcattctcaacggtaaaaggagttcagagggagagtcacctgacttcccagaggaacttgaaaag

SEQ ID NO: 137907 - DNA, 510 bp, Artificial Sequence
  derived and/or modified sequence
atggacaccagaaacaaagcccaattgttggtgctgctcaccctcctgagcgtccttttctcccagacttcggcctggccactgtacagggccccatccgccctccgacttggtgacaggattccttttgaaggggctaacgagccggaccaagtcagcctcaaggaagatatcgacatgctgcaaaacgctctggctgaaaatgataccccctactacgatgtctcgcggaacgcacggcatgccgatggagtgttcacctcggatttttccaagttgcttggacagctgagtgccaaaaagtatctggagtcgctcatggggaagagagtgtcatccaacatctcggaggacccggtgccggttaagagacactcggacgcagttttcacggacaattacactcgtttgagaaagcagatggcagtgaagaagtacctcaattccatcttgaatggaaaacgcagcagcgaaggagagtcgccggacttcccggaagaacttgagaag

SEQ ID NO: 137908 - DNA, 510 bp, Artificial Sequence
  derived and/or modified sequence
atggacacacgtaataaggcacagcttctagtgctgctcaccctgctcagcgtcctgttctcccagactagcgcatggcccctgtatcgcgccccctctgccttgaggctcggagacaggataccgtttgagggtgcgaatgaaccggaccaggtttctttgaaggaggatatcgacatgctccagaatgcgttggctgagaacgatactccctactacgacgtttcaagaaatgccagacacgctgatggagtatttacatccgatttctccaagctacttggacaattgtctgctaagaaatacctggaaagcctgatgggaaaaagggtgagttcaaatatcagcgaagaccctgtgcccgtgaaacgccactctgatgcagtgtttaccgataattatacacgtttaagaaagcagatggccgtcaagaaatatctcaacagtattctgaacggcaaacgtagcagcgagggtgaaagtcccgacttcccagaagaactggaaaag

SEQ ID NO: 137909 - DNA, 510 bp, Artificial Sequence
  derived and/or modified sequence
atggacactaggaacaaggctcagctacttgtgctcttaactctcctcagcgtcctgtttagccaaacatcagcgtggccactgtaccgcgccccatcggctctgcggctaggcgacaggattccatttgaaggcgctaatgagcccgatcaggtatcactcaaggaggacatcgatatgttgcagaatgcactcgccgagaatgacactccctattatgatgttagtcgcaacgcccgacacgctgatggggttttcacaagcgattttagcaaactcctcggacagttgtctgcgaaaaagtacctcgagagtctgatgggtaaacgggtgtctagtaacattagtgaggaccctgtcccggtgaaacggcatagcgacgccgtgtttaccgataattatacacggctaagaaaacagatggccgtgaaaaaatacctgaactccatcctgaacggaaaaaggagctccgagggcgagtcacctgactttcccgaagagcttgagaag

SEQ ID NO: 137910 - DNA, 510 bp, Artificial Sequence
  derived and/or modified sequence
atggacaccagaaacaaggcccagttgttggtgctcctaaccctgttgagtgttcttttctcccagacctccgcctggcccctgtatcgagctccctctgctttgcgcctcggagatcgtatccccttcgagggcgctaatgagcccgaccaggtgtccctgaaagaagatatcgatatgttgcaaaatgcgctggccgagaacgacaccccctactatgatgtgagccggaatgctagacacgctgacggggtgtttacctcagacttctcaaagctccttgggcagctttcggcaaagaagtatcttgagtcccttatgggcaagagggtttcatctaacattagcgaagacccagtgcccgtcaaacgtcacagtgatgctgtgttcactgacaactatacccgccttaggaagcagatggctgtaaaaaagtacttaaattctattttgaatgggaaacggagctccgagggcgagtcgcccgactttccagaagaattggaaaaa

SEQ ID NO: 137911 - DNA, 510 bp, Artificial Sequence
  derived and/or modified sequence
atggatacgcgcaataaagcacagttgctggtgctgttgaccctgctgagcgtgctgttcagccagactagtgcatggcctctgtaccgcgctccatctgccctgcgtctgggggaccgaatcccattcgaaggcgcgaatgagcctgaccaggttagcttgaaagaagacatcgatatgctgcagaacgctctggccgagaatgacaccccctactatgatgtgagccgcaacgctagacacgcggatggcgttttcacttctgatttctctaagctgctgggccagttaagcgccaagaaatacttagaaagcctgatgggtaaaagagtgtcgagcaacatcagcgaggacccagtgccggtcaagcgccacagcgacgccgttttcaccgataattacaccagactccgtaagcagatggccgtgaaaaagtatttgaatagtattcttaacggaaagcgtagctcggagggagaaagcccagactttccagaagagcttgagaag

SEQ ID NO: 137912 - DNA, 510 bp, Artificial Sequence
  derived and/or modified sequence
atggacactcggaacaaggcacagctcctcgtcttgctgacccttctgtcagtcctgttttcgcagacttcagcctggccactgtacagagcccctagtgctctgagacttggggatcgtattcccttcgaaggtgcaaatgagcctgatcaagtgtcgcttaaagaggacattgatatgcttcaaaacgcgcttgcagagaatgataccccatactacgacgtgtcgaggaatgcacggcatgcggacggagtgttcacctcagatttttccaaacttctgggacaactttccgctaagaagtaccttgagtcattgatgggaaaacgtgtctcatcgaacattagcgaggatccagtgccagtgaaacgtcactctgatgctgtttttaccgataactataccaggctcagaaagcagatggcagtgaagaagtacctgaattcaattctgaacgggaagcggagctccgagggtgaatccccggatttccctgaggagctggaaaag

SEQ ID NO: 137913 - DNA, 510 bp, Artificial Sequence
  derived and/or modified sequence
atggatacccgcaacaaggcacagttgctggtgctccttactctgctgtcggtgctgttctcgcagaccagcgcatggccgctgtaccgcgctccatccgctctgcgactcggagatcgcatcccgtttgaaggagccaatgagccggatcaggtgtcgctgaaggaagatattgacatgctccagaatgcccttgctgagaacgacactccctactacgatgtgtcccggaatgcaagacatgcggacggggtctttacctcggatttctccaagctgctgggacaactgtcagccaagaagtacctggagtcccttatggggaagcgcgtgagctcaaacatctccgaggacccggtgcctgtgaagaggcactcggacgctgttttcacggacaattacactaggctgagaaagcagatggctgtgaagaagtacctcaactccatcctcaacgggaagcggtcctccgagggcgaatcaccggacttcccagaggaactcgaaaag

SEQ ID NO: 137914 - DNA, 510 bp, Artificial Sequence
  derived and/or modified sequence
atggatacgcgaaataaagcgcaactattagtactattaacgttactatcggttctattttcgcaaacgtcggcgtggccgctatatcgagcgccgtcggcgttacgtctaggtgatcgtataccgtttgaaggtgcgaatgaaccggatcaagtatcgctaaaagaagatatagatatgttacaaaatgcgctagcggaaaatgatacgccgtattatgatgtttcgcgaaatgcgcgacatgcggatggtgtttttacgtcggatttttcgaaactattaggtcaattatcggcgaaaaaatatttagaatcgttaatgggtaaacgagtatcgtcgaatatatcggaagatccggttccggttaaacgtcattcggatgcggtatttacggataattatacgcgtttacgtaaacaaatggcggtaaaaaaatatttaaattcgatattaaatggtaaacgatcgtcggaaggtgaatcgccggattttccggaagaactagaaaaa

SEQ ID NO: 137915 - DNA, 510 bp, Artificial Sequence
  derived and/or modified sequence
atggacactcgcaacaaggcccagcttctggtgctgttgaccctcctcagcgtcctgttctcccagactagcgcctggccactgtaccgcgccccatcggccctcaggctgggcgaccggatcccgttcgaaggtgcgaatgagcctgaccaggtatcactcaaagaggacatcgacatgctgcagaacgcgctggcggagaatgatactccttactacgacgtctcgcgcaacgcgcgccatgcagatggcgtgttcacttccgacttttcaaagctgcttggccaactctccgccaagaagtacttggaatccctcatgggtaagagagtgtcaagcaatatctccgaagatcctgtcccagtgaaacgccactccgatgcagtgttcaccgacaactacaccagacttcgaaaacaaatggccgtgaagaagtacctgaattcgatcttgaacggaaagagatccagcgaaggagaatccccggactttccggaggaactggagaag

SEQ ID NO: 137916 - DNA, 510 bp, Artificial Sequence
  derived and/or modified sequence
atggatactaggaacaaggcacaactccttgtattactcacactactcagtgtgcttttttctcagacatcggcttggccactatatagagcccctagtgctctaaggctcggggataggatacctttcgaaggggccaatgaacctgatcaggtctcactaaaagaagatattgatatgctccagaacgccttagcagaaaacgatacaccatattatgatgtttctaggaacgccaggcatgccgatggggttttcacatccgatttctccaaactcctgggacagctcagtgctaaaaaatatctagagagtctcatggggaaacgggtaagttctaacatatccgaggatcctgttccagtgaaacgccattccgatgccgtgtttactgataactatacacgactccgcaaacaaatggcggtaaaaaaatatctcaactccatacttaacggaaaacggtcatctgagggagaatcacctgatttcccagaggagcttgaaaaa

SEQ ID NO: 137917 - DNA, 510 bp, Artificial Sequence
  derived and/or modified sequence
atggacacccgtaacaaagcccagctgttggtgctcctgactcttctgagcgtccttttttcccagaccagcgcatggcctctttacagagctccttcggcgctcaggctgggtgacagaattccattcgaaggcgctaacgaacctgatcaagtgagcctcaaggaagatattgacatgcttcaaaatgcgctggcggagaacgatactccatactatgatgtgtcccgaaacgctcgacatgcggatggtgtattcacctctgattttagcaagctgctcggacaactgagcgcaaaaaagtacctcgaatcgctgatgggcaagcgggtgtcctccaatatcagcgaagatcctgtccctgtcaaaagacactccgatgcagtgttcactgataactacactagacttcgcaagcaaatggccgtgaagaaatacttgaactccattctgaacgggaagcggtcgtcggagggagaatcacccgatttccccgaagaactggagaaa

SEQ ID NO: 137918 - DNA, 510 bp, Artificial Sequence
  derived and/or modified sequence
atggatacgcggaacaaggcccagctgctggtgttattgacactgctgagcgtgttattcagccagactagcgcctggccactgtatcgggcccccagtgcactgagactgggagatcgaatacccttcgagggggccaacgagcccgatcaagtctccttgaaggaggacattgatatgttgcagaatgcactggccgagaatgacacaccctattatgacgtttctaggaatgcacgccatgctgacggagtatttacctcggacttcagcaagttgttaggacagttaagtgcgaagaaatatctggagtctcttatgggcaaacgggtttccagcaatataagtgaagacccagtccctgttaaacggcatagtgacgctgtgtttacagacaactatactaggttaagaaagcaaatggcagtgaaaaaatacttgaactctatcctaaatggcaaacgttctagcgagggtgaatccccagacttccccgaagaactggaaaaa

SEQ ID NO: 137919 - DNA, 510 bp, Artificial Sequence
  derived and/or modified sequence
atggatacaaggaataaagctcagctccttgtgctgttaactttactcagcgtgctgttcagccagacatcagcatggcccctttaccgagcaccctccgcgttacgacttggggaccgtattcccttcgaaggggccaacgaaccagatcaggtatcattgaaagaggatattgacatgctgcagaacgctctcgctgaaaacgataccccatattacgatgtgtctcgaaatgctagacatgccgacggggtgtttacctctgatttctccaaactactcggccagctgagtgcaaagaagtaccttgagtctttgatggggaagagagtgtcttcaaatatcagcgaagatccagtgccagtgaaacggcatagcgatgctgtgtttaccgacaactatacccgactccggaagcagatggccgtaaaaaagtaccttaattcgatcttaaacggcaaaaggtcatctgaaggcgagtcgcctgatttccccgaggagctggaaaag

SEQ ID NO: 137920 - DNA, 510 bp, Artificial Sequence
  derived and/or modified sequence
atggataccaggaataaggcccaactcctggtgctgctgactctgctgagcgtgttattctcgcagacctccgcttggcccctttacagggcgccctcagccttgagattgggtgacagaatccccttcgaaggtgccaatgagcccgaccaagtgagcctcaaggaggatatagacatgcttcagaatgctcttgccgagaatgacactccctactacgacgtgtcccggaatgcccgccatgctgatggcgtctttacaagtgactttagcaaactgttggggcagctcagcgcgaagaagtaccttgaaagccttatggggaaacgagtgtcgagtaacatcagtgaggaccctgttcctgtgaaaaggcattccgatgcagtattcacagataattacacgcggctgcgcaagcagatggcagttaaaaaatatctgaatagtattctgaacggcaagcgcagttcagagggggaatcacccgactttccagaagaactggagaag

SEQ ID NO: 137921 - DNA, 510 bp, Artificial Sequence
  derived and/or modified sequence
atggacacacgcaataaagctcaattgctggtcctgttgacacttttgagtgtactcttttcccagacaagtgcctggcccctataccgcgcgccctctgctttacgccttggagataggatcccctttgagggagcaaatgagcccgatcaggttagcctgaaagaggacatcgacatgcttcaaaatgcgctggcggaaaacgataccccctactatgatgtatcgcggaatgctcgccatgctgatggagtattcacgtccgacttttccaagctgctcggccagctgtcagcgaaaaagtatcttgaaagcctcatgggaaagcgagtctcgtccaatatctcggaagatccagtaccagtaaagcgacactccgatgctgttttcactgataattacactcggctcagaaaacagatggcggtgaaaaagtatttaaattctatcctgaacggcaagcgctcatctgaaggcgaatccccagacttcccagaagaactggaaaag

SEQ ID NO: 137922 - DNA, 510 bp, Artificial Sequence
  derived and/or modified sequence
atggatacacgcaataaggctcagctgcttgtgctcctgaccttactgtctgtgctgttcagtcaaacctcagcctggccactgtatagggcaccatctgccttgagactgggagatcgcataccatttgaaggagccaatgagccagaccaggtctccctgaaagaggatattgacatgctccaaaatgctcttgcagagaacgatactccttactatgatgtcagtagaaacgcacggcatgcagatggcgtcttcaccagcgatttttcaaagctgctcggacagctaagtgctaaaaaatacctggagtctctgatgggtaagagagtgtcctccaacatcagcgaggaccctgtgcccgtgaagcgccacagtgatgctgttttcaccgacaactacactcgcttacggaagcagatggcagtgaagaagtatctgaattctatcctgaacggaaagcgaagttctgaaggcgagagccctgatttccctgaagaattagaaaag

SEQ ID NO: 137923 - DNA, 510 bp, Artificial Sequence
  derived and/or modified sequence
atggatacgaggaataaagctcagctgctggttctcttgacgctgctgtccgtgctcttttcacagacttcagcctggcctctctaccgggctccatccgctctgagactgggggatcgcatcccttttgagggggcaaatgagcccgatcaggtgagtctcaaggaggacatcgatatgctgcagaacgccctcgctgaaaacgataccccttattacgatgtttctagaaacgcacgacacgccgatggagtgttcacgagtgattttagcaagctgctggggcagctcagcgcaaagaaataccttgaatccttgatgggtaagagggtgtctagcaatatttcagaggatccggtccccgtcaaaaggcactcagacgctgtctttaccgacaactacaccagacttagaaaacagatggcagtgaaaaaatatctgaacagcattctcaacgggaagaggtcctcagaaggcgaatcacctgactttccagaagagctggagaag

SEQ ID NO: 137924 - DNA, 510 bp, Artificial Sequence
  derived and/or modified sequence
atggacacccggaataaagcacagctgcttgtcctgctgaccctccttagcgtgcttttcagccagaccagcgcatggcctctctaccgggccccatcagcacttagacttggtgatcggatcccttttgaaggagctaacgagcctgatcaggtgtccctcaaggaagatatcgatatgctgcaaaatgcgctcgcagaaaacgatactccttactacgacgtctcgagaaatgcgcggcatgcagacggggtgtttacctcagacttttcgaagttgctgggccaactctccgccaaaaagtacctcgaatcccttatgggtaagagagtgtcgtcaaacatctcagaagatccagtgcccgtcaaaaggcactcagatgcagtgtttacggacaactatacccgcctgcgcaagcaaatggcagtcaagaaataccttaatagtatccttaacggtaagcgaagctcggaaggagagtccccggattttcccgaagaacttgaaaag

SEQ ID NO: 137925 - DNA, 510 bp, Artificial Sequence
  derived and/or modified sequence
atggacacccgcaacaaagcccagctgcttgtgctgctgacccttctttctgtcctgttctcgcaaactagcgcttggccactttacagagccccctccgcactcagactgggcgatagaatcccctttgaaggcgctaatgaaccggaccaggtcagccttaaagaagatattgacatgctacaaaacgctctggcagaaaacgataccccctactatgatgttagccgcaatgctagacatgcagatggagtcttcacaagcgattttagtaagctgctgggccagctgagcgctaaaaagtacctggagagtctgatgggcaagcgggtcagtagcaatatcagcgaggacccagttcctgtgaagcgccatagcgacgcggtatttacagacaattacacacgattgagaaagcagatggccgtgaagaagtaccttaactccatcctgaacggcaagcggagcagcgaaggagagagccctgacttcccagaggaattggagaag

SEQ ID NO: 137926 - DNA, 510 bp, Artificial Sequence
  derived and/or modified sequence
atggacactcgtaataaagcccaactattggtgttattgaccttgctttccgtgctcttttcgcaaaccagcgcctggcccctttatagggcaccctccgcactgcgtttaggggaccgcatcccattcgagggtgccaacgagccagatcaagtgtccctcaaggaggacatagatatgttgcagaacgccctggctgaaaatgacaccccctactatgacgtgtctcgcaacgcaagacacgcagacggcgtctttacttccgatttttctaagcttttgggccagctatccgcgaagaagtacctcgagtcactcatgggcaagagagtgtcctctaatatttccgaggatcccgtacccgtcaaaagacactctgatgcagtttttaccgataactatacccgattacgtaaacagatggcagtcaagaagtacctaaacagcatacttaatggaaagcgatctagcgagggtgagtccccagatttcccagaagagctggagaaa

SEQ ID NO: 137927 - DNA, 510 bp, Artificial Sequence
  derived and/or modified sequence
atggatacgcgcaacaaggcccagctgctcgtgttgctcacccttctgagcgtgcttttctcgcagacttcggcatggcctctttaccgagctccctcagcgcttcggctgggtgatcgcattcctttcgaaggcgcaaacgaacctgaccaagtgtcccttaaggaggacatagacatgttgcaaaatgcacttgctgaaaatgataccccttactacgacgttagcaggaatgctcgacatgcagacggagtctttacctcggatttttcgaaactgctcgggcaactgagcgcaaagaagtaccttgaatcactcatgggtaagcgtgtctcatcaaatatctcggaagatcctgtgccagtgaagcgacattcggatgcagtgtttactgacaactatactcgtttgcgaaaacagatggccgtgaagaaatacctgaactctatccttaacggaaagcgttcatctgagggagaatcgccagattttccagaggagctggagaaa

SEQ ID NO: 137928 - DNA, 510 bp, Artificial Sequence
  derived and/or modified sequence
atggacacccggaataaggcccagctgcttgtcctcctgactctgctgtcagtcctcttctcccagacttccgcctggccgctctaccgcgcaccttcagcgctgagactcggggatcgcattccgttcgagggcgccaacgagcctgaccaagtgtcgctgaaggaagatatcgacatgcttcagaatgcgctggcagagaacgacactccgtactacgatgtgagccgcaatgcccggcacgcagacggcgtgttcacttcggacttctccaaactgctgggtcaattgtctgccaagaagtatttggagtccctgatgggaaagcgcgtgtcatccaacatcagcgaggacccggtgccggtgaagcgacactccgacgcggtgtttaccgacaattacactcgcctcaggaaacagatggcagtgaagaagtacttgaactccatcctgaatggtaagagaagctcagagggtgaatcaccagattttcctgaagaactcgaaaaa

SEQ ID NO: 137929 - DNA, 510 bp, Artificial Sequence
  derived and/or modified sequence
atggacaccagaaataaggcacagctcctggtcctcctgactctcctctcggtcctgttcagtcaaactagcgcgtggccgttgtaccgtgccccgtcagccttgcgactgggagacagaatcccattcgagggggctaacgagccggatcaggtgagcttgaaggaagatatcgacatgctgcaaaacgcattggcagaaaacgatacgccctactacgatgtgtcccgcaacgcaagacacgccgacggcgtgtttacctccgatttcagcaaactcttgggccagctctcagccaaaaagtacctggaatcgctgatgggaaaacgcgtgagttccaatatctctgaggacccggttcctgttaagaggcattcggacgctgtgttcactgacaactatacccggctgaggaagcagatggcggtgaagaaatacctgaacagcatacttaatggaaagcgctcctcggagggtgaaagcccagacttccctgaagagttggaaaaa

SEQ ID NO: 137930 - DNA, 510 bp, Artificial Sequence
  derived and/or modified sequence
atggatacccgaaacaaggctcagctcctggttctcctgacgttgttgtcagtcctcttttcgcagacctcggcatggccactgtaccgcgcccctagcgctcttcgactgggagatagaatccctttcgagggtgccaacgagccagaccaagtcagcttgaaggaagatatcgatatgctccagaacgcattggcggaaaatgacaccccctactacgacgtgtcacggaacgcccgccatgccgatggcgtgttcacctccgacttctcaaagctgctgggccaactgtcggccaagaagtatctggagtccctgatgggcaaacgcgtgtcgagtaatatctcggaggatccggtgccggtgaagagacacagcgacgccgtgttcacggacaactacacgcggctgcgcaagcagatggcggtaaagaagtacctgaacagcatcctcaatggaaagcgctcctccgaaggcgagagcccagactttccggaagaactggaaaag

SEQ ID NO: 137931 - DNA, 510 bp, Artificial Sequence
  derived and/or modified sequence
atggacactcgcaacaaggctcagctgctggtcctgcttacattactgtctgtgttgttctctcagacttctgcctggccactgtaccgagccccatccgcccttcgcctcggagaccggatcccttttgagggggctaatgaaccagatcaagtcagcctaaaggaggacatcgacatgctgcagaatgcactggccgagaacgacaccccctattacgacgtgtcaaggaacgcacgacatgccgacggcgtgttcacttcagatttcagtaagcttttggggcagctgagtgctaagaaatatctcgagtctcttatgggaaagcgcgtatctagtaatattagtgaagatccggttccagtcaagagacattctgatgcagtctttactgacaactatactagactcaggaagcagatggcagtgaaaaagtacctgaatagtattctgaacggcaagagatcctccgagggggagtccccagacttccccgaagagctagaaaaa

SEQ ID NO: 137932 - DNA, 510 bp, Artificial Sequence
  derived and/or modified sequence
atggataccagaaacaaggctcagctgctcgtgttgttgacgctccttagcgtccttttttcccaaacctcagcatggcctttgtatagagcaccgtccgcactgagactcggggatcggatacctttcgaaggtgcaaacgagcccgatcaagtctcactgaaggaggacatcgatatgctgcagaatgcacttgccgaaaacgataccccctactacgatgtgtcgcgaaatgctcgccatgctgatggagtctttacgtcggacttttcgaagctgctgggacaactgtcagcgaaaaagtacctcgaatcgcttatgggtaagagagtgagctcgaacatctccgaggaccctgttcctgtcaaaaggcacagcgacgcggtgtttactgacaactacactaggcttcggaagcagatggccgtgaaaaagtatcttaactccattcttaatgggaaacgatcctcagaaggcgaatcgccagacttcccggaggaactggagaag

SEQ ID NO: 137933 - DNA, 510 bp, Artificial Sequence
  derived and/or modified sequence
atggacacccgaaacaaggcccagctacttgttttgttaactctcctctccgtcttgtttagtcaaacaagtgcctggcccctttacagagccccatccgcactgagactaggagaccggattccatttgagggtgccaacgagcccgaccaagtctctctgaaggaagacattgacatgctgcaaaacgcgctggccgagaatgacacaccctactacgatgtgagtcgaaacgcacgtcacgcggacggcgtgtttacttccgacttttccaagttgctggggcagctttcggctaagaaatatctggagtccctgatgggaaaaagagtgagctcaaacatttctgaagatccagttcccgtaaagaggcacagcgatgcggtgtttacagacaactatacacgcttgaggaaacagatggcggtgaaaaagtacctgaattccatcctcaatggaaagcggtcaagcgaaggcgaaagccctgacttcccggaggagttggaaaaa

SEQ ID NO: 137934 - DNA, 659 bp, Artificial Sequence
  derived and/or modified sequence
gggaaataagagagaaaagaagagtaagaagaaatataagagccaccatggacactaggaacaaagcgcaacttcttgtcttgcttacgctgctctccgtcctgttctcccagacgtccgcatggcccttgtaccgagcgccttcagctttgcggctgggcgatagaatcccttttgaaggggccaacgagcccgatcaggtgtcgcttaaggaggacatcgacatgctccagaacgccctcgcggagaacgatacaccgtactatgacgtatcgcggaacgcgcgacatgcagacggagtgtttacaagcgatttctcgaaattgctgggacagctcagcgccaagaaatatctcgaatcactgatggggaaaagagtgtcgtcaaatatctcagaagatccagtcccggtaaagcggcactcggatgcggtgttcacggacaattacacccgcctccgcaagcaaatggccgtcaagaagtatcttaattccattttgaatggaaaaaggagctcggagggtgaatcgcccgactttccggaggagttggaaaagtgataataggctgccttctgcggggcttgccttctggccatgcccttcttctctcccttgcacctgtacctcttggtctttgaataaagcctgagtaggaag

SEQ ID NO: 137935 - DNA, 513 bp, Artificial Sequence
  derived and/or modified sequence
atggacaccagaaacaaggcccagctgctggtgctgctgaccctgctgagcgtgctgttcagccagaccagcgcctggcccctgtacagagcccccagcgccctgagactgggcgacagaatccccttcgagggcgccaacgagcccgaccaggtgagcctgaaggaggacatcgacatgctgcagaacgccctggccgagaacgacaccccctactacgacgtgagcagaaacgccagacacgccgacggcgtgttcaccagcgacttcagcaagctgctgggccagctgagcgccaagaagtacctggagagcctgatgggcaagagagtgagcagcaacatcagcgaggaccccgtgcccgtgaagagacacagcgacgccgtgttcaccgacaactacaccagactgagaaagcagatggccgtgaagaagtacctgaacagcatcctgaacggcaagagaagcagcgagggcgagagccccgacttccccgaggagctggagaagtag

SEQ ID NO: 137936 - DNA, 513 bp, Artificial Sequence
  derived and/or modified sequence
atggatacccgtaacaaggctcagctgctggtcctcctgactctgctgagcgtattattctctcagacttcagcttggccattatacagggccccgtctgctctgcggctgggcgacaggattccattcgagggcgctaacgaaccagaccaggtgtccctgaaggaagacatcgacatgcttcagaatgcactcgctgagaatgacactccctattatgatgtttctaggaatgccagacatgccgatggtgtgtttacttctgatttttctaagttgctgggccagttgtcagctaagaagtatctggagtctttgatgggcaaacgcgtaagcagcaatatctctgaggatccagtccctgtgaaacgtcatagtgacgcagtattcaccgacaactacacaagactcaggaaacaaatggctgtgaaaaaatacctgaattccatcctcaatggtaaacgctcttctgagggagaatcaccggatttcccggaggagcttgagaagtag

SEQ ID NO: 137937 - DNA, 513 bp, Artificial Sequence
  derived and/or modified sequence
atggacaccaggaacaaggcccagctgctggtgctgctgaccctgctgtctgtgctcttcagccagaccagcgcctggcccctgtaccgggcccccagcgccctgcggctgggggaccgcatcccctttgaaggagccaatgaaccagaccaggtgtccctgaaggaggacatcgacatgctgcagaatgccctggctgaaaatgacaccccctactatgatgtgtccagaaatgcccggcatgctgatggagtcttcaccagtgacttcagcaagctgctgggccagctgagcgccaagaagtacctggagagcctgatgggcaagagggtgagcagcaacatcagtgaagatcctgtgcctgtgaagaggcacagtgatgctgtgttcacagacaactacacccggctgaggaagcagatggctgtgaagaagtacctgaacagcatcctgaatggcaagaggagcagcgagggggagagcccagacttccctgaggagctggagaagtag

SEQ ID NO: 137938 - DNA, 513 bp, Artificial Sequence
  derived and/or modified sequence
atggacacccggaacaaggcccagctgctggtgctgctgaccctgttgagtgtcttgttttcccaaaccagcgcatggcccctttatagagcacctagcgcccttcgactgggtgacagaatcccattcgagggcgcgaacgaaccagaccaggttagcttaaaggaggatatcgatatgcttcagaacgcccttgcagaaaatgataccccctactacgatgtgtccagaaacgcacgtcatgccgatggcgtgtttacatctgatttcagtaaactgctgggccagttaagtgctaaaaaatatctcgaatctctcatggggaaaagagtcagctccaatatcagcgaggatcctgtccctgtcaagcgacacagcgacgcagtattcacagataattacaccaggctgcgcaaacaaatggcagtgaagaagtatcttaactccatcctgaatggaaaaaggtcctctgagggcgagagcccagacttcccagaggaactcgaaaagtag

SEQ ID NO: 137939 - DNA, 513 bp, Artificial Sequence
  derived and/or modified sequence
atggatacaaggaataaggcccagctactggtgcttctcacactgctgagtgttctttttagccagactagcgcgtggcctctgtacagggcacctagcgcactcagattgggtgaccggattccgttcgagggggcaaacgagccggaccaggtgtccctgaaggaagatattgatatgctgcaaaacgcgctggcagaaaacgacaccccatactacgatgtgagccgcaacgcacggcatgcagacggggtgttcacatctgatttcagcaaactcctcggacagttgtctgcaaaaaagtatctggagagtctgatgggcaagcgtgtttcgtccaacataagcgaggatcctgttcctgtgaaacggcactccgatgcggtatttaccgacaattacacgaggttgcgcaagcagatggcagtcaagaagtatctgaatagcatactgaacggaaagcgctcgtccgaaggagagtctccagatttcccagaggagctggagaaatag

SEQ ID NO: 137940 - DNA, 1584 bp, Artificial Sequence
  derived and/or modified sequence
gggtagagtgagaagcaccagcaggcagtaacagccaacccttagccattgctaagggcagagaactggtggagcctttctcttactcccaggacttcagcacctaagacagctccaaaacaaaccagaacagtcagctccgggggagcacgactgggcgagaggcacagaaatggacaccagaaataaggcccagctccttgtgctcctgactcttctcagtgtgctcttctcacagacttcggcatggcctctttacagggcaccttctgctctcaggttgggtgacagaataccctttgagggagcaaatgaacctgatcaagtttcattaaaagaagacattgacatgttgcaaaatgcattagctgaaaatgacacaccctattatgatgtatccagaaatgccaggcatgctgatggagttttcaccagtgacttcagtaaactcttgggtcaactttctgccaaaaagtaccttgagtctcttatgggaaaacgtgttagcagtaacatctcagaagaccctgtaccagtcaaacgtcactcagatgcagtcttcactgacaactatacccgccttagaaaacaaatggctgtaaagaaatatttgaactcaattctgaatggaaagaggagcagtgagggagaatctcccgactttccagaagagttagaaaaatgatgaaaaagacctttggagcaaagctgatgacaacttcccagtgaattcttgaaggaaaatgatacgcaacataattaaattttgagttctacataagtaattcaagaaaacaacttcaatatccaaaccaaataaaaatattgtgttgtgaatgttgtgatgtattctagctaatgtaataactgtgaagtttacattgtaaatagtatttgagagttctaaattttgtctttaactcataaaaagcctgcaatttcatatgctgtatatcctttctaacaaaaaaatatatttaatgataagtaaatgctaggttaattccaattatatgagacgtttttggaagagtagtaatagagcaaaattgatgtgtttatttatagagtgtacttaactattcaggagagtagaacagataatcagtgtgtctaaatttgaatgttaagcagatggaatgctgtgttaaataaacctcaaaatgtctaagatagtaacaatgaagataaaaagacattcttccaaaaagattttcagaaaatattatgtgtttccatattttataggcaacctttatttttaatggtgttttaaaaaatctcaaatttggattgctaatcaccaaaggctctctcctgatagtctttcagttaaggagaacgacccctgcttctgacactgaaacttccctttctgcttgtgttaagtatgtgtaaaatgtgaagtgaatgaaacactcagttgttcaataataaatatttttgccataatgactcagaatattgctttggtcatatgagcttccttctgtgaaagtacatttggagacacaactatttttccaaaataattttaagaaatcaaagagagaaaataaagaccttgcttatgattgcagataa

SEQ ID NO: 137941 - RNA, 659 nt, Artificial Sequence
  derived and/or modified sequence
gggaaauaagagagaaaagaagaguaagaagaaauauaagagccaccauggacacuaggaacaaagcgcaacuucuugucuugcuuacgcugcucuccguccuguucucccagacguccgcauggcccuuguaccgagcgccuucagcuuugcggcugggcgauagaaucccuuuugaaggggccaacgagcccgaucaggugucgcuuaaggaggacaucgacaugcuccagaacgcccucgcggagaacgauacaccguacuaugacguaucgcggaacgcgcgacaugcagacggaguguuuacaagcgauuucucgaaauugcugggacagcucagcgccaagaaauaucucgaaucacugauggggaaaagagugucgucaaauaucucagaagauccagucccgguaaagcggcacucggaugcgguguucacggacaauuacacccgccuccgcaagcaaauggccgucaagaaguaucuuaauuccauuuugaauggaaaaaggagcucggagggugaaucgcccgacuuuccggaggaguuggaaaagugauaauaggcugccuucugcggggcuugccuucuggccaugcccuucuucucucccuugcaccuguaccucuuggucuuugaauaaagccugaguaggaag

SEQ ID NO: 137942 - protein, 438 aa, Artificial Sequence
  derived and/or modified sequence
MRTLLPPALLTCWLLAPVNSIHPECRFHLEIQEEETKCAELLRSQTEKHKACSGVWDNITCWRPANVGETVTVPCPKVFSNFYSKAGNISKNCTSDGWSETFPDFVDACGYSDPEDESKITFYILVKAIYTLGYSVSLMSLATGSIILCLFRKLHCTRNYIHLNLFLSFILRAISVLVKDDVLYSSSGTLHCPDQPSSWVGCKLSLVFLQYCIMANFFWLLVEGLYLHTLLVAMLPPRRCFLAYLLIGWGLPTVCIGAWTAARLYLEDTGCWDTNDHSVPWWVIRIPILISIIVNFVLFISIIRILLQKLTSPDVGGNDQSQYKRLAKSTLLLIPLFGVHYMVFAVFPISISSKYQILFELCLGSFQGLVVAVLYCFLNSEVQCELKRKWRSRCPTPSASRDYRVCGSSFSRNGSEGALQFHRGSRAQSFLQTETSVI

SEQ ID NO: 137943 - protein, 77 aa, Artificial Sequence
  derived and/or modified sequence
MRTLLPPALLTCWLLAPVNSIHPECRFHLEIQEEETKCAELLRSQTEKHKGHTKGFILIHAGGLKRILDPHTYPLAP

SEQ ID NO: 137944 - DNA, 1317 bp, Artificial Sequence
  derived and/or modified sequence
atgagaaccctgctgccccccgccctgctgacctgctggctgctggcccccgtgaacagcatccaccccgagtgcagattccacctggagatccaggaggaggagaccaagtgcgccgagctgctgagaagccagaccgagaagcacaaggcctgcagcggcgtgtgggacaacatcacctgctggagacccgccaacgtgggcgagaccgtgaccgtgccctgccccaaggtgttcagcaacttctacagcaaggccggcaacatcagcaagaactgcaccagcgacggctggagcgagaccttccccgacttcgtggacgcctgcggctacagcgaccccgaggacgagagcaagatcaccttctacatcctggtgaaggccatctacaccctgggctacagcgtgagcctgatgagcctggccaccggcagcatcatcctgtgcctgttcagaaagctgcactgcaccagaaactacatccacctgaacctgttcctgagcttcatcctgagagccatcagcgtgctggtgaaggacgacgtgctgtacagcagcagcggcaccctgcactgccccgaccagcccagcagctgggtgggctgcaagctgagcctggtgttcctgcagtactgcatcatggccaacttcttctggctgctggtggagggcctgtacctgcacaccctgctggtggccatgctgccccccagaagatgcttcctggcctacctgctgatcggctggggcctgcccaccgtgtgcatcggcgcctggaccgccgccagactgtacctggaggacaccggctgctgggacaccaacgaccacagcgtgccctggtgggtgatcagaatccccatcctgatcagcatcatcgtgaacttcgtgctgttcatcagcatcatcagaatcctgctgcagaagctgaccagccccgacgtgggcggcaacgaccagagccagtacaagagactggccaagagcaccctgctgctgatccccctgttcggcgtgcactacatggtgttcgccgtgttccccatcagcatcagcagcaagtaccagatcctgttcgagctgtgcctgggcagcttccagggcctggtggtggccgtgctgtactgcttcctgaacagcgaggtgcagtgcgagctgaagagaaagtggagaagcagatgccccacccccagcgccagcagagactacagagtgtgcggcagcagcttcagcagaaacggcagcgagggcgccctgcagttccacagaggcagcagagcccagagcttcctgcagaccgagaccagcgtgatctag

SEQ ID NO: 137945 - DNA, 1317 bp, Artificial Sequence
  derived and/or modified sequence
atgagaaccttgcttccacctgcactgctgacctgctggctgctcgccccagtgaactctatccatccggaatgtcggtttcacctggagatacaagaagaggaaaccaagtgcgcagaactgctgcggagccaaacagaaaagcataaagcgtgttctggcgtgtgggataatatcacatgttggcgacctgccaatgtcggggaaacggttactgtaccctgtccaaaagtcttctcaaacttctattctaaagctggcaatatatccaagaactgtaccagtgacgggtggtctgaaactttcccggacttcgttgacgcctgtgggtatagcgacccagaagatgagagtaagatcacattctatattctggtcaaagctatttacactctggggtatagtgtgagtttgatgtcattagctaccggctccatcatcctttgccttttccggaaacttcactgtactagaaattatatccatcttaacttgttcctaagctttatcctacgtgccatttctgtactggttaaggacgacgtgctgtactcctcttcaggcactctccattgccccgaccaaccctcctcctgggtggggtgcaagttatctctggtgttcctgcagtattgcattatggctaacttcttctggttgttggtggagggactttacttgcacacactactggtggctatgttgcctcctagacgctgcttcctagcctacctcctcatcggctggggtctacccacagtctgtatcggtgcttggaccgcagctaggctttaccttgaggatacgggctgttgggacaccaacgatcacagcgttccttggtgggtcatcaggatcccaattctcattagcattattgtgaatttcgtgctattcatatccattatacgcatacttctacagaagctcaccagccccgacgtgggcgggaacgaccagtcccaatataagaggcttgcaaagagcacacttctgctcatacctctgtttggcgtccactatatggtgttcgcggtgtttccgatcagcatttcttctaaatatcagatcctgtttgaactctgtttgggatcgtttcagggccttgtggtggccgtgctgtattgcttccttaactcagaagtgcagtgcgagttgaagcgcaagtggaggagtaggtgtcccaccccatctgccagtcgggactatcgagtgtgtggttcttcattcagccgcaacggaagtgaaggagctctgcaatttcaccgcggaagtcgggcacagtcgtttttacagaccgaaacgtcagtgatctag

SEQ ID NO: 137946 - DNA, 1317 bp, Artificial Sequence
  derived and/or modified sequence
atgaggaccctgctgcccccagccctgctgacctgctggctgctggcccctgtgaacagcatccaccctgagtgccgcttccacctggagatccaggaggaggagaccaagtgtgccgagctgctgcggagccagacagagaagcacaaggcctgcagcggcgtgtgggacaacatcacctgctggaggcctgccaacgtgggggagaccgtgacagtgccctgccccaaggtgttcagcaacttctacagcaaggccggcaacatcagcaagaactgcaccagtgatggctggagcgagaccttcccagactttgtggatgcctgtggctacagcgaccctgaagatgagagcaagatcaccttctacatcctggtgaaggccatctacaccctgggctacagcgtgtccctgatgagcctggccaccggcagcatcatcctgtgcctcttcaggaagctgcactgcaccaggaactacatccacctgaacctcttcctgtccttcatcctgcgggccatctctgtgctggtgaaggatgatgtgctgtacagcagcagcggcaccctgcactgcccagaccagcccagctcctgggtgggctgcaagctgagcctggtgttcctgcagtactgcatcatggccaacttcttctggctgctggtggagggcctgtacctgcacaccctgctggtggccatgctgcccccccggcgctgcttcctggcctacctgctgattggctggggcctgcccaccgtgtgcatcggggcctggacagctgcccggctgtacctggaggacaccggctgctgggacaccaatgaccacagcgtgccctggtgggtgatccgcatccccatcctgatcagcatcatcgtgaactttgtgctcttcatcagcatcatccgcatcctgctgcagaagctgaccagcccagatgtgggcggcaatgaccagagccagtacaagaggctggccaagagcaccctgctgctgatccccctgtttggagtgcactacatggtgtttgctgtgttccccatcagcatcagcagcaagtaccagatcctgtttgagctgtgcctgggcagcttccagggcctggtggtggccgtgctgtactgcttcctgaacagcgaggtgcagtgtgagctgaagaggaagtggaggagccgctgccccacccccagcgccagccgggactacagagtgtgtggcagcagcttcagcagaaatggaagtgaaggagccctgcagttccaccggggcagccgggcccagagcttcctgcagacagagaccagcgtcatctag

SEQ ID NO: 137947 - DNA, 1317 bp, Artificial Sequence
  derived and/or modified sequence
atgcggaccctgctgccccccgccctgctgacctgctggctgctggcgccagtgaactcaatccaccccgaatgtaggttccatctcgagatacaagaggaggaaacaaagtgcgctgaactgctgcgctcgcagactgaaaagcataaggcgtgtagtggcgtatgggataacatcacctgttggaggcctgccaacgtgggggaaacagtgacggtaccatgtcccaaggtgttttcgaacttttactctaaagctggcaatatctccaagaattgcacgtcagacggctggtccgaaaccttcccagattttgtcgacgcctgcggatacagcgaccccgaggatgaaagcaaaattaccttttacattctggtgaaggccatatacacactgggctactctgtctcactgatgagtctcgctaccggttctattatcctgtgcctgttccgcaaactgcattgtacccgtaattacatacatttgaacttgtttctgtcatttatactgagggccatcagtgttctggtgaaggacgacgttttgtacagcagctccggcaccctccactgtcccgaccaacccagctcttgggtggggtgtaaactttccctggtattcctgcaatactgcattatggctaacttcttctggctgctggtggaagggctctacctacacacgctgttggtagcaatgttacccccaagacgctgctttctggcctatctgctcatcggctggggactccctacagtgtgcataggagcctggacggctgcgcggctttacctcgaggataccggttgttgggataccaacgatcacagtgtgccttggtgggtgatcaggattcctatcctgatatccataatcgtgaacttcgtgttattcatttcaatcatccgtattctcttgcagaagctcacctctccagacgtgggcggtaacgatcagtcccagtataaaaggttagccaaatcaaccctccttttaatccctttattcggggtgcattacatggtttttgcagtctttcctatctcaatttcttcgaagtaccagattctgtttgagttgtgcctcggctcatttcaaggattagttgtcgctgtgctgtattgcttcctcaactcagaggtccagtgtgagctcaagaggaagtggcgcagtcggtgtcctacacccagtgcttcaagggactacagggtttgtgggagcagcttttcacgcaatggttccgagggagcacttcagtttcaccgggggtcccgggctcaatcctttctccaaacagaaacctcagtgatatag

SEQ ID NO: 137948 - DNA, 1317 bp, Artificial Sequence
  derived and/or modified sequence
atgcggactctgcttcctcctgccctcctgacatgttggctcctcgctcctgtaaactcaatccacccggaatgtcgatttcatttggaaatacaggaggaagagaccaagtgcgccgaacttctgcgctcccagaccgagaaacacaaagcctgcagcggcgtgtgggataatatcacttgctggcgcccagctaatgtgggggagaccgttaccgtgccctgccccaaagtgttctccaatttttatagcaaggcagggaacattagtaaaaactgtactagcgatggatggtcggagacgtttcctgacttcgtggacgcctgtggatacagcgatccagaggacgaaagcaagattacattttatatcttggttaaagctatctacacccttggatatagcgtgtccttgatgagccttgccacgggaagcatcattctctgtctctttcggaagcttcactgtacacgtaactacatccacttgaatctgtttctgtcgttcattcttcgtgccattagcgtgctagttaaggacgacgtgctgtattcgagtagcgggacattgcactgccccgatcaaccaagcagttgggtgggatgcaagttgtccctagtctttttacagtattgtatcatggccaacttcttttggctgcttgtcgaaggattataccttcatacattgctggtggccatgctcccacccaggagatgtttcctggcttatctgctgattggttggggcctgcccacggtctgcatcggtgcatggacggccgctagactctatcttgaggatactggttgttgggatacgaacgaccatagtgttccttggtgggtcatccggatacccattttaatttcaatcatcgtgaacttcgtccttttcattagcatcattcggatcctcctgcagaaactgacttcacctgatgtgggcggtaacgaccagagccagtacaaacggctcgccaaaagcaccctcctgttgattccactgtttggggttcactatatggtgttcgctgtgtttccgatctctatttcctccaagtatcaaattctcttcgaactgtgcctggggtcgttccaaggcctggtcgtggccgttctgtattgcttcctgaacagcgaggtccagtgtgagttgaagcgaaaatggcgctcgaggtgtccgacccctagcgcctcccgggattatcgggtttgcgggtcctcattcagcagaaacgggtctgagggcgctctccagttccacaggggaagtcgagcacagagttttttgcagacggagacttcagtgatttag

SEQ ID NO: 137949 - DNA, 3944 bp, Artificial Sequence
  derived and/or modified sequence
gtgcattgagcgcgctccagctgccgggacggagggggcggcccccgcgctcgggcgctcggctacagctgcggggcccgaggtctccgcgcactcgctcccggcccatgctggaggcggcggaaccgcggggacctaggacggaggcggcgggcgctgggcggcccccggcacgctgagctcgggatgcggacgctgctgcctcccgcgctgctgacctgctggctgctcgcccccgtgaacagcattcacccagaatgccgatttcatctggaaatacaggaggaagaaacaaaatgtgcagagcttctgaggtctcaaacagaaaaacacaaagcctgcagtggcgtctgggacaacatcacgtgctggcggcctgccaatgtgggagagaccgtcacggtgccctgcccaaaagtcttcagcaatttttacagcaaagcaggaaacataagcaaaaactgtacgagtgacggatggtcagagacgttcccagatttcgtcgatgcctgtggctacagcgacccggaggatgagagcaagatcacgttttatattctggtgaaggccatttatacactgggctacagtgtctctctgatgtctcttgcaacaggaagcataattctgtgcctcttcaggaagctgcactgcaccaggaattacatccacctgaacctgttcctgtccttcatcctgagagccatctcagtgctggtcaaggacgacgttctctactccagctctggcacgttgcactgccctgaccagccatcctcctgggtgggctgcaagctgagcctggtcttcctgcagtactgcatcatggccaacttcttctggctgctggtggaggggctctacctccacaccctcctggtggccatgctcccccctagaaggtgcttcctggcctacctcctgatcggatggggcctccccaccgtctgcatcggtgcatggactgcggccaggctctacttagaagacaccggttgctgggatacaaacgaccacagtgtgccctggtgggtcatacgaataccgattttaatttccatcatcgtcaattttgtccttttcattagtattatacgaattttgctgcagaagttaacatccccagatgtcggcggcaacgaccagtctcagtacaagaggctggccaagtccacgctcctgcttatcccgctgttcggcgtccactacatggtgtttgccgtgtttcccatcagcatctcctccaaataccagatactgtttgagctgtgcctcgggtcgttccagggcctggtggtggccgtcctctactgtttcctgaacagtgaggtgcagtgcgagctgaagcgaaaatggcgaagccggtgcccgaccccgtccgcgagccgggattacagggtctgcggttcctccttctcccgcaacggctcggagggcgccctgcagttccaccgcggctcccgcgcccagtccttcctgcaaacggagacctcggtcatctagccccacccctgcctgtcggacgcggcgggaggcccacggttcggggcttctgcggggctgagacgccggcttcctccttccagatgcccgagcaccgtgtcgggcaggtcagcgcggtcctgactccgtcaagctggttgtccactaaaccccatacctggaattggagtcgtgttgtcattgactcgatttaaactccagcatttagataatcttgtgcaaaatgtgtttcagccgtatagtggatccacttttttttttttttttttttttgagacggagtctcgctctgtcgcccaggctggactgcagtggcctgatctctgctccctgcaagctccgcctcccgggttcacgccattctcctgcctcagcctcccatagctgggactacaggcgcccgccaacacgcctggctaattttttgtatttttagtagagacagggtttcaccatgttagccaggatggtctcgatctcctgacctcgtgatgggcccgcctcggcctcccaaagtgctgggattaaggcgtgagccactgcgcccggcccaagagaataggggagccaaggaggaaatgtggaaacgcagttgtgtggcccagcacgagcctgggcgaccaccgggtgacatccgtcccacatcagggcggcctcccaggtcccataagggtagccccctcatctgcaggacagagggaagccagtcagggcccccctgacgttaggaccaggagaaatcaacaggagggcagcccgtcctctctcttggggcgcccacccggcccggctgagccctgccccacccaactccacagggctgttttgcctccccacggaaggcgggctgaggagacaaccagatcaggagagcaaggtcatgaaggaggggacctctccacacaggtgttccgtgggaccctcagcagctctggctctgcctcaggaggtcacctgccgccctgtgggagccgcagagcctgacgctcagccccaggccagctgcggccaggcctgcgggcccctggtgatggggttacgtggggtgcgggatacagctgagtgggaaccggaaacctattctctttttaacaaaaataatcttaggataagaattattttaacaacatataaaactgtttcaagccctcctccccagagctggcgctcagcagccctagcggctgctccttcaggcgaagggtggtttgcagatgtggggagggtgtctggggacgttgctgagccagctgcagaagggtggggatatcagggcacagtctccatgtgtgtgccaagccctggcccccacagcgctcgatggacctcagcaagctgcccagccctggcccaggtgccccgactgtgggactcagttgttctgagcacatttgactccacttttcccttaaaaatgaatgtcttgttcctgtgcattggtggcatcacagaccccagctggggcgcgatgtcaaaggtcgggacagctgtgccgggaggcagccacagggaagctcacacatcctgtcagtgtcaccttggtttgcaaaacccatatccccggtaaaatgaggccggacagaggggctgttaggacagcaaagcagcagtgtccagagacccctcaatccccaaaggtccgcaccctgtcctgcacaccctgggccacgccggccacacccctctgctgcaacaagctcatccctggacttctgggagaatgaacccgaggttggtttggggagacaggtgaggcggtcggatctacagaacaacccaccatttctgggggccgcagaggatccatcacagacggatactggggagtaaacggcccaggccaggtgcccaggaaaggacggctgagcatgtggagcgagagggaggcaggtggacgctgcagaccccaggttcagtgcggcccctcggctgttcctcccctgtagggtttggacagacccacccccagccttgcccagctttcaaaggacaaaagggagcatcccccacctactctcaggtttttgaggaaacaaagatttgtggtaactgaaggtgttgggtcagtggccaggtgccgacactgagctgtgacccagaggggacgctgaggaagtgggcgtgagtggacgtgtcaggtggttaccaggcactggttgttgatggtcggtggttgggtgtgggcagtcatcagtcatcaggtgtgctcaggggacaatctcccctcaaccgcacatgtgccactgttcagcggagctgactggtttctcctggtagaggggccggctgtttcctgacagatgcctggtgagcaggggaagcaggacccagtggtcagcaggtgtctttaactgtcattgtgtgtggaatgtcgcagactcctccacgtggcgggaatgagctgtgtaaatacttcaataaagcctgacttcacatctgca

SEQ ID NO: 137950 - protein, 873 aa, Artificial Sequence
  derived and/or modified sequence
MGTSALWALWLLLALCWAPRESGATGTGRKAKCEPSQFQCTNGRCITLLWKCDGDEDCVDGSDEKNCVKKTCAESDFVCNNGQCVPSRWKCDGDPDCEDGSDESPEQCHMRTCRIHEISCGAHSTQCIPVSWRCDGENDCDSGEDEENCGNITCSPDEFTCSSGRCISRNFVCNGQDDCSDGSDELDCAPPTCGAHEFQCSTSSCIPISWVCDDDADCSDQSDESLEQCGRQPVIHTKCPASEIQCGSGECIHKKWRCDGDPDCKDGSDEVNCPSRTCRPDQFECEDGSCIHGSRQCNGIRDCVDGSDEVNCKNVNQCLGPGKFKCRSGECIDISKVCNQEQDCRDWSDEPLKECHINECLVNNGGCSHICKDLVIGYECDCAAGFELIDRKTCGDIDECQNPGICSQICINLKGGYKCECSRGYQMDLATGVCKAVGKEPSLIFTNRRDIRKIGLERKEYIQLVEQLRNTVALDADIAAQKLFWADLSQKAIFSASIDDKVGRHVKMIDNVYNPAAIAVDWVYKTIYWTDAASKTISVATLDGTKRKFLFNSDLREPASIAVDPLSGFVYWSDWGEPAKIEKAGMNGFDRRPLVTADIQWPNGITLDLIKSRLYWLDSKLHMLSSVDLNGQDRRIVLKSLEFLAHPLALTIFEDRVYWIDGENEAVYGANKFTGSELATLVNNLNDAQDIIVYHELVQPSGKNWCEEDMENGGCEYLCLPAPQINDHSPKYTCSCPSGYNVEENGRDCQSTATTVTYSETKDTNTTEISATSGLVPGGINVTTAVSEVSVPPKGTSAAWAILPLLLLVMAAVGGYLMWRNWQHKNMKSMNFDNPVYLKTTEEDLSIDIGRHSASVGHTYPAISVVSTDDDLA

SEQ ID NO: 137951 - DNA, 2622 bp, Artificial Sequence
  derived and/or modified sequence
atgggcaccagcgccctgtgggccctgtggctgctgctggccctgtgctgggcccccagagagagcggcgccaccggcaccggcagaaaggccaagtgcgagcccagccagttccagtgcaccaacggcagatgcatcaccctgctgtggaagtgcgacggcgacgaggactgcgtggacggcagcgacgagaagaactgcgtgaagaagacctgcgccgagagcgacttcgtgtgcaacaacggccagtgcgtgcccagcagatggaagtgcgacggcgaccccgactgcgaggacggcagcgacgagagccccgagcagtgccacatgagaacctgcagaatccacgagatcagctgcggcgcccacagcacccagtgcatccccgtgagctggagatgcgacggcgagaacgactgcgacagcggcgaggacgaggagaactgcggcaacatcacctgcagccccgacgagttcacctgcagcagcggcagatgcatcagcagaaacttcgtgtgcaacggccaggacgactgcagcgacggcagcgacgagctggactgcgccccccccacctgcggcgcccacgagttccagtgcagcaccagcagctgcatccccatcagctgggtgtgcgacgacgacgccgactgcagcgaccagagcgacgagagcctggagcagtgcggcagacagcccgtgatccacaccaagtgccccgccagcgagatccagtgcggcagcggcgagtgcatccacaagaagtggagatgcgacggcgaccccgactgcaaggacggcagcgacgaggtgaactgccccagcagaacctgcagacccgaccagttcgagtgcgaggacggcagctgcatccacggcagcagacagtgcaacggcatcagagactgcgtggacggcagcgacgaggtgaactgcaagaacgtgaaccagtgcctgggccccggcaagttcaagtgcagaagcggcgagtgcatcgacatcagcaaggtgtgcaaccaggagcaggactgcagagactggagcgacgagcccctgaaggagtgccacatcaacgagtgcctggtgaacaacggcggctgcagccacatctgcaaggacctggtgatcggctacgagtgcgactgcgccgccggcttcgagctgatcgacagaaagacctgcggcgacatcgacgagtgccagaaccccggcatctgcagccagatctgcatcaacctgaagggcggctacaagtgcgagtgcagcagaggctaccagatggacctggccaccggcgtgtgcaaggccgtgggcaaggagcccagcctgatcttcaccaacagaagagacatcagaaagatcggcctggagagaaaggagtacatccagctggtggagcagctgagaaacaccgtggccctggacgccgacatcgccgcccagaagctgttctgggccgacctgagccagaaggccatcttcagcgccagcatcgacgacaaggtgggcagacacgtgaagatgatcgacaacgtgtacaaccccgccgccatcgccgtggactgggtgtacaagaccatctactggaccgacgccgccagcaagaccatcagcgtggccaccctggacggcaccaagagaaagttcctgttcaacagcgacctgagagagcccgccagcatcgccgtggaccccctgagcggcttcgtgtactggagcgactggggcgagcccgccaagatcgagaaggccggcatgaacggcttcgacagaagacccctggtgaccgccgacatccagtggcccaacggcatcaccctggacctgatcaagagcagactgtactggctggacagcaagctgcacatgctgagcagcgtggacctgaacggccaggacagaagaatcgtgctgaagagcctggagttcctggcccaccccctggccctgaccatcttcgaggacagagtgtactggatcgacggcgagaacgaggccgtgtacggcgccaacaagttcaccggcagcgagctggccaccctggtgaacaacctgaacgacgcccaggacatcatcgtgtaccacgagctggtgcagcccagcggcaagaactggtgcgaggaggacatggagaacggcggctgcgagtacctgtgcctgcccgccccccagatcaacgaccacagccccaagtacacctgcagctgccccagcggctacaacgtggaggagaacggcagagactgccagagcaccgccaccaccgtgacctacagcgagaccaaggacaccaacaccaccgagatcagcgccaccagcggcctggtgcccggcggcatcaacgtgaccaccgccgtgagcgaggtgagcgtgccccccaagggcaccagcgccgcctgggccatcctgcccctgctgctgctggtgatggccgccgtgggcggctacctgatgtggagaaactggcagcacaagaacatgaagagcatgaacttcgacaaccccgtgtacctgaagaccaccgaggaggacctgagcatcgacatcggcagacacagcgccagcgtgggccacacctaccccgccatcagcgtggtgagcaccgacgacgacctggcctag

SEQ ID NO: 137952 - DNA, 2622 bp, Artificial Sequence
  derived and/or modified sequence
atggggaccagtgccttgtgggccttatggctgctccttgctctgtgttgggcaccacgcgagagcggcgcaaccgggacagggagaaaggccaagtgcgagccatcacaattccagtgcacaaacggccgttgtattactttgctatggaaatgcgacggcgacgaggattgtgtggacggctctgacgaaaagaattgtgtgaaaaaaacctgtgctgagtcagacttcgtgtgcaacaacggacagtgtgtccctagccgctggaagtgcgatggcgacccagattgcgaggacggctctgacgaatctcccgagcaatgccatatgaggacgtgccgaatccacgagatctcctgtggagctcacagtacccaatgtatccctgtgtcatggcgatgtgacggagagaatgactgcgatagcggcgaagatgaggagaattgcggaaatataacttgttcccccgacgagttcacgtgtagttctgggcgctgcatttcacggaactttgtgtgtaacggccaagacgactgtagcgatggctccgacgaactggattgcgcgccccccacttgtggagcacacgaattccagtgtagcacctcctcatgcatacctatctcatgggtgtgtgacgatgatgccgattgcagcgatcaatcagatgaaagtctcgaacagtgcgggcgccagcctgtgattcacactaagtgccctgcaagcgagattcagtgcgggtccggtgagtgcatccacaaaaaatggcggtgtgatggggaccctgactgcaaggacgggtccgacgaggtgaactgccctagtagaacatgtagaccggatcagtttgaatgtgaggatgggtcctgtattcacgggagtagacagtgtaatggcatccgggactgtgtggacggatctgatgaagtcaactgtaaaaacgttaatcagtgcctagggccgggcaagtttaagtgcaggagcggtgagtgcatcgatatttctaaggtgtgcaaccaggagcaagattgccgcgattggtccgatgagccacttaaagagtgccacatcaacgaatgcctcgtgaataatgggggatgcagtcatatttgcaaagacctggtgattggttacgaatgtgactgtgccgccgggttcgaattaattgatcggaagacatgcggagatatcgacgaatgccaaaatcccgggatatgcagccagatttgtattaatctcaagggggggtataagtgtgagtgctctagagggtatcagatggatctggccaccggcgtttgtaaggccgtcggtaaagagccatctctcatcttcacaaatcgacgggatattagaaaaatcggtctggagcgcaaagaatacatccagctggtggagcaacttcgtaatactgtggcccttgacgccgatatcgcagcccagaaactattctgggcggaccttagtcaaaaggccattttctcagcctcgatcgacgataaggtgggcagacacgttaaaatgatcgataatgtctacaaccccgccgcaatagctgtggactgggtctacaagacgatctactggaccgatgcggcttcaaagactatttctgttgccaccctggatggtaccaagcgcaagttcctgtttaattccgatctgcgggaaccagcctccatcgccgtggaccctctgagcggatttgtctattggtccgattggggagagccagccaagatcgagaaggcaggcatgaatggcttcgataggagacccctggtgaccgcagacattcagtggcctaacgggattactctcgatctgattaaatctcggctgtactggctggattcaaagctgcacatgttgagctccgtggatttgaacgggcaggatcggagaatcgtgctgaagtccctggaatttttggcccaccccctcgccctgacaattttcgaggatcgtgtgtactggatagatggcgaaaatgaagctgtgtatggtgccaacaagtttaccggcagcgaacttgccacactggttaacaatctaaatgacgcacaggacatcattgtgtaccatgaactggtccagccctctggcaagaactggtgcgaggaagatatggagaacggggggtgcgaatatctgtgcctccccgctccgcaaataaatgaccacagccctaagtatacttgcagctgcccctccgggtataacgtggaggaaaacgggagggattgccagagcactgcaactaccgtaacatattccgaaactaaagacaccaataccacagaaatatccgccacatcaggcctcgttcccggagggatcaacgtcaccacagcggtgtccgaagtcagcgtgcctcccaaaggaacaagtgctgcctgggctatcctgcctctgctgctcttggtcatggccgcagtgggagggtatctgatgtggcgcaactggcaacataaaaacatgaaatctatgaatttcgataaccccgtgtacctcaagacgaccgaggaagatctgtccatcgacatcggccggcactctgccagtgtgggccatacctaccctgccatttcggtcgtgagtacagatgatgatctggcatag

SEQ ID NO: 137953 - DNA, 2622 bp, Artificial Sequence
  derived and/or modified sequence
atgggcaccagcgccctgtgggccctgtggctgctgctggccctgtgctgggccccccgggagagcggggccactggaactggaaggaaggccaagtgtgagcccagccagttccagtgcaccaacggccgctgcatcaccctgctgtggaagtgtgatggagatgaggactgtgtggatggcagtgatgagaagaactgtgtgaagaagacctgtgccgagagtgactttgtgtgcaacaacggccagtgtgtgcccagccgctggaagtgtgatggagaccctgactgtgaagatggcagtgatgagagccctgagcagtgccacatgaggacctgccgcatccacgagatcagctgtggggcccacagcacccagtgcatccctgtgtcctggaggtgtgatggagaaaatgactgtgacagcggggaggatgaggagaactgtggcaacatcacctgcagcccagatgagttcacctgcagcagcggccgctgcatcagcaggaactttgtgtgcaatggccaggatgactgcagtgatggcagtgatgagctggactgtgccccacccacctgtggggcccacgagttccagtgcagcaccagcagctgcatccccatctcctgggtgtgtgatgatgatgctgactgcagcgaccagagtgatgagagcctggagcagtgtggccggcagcctgtgatccacaccaagtgcccagccagcgagatccagtgtggcagcggggagtgcatccacaagaagtggaggtgtgatggagaccctgactgcaaggatggcagtgatgaggtgaactgccccagcaggacctgcaggccagaccagtttgaatgtgaagatggcagctgcatccacggcagccggcagtgcaatggcatccgggactgtgtggatggcagtgatgaggtgaactgcaagaatgtgaaccagtgcctgggccctgggaagttcaagtgccgcagcggggagtgcatcgacatcagcaaggtgtgcaaccaggagcaggactgccgggactggagcgatgagcccctgaaggagtgccacatcaatgaatgtctggtgaacaacggcggctgcagccacatctgcaaggacctggtgattggctatgaatgtgactgtgccgccggctttgagctgattgacaggaagacctgtggggacattgatgagtgccagaaccctggcatctgcagccagatctgcatcaacctgaagggcggctacaagtgtgagtgcagccggggctaccagatggacctggccactggagtgtgcaaggctgtgggcaaggagcccagcctcatcttcaccaacagaagagacatcaggaagattggcctggagaggaaggagtacatccagctggtggagcagctgaggaacacagtggccctggatgctgacattgctgcccagaagctgttctgggccgacctgagccagaaggccatcttcagcgccagcattgatgacaaggtgggcagacatgtgaagatgattgacaacgtgtacaacccagctgccatcgctgtggactgggtgtacaagaccatctactggacagatgctgccagcaagaccatctctgtggccaccctggatggcaccaagaggaagttcctgttcaacagcgacctgcgggagcccgccagcattgctgtggaccccctgagcggctttgtgtactggagcgactggggcgagcccgccaagattgagaaggccggcatgaatggatttgacagaagacccctggtgacagctgacatccagtggcccaacggcatcaccctggacctgatcaagagccggctgtactggctggacagcaagctgcacatgctgagctctgtggacctgaatggccaggaccggcgcatcgtgctgaagagcctggagttcctggcccaccccctggccctgaccatctttgaggacagagtgtactggattgatggagaaaatgaggccgtgtatggagccaacaagttcaccggcagcgagctggccaccctggtgaacaacctgaatgatgcccaggacatcatcgtgtaccacgagctggtgcagcccagcggcaagaactggtgtgaggaggacatggagaatggaggctgtgagtacctgtgcctgcctgccccccagatcaatgaccacagccccaagtacacctgcagctgccccagcggctacaacgtggaggagaatggccgggactgccagagcacagccaccaccgtgacctacagcgagaccaaggacaccaacaccacagagatcagcgccaccagcggcctggtgcctgggggcatcaacgtgaccacagctgtgtctgaggtgtctgtgccccccaagggcaccagcgctgcctgggccatcctgcccctgctgctgctggtgatggctgctgtgggcggctacctgatgtggaggaactggcagcacaagaacatgaagtccatgaactttgacaaccctgtgtacctgaagaccacagaggaggacctgagcattgatattggccgccacagcgcctctgtgggccacacctacccagccatctctgtggtgtccacagatgatgacctggcctag

SEQ ID NO: 137954 - DNA, 2622 bp, Artificial Sequence
  derived and/or modified sequence
atgggcaccagcgccctgtgggccctgtggctgctgctggccctgtgctgggcccctcgggaaagcggagcgaccggtaccggaagaaaggcaaagtgcgaaccctctcagttccagtgcaccaatgggcgatgcataactttgctgtggaagtgcgacggagatgaggattgtgtggatggcagcgacgagaagaattgcgtcaaaaaaacatgtgccgaatccgatttcgtttgcaacaacggccagtgcgtaccctctagatggaaatgcgatggtgatccggattgcgaggacggaagcgacgagtcgcccgagcaatgccacatgcggacttgcagaattcacgagatctcctgcggagcccactccactcagtgcattcccgtgagttggcgatgtgatggagagaacgattgcgacagtggagaggacgaagaaaactgtgggaatatcacctgctctcctgacgaatttacatgctcatccggacgatgtatcagcagaaattttgtctgcaatggccaggacgattgctctgacggctcagacgaattagactgtgctccccctacttgcggagcccacgaatttcagtgttccacctccagctgcatccccattagttgggtttgcgatgatgatgctgactgctctgaccaaagtgacgaatcattagaacagtgtggcaggcaacccgtgatacacactaagtgcccagcatctgagatccagtgtggctccggggaatgcatacacaagaaatggaggtgcgacggggacccggattgtaaggacgggtctgatgaagtgaattgtccatcacggacttgtagacctgaccaatttgagtgtgaagacgggagctgcatacatgggtctcgacaatgtaacgggatcagggactgcgtggacggatcagacgaagtcaactgtaaaaacgtgaaccagtgcctgggtcccggcaaattcaagtgcaggtctggagagtgcattgacatttccaaggtgtgcaaccaggagcaggattgcagagattggtccgacgagccccttaaggagtgtcacataaacgagtgtttggtcaacaatggcggctgcagtcacatttgcaaagatttagttattgggtacgaatgtgattgcgctgctggcttcgagttaatcgacaggaaaacgtgcggggatatcgacgaatgtcagaatcccgggatctgcagtcagatttgcattaatctgaaaggtggttataagtgcgaatgcagtagagggtaccagatggaccttgccacaggtgtgtgcaaggccgttggaaaggagccttcattaatattcacaaaccgccgcgatatccggaaaatcgggttggagcggaaagaatatattcagctggttgaacagctcagaaacactgtggcgcttgacgccgacatcgcagcccagaagctcttttgggcggatctaagccagaaagcaatattcagtgcttctattgacgataaggtcggccgccatgtgaaaatgattgacaacgtgtacaacccagccgccatagctgtagactgggtctataagaccatctattggactgacgcagctagtaaaactatcagtgtcgcaactctggacgggaccaagagaaagttcctatttaactcagatcttcgggagccagccagcattgcagtcgatcctctgagcggcttcgtgtactggtcggattggggcgagcccgccaagatcgagaaggcggggatgaatggattcgaccgacggcccctggtgactgccgatatccaatggccaaacggaattacattggacctcatcaagtcccgcctgtattggctggacagtaagctccatatgctgagttccgtggacctgaatggccaggaccggagaatcgtcctcaagagtctcgaattcttggctcacccccttgcattaacgattttcgaagatagagtgtattggatcgacggcgaaaatgaagctgtctacggggcaaacaagtttacaggcagcgagctggctactctggtgaacaatctcaatgacgcccaggacattatcgtgtaccatgagctggttcagccatccggtaagaattggtgcgaagaggacatggaaaacggtgggtgcgagtacctgtgcctgccagcacctcagattaacgatcatagccccaagtacacgtgttcttgcccttccggatacaatgtagaggagaatggccgcgattgccagtctactgcgacaacagtgacttattcagaaactaaggataccaataccaccgagatttccgccacaagcggcctcgtccccgggggcataaatgtgacaacagccgtaagtgaggtctcggtgccccctaaaggaacttccgccgcctgggcgatcctccccctgttgttactggtcatggccgcggtgggaggttatctgatgtggaggaattggcagcacaagaacatgaagagcatgaacttcgacaatcccgtctacctaaagaccacagaggaagatctttccattgatattggacgtcatagcgccagtgtgggccatacctatccagccatcagcgtcgtgagtacagacgacgacctggcctag

SEQ ID NO: 137955 - DNA, 2622 bp, Artificial Sequence
  derived and/or modified sequence
atgggtacctccgctctatgggccctgtggcttctgctggctctctgctgggcacctagggagagcggggcaacaggaacgggacgtaaagcaaaatgtgaaccaagccaatttcaatgtactaatggacgttgtataactttactgtggaaatgcgatggggacgaggattgtgtcgatggttcggacgaaaaaaattgtgtgaaaaagacttgtgccgaatctgatttcgtctgtaataacggacagtgtgttcccagccggtggaagtgcgatggtgaccctgattgcgaagacggttcagatgaatcgcccgaacagtgccacatgcgtacttgccgaatacacgaaatttcatgtggggcacactctacgcagtgcataccagtcagttggagatgcgacggagaaaacgattgcgactccggagaagatgaggagaattgtggcaatattacatgtagcccagatgaattcacttgctcgagcggcaggtgtatatcccgcaactttgtgtgtaatgggcaggacgactgctctgacggaagcgatgagctggactgtgcccctccgacctgtggtgcacacgagttccaatgcagcacatccagctgcataccaattagttgggtgtgtgatgatgatgcagactgttccgaccagtccgatgagtctctggaacagtgtggccgtcagccagtcattcacaccaagtgtcctgcctctgagatacagtgcggtagcggcgagtgtatccataagaagtggcgatgtgatggcgacccagattgcaaggatggctcggacgaagttaactgcccttcccgcacttgccggccagaccagtttgagtgtgaggatgggtcatgcatccacgggtccagacaatgcaacggcatacgcgattgcgtggacggcagcgatgaggttaattgcaaaaatgtcaaccagtgcttgggccctgggaaatttaagtgcaggtcgggcgagtgcatcgacatatcaaaagtgtgtaatcaggagcaggattgtagagattggtcagacgagccgctcaaagagtgccacatcaacgagtgcctggtgaacaacgggggttgtagccatatttgcaaggacctggtcatcgggtatgagtgtgattgcgcagctggctttgaactcatcgaccggaagacctgtggcgatattgacgagtgccagaatccagggatttgtagccagatttgtatcaatctcaaaggtggctacaagtgtgagtgcagcagaggataccagatggatctcgcgactggcgtgtgcaaggccgtgggaaaggaaccctctctgatcttcaccaacaggcgggacattagaaagatcggccttgaacggaaagagtacatccagttggtcgaacaactgaggaataccgtggctctggatgcagatatcgccgctcaaaaacttttttgggcggacctcagccagaaagcaatttttagcgccagcattgatgataaagtgggcagacatgttaagatgattgataacgtatacaatccagctgccattgcggtcgattgggtttataaaactatttattggaccgacgccgctagcaaaaccataagcgtggccaccctggatgggactaagagaaagtttctattcaatagtgatttgcgtgagcccgcatccatcgccgtggaccctctgagtgggtttgtatattggtctgattggggggagcctgccaaaattgaaaaggcagggatgaatggattcgaccgcagacctttggtgacagcagatatccagtggccgaacggcatcaccctggatctgatcaaatcccggctgtactggctggacagtaagctgcacatgctttcgagcgtcgacctgaatggtcaggatagacgtatcgttttgaaatcactcgaattcctagctcaccctctagccttgacaatcttcgaggatcgagtgtattggattgacggagaaaacgaggccgtgtacggcgcaaataaatttaccgggagtgagcttgcgactctggtcaacaacctaaatgatgcccaggatattatcgtctatcacgagttggtgcagcccagtggaaaaaattggtgtgaggaggatatggagaacggaggctgtgagtacctgtgcctgccagcgcctcaaattaacgaccactctccgaagtatacttgctcttgcccctccgggtacaacgtggaagaaaatggaagggattgccagagtaccgctacaactgtgacttactccgaaaccaaggatacgaataccaccgagatatcagcgaccagcgggctggtccccggtggcatcaacgtgaccaccgcggtcagcgaggtgagtgttcccccaaaggggacatcagctgcctgggctatcttgccactcctgctccttgtcatggcagcagtaggcggttatttgatgtggaggaactggcaacacaagaacatgaagagcatgaatttcgataacccagtatacttaaaaacaacagaggaagacctgagtatcgatattggaaggcactcagcgtcagtggggcacacatacccagcaatcagtgtggtgagtacggatgatgatttggcctag

SEQ ID NO: 137956 - DNA, 3590 bp, Artificial Sequence
  derived and/or modified sequence
ctctccgttctgtgctctcttctgctctcggctccccaccccctctcccttccctcctctccccttgcctcccctcctctgcagcgcctgcattattttctgcccgcaggctcggcttgcactgctgctgcagcccggggaggtggctgggtgggtggggaggagactgtgcaagttgtaggggagggggtgccctcttcttccccgctcccttcccccgccaactccttcccctccttctccccctttcccctccccgcccccaccttcttcctcctttcggaaggactggtaacttgtcgtgcggagcgaacggcggcggcggcggcggcggcggcaccatccaggcgggcaccatgggcacgtccgcgctctgggcgctctggctgctgctcgcgctgtgctgggcgccccgggagagcggcgccaccggaaccgggagaaaagccaaatgtgaaccctcccaattccagtgcacaaatggtcgctgtattacgctgttgtggaaatgtgatggggatgaagactgtgttgacggcagtgatgaaaagaactgtgtaaagaagacgtgtgctgaatctgacttcgtgtgcaacaatggccagtgtgttcccagccgatggaagtgtgatggagatcctgactgcgaagatggttcagatgaaagcccagaacagtgccatatgagaacatgccgcatacatgaaatcagctgtggcgcccattctactcagtgtatcccagtgtcctggagatgtgatggtgaaaatgattgtgacagtggagaagatgaagaaaactgtggcaatataacatgtagtcccgacgagttcacctgctccagtggccgctgcatctccaggaactttgtatgcaatggccaggatgactgcagcgatggcagtgatgagctggactgtgccccgccaacctgtggcgcccatgagttccagtgcagcacctcctcctgcatccccatcagctgggtatgcgacgatgatgcagactgctccgaccaatctgatgagtccctggagcagtgtggccgtcagccagtcatacacaccaagtgtccagccagcgaaatccagtgcggctctggcgagtgcatccataagaagtggcgatgtgatggggaccctgactgcaaggatggcagtgatgaggtcaactgtccctctcgaacttgccgacctgaccaatttgaatgtgaggatggcagctgcatccatggcagcaggcagtgtaatggtatccgagactgtgtcgatggttccgatgaagtcaactgcaaaaatgtcaatcagtgcttgggccctggaaaattcaagtgcagaagtggagaatgcatagatatcagcaaagtatgtaaccaggagcaggactgcagggactggagtgatgagcccctgaaagagtgtcatataaacgaatgcttggtaaataatggtggatgttctcatatctgcaaagacctagttataggctacgagtgtgactgtgcagctgggtttgaactgatagataggaaaacctgtggagatattgatgaatgccaaaatccaggaatctgcagtcaaatttgtatcaacttaaaaggcggttacaagtgtgaatgtagtcgtggctatcaaatggatcttgctactggcgtgtgcaaggcagtaggcaaagagccaagtctgatcttcactaatcgaagagacatcaggaagattggcttagagaggaaagaatatatccaactagttgaacagctaagaaacactgtggctctcgatgctgacattgctgcccagaaactattctgggccgatctaagccaaaaggctatcttcagtgcctcaattgatgacaaggttggtagacatgttaaaatgatcgacaatgtctataatcctgcagccattgctgttgattgggtgtacaagaccatctactggactgatgcggcttctaagactatttcagtagctaccctagatggaaccaagaggaagttcctgtttaactctgacttgcgagagcctgcctccatagctgtggacccactgtctggctttgtttactggtcagactggggtgaaccagctaaaatagaaaaagcaggaatgaatggattcgatagacgtccactggtgacagcggatatccagtggcctaacggaattacacttgaccttataaaaagtcgcctctattggcttgattctaagttgcacatgttatccagcgtggacttgaatggccaagatcgtaggatagtactaaagtctctggagttcctagctcatcctcttgcactaacaatatttgaggatcgtgtctactggatagatggggaaaatgaagcagtctatggtgccaataaattcactggatcagagctagccactctagtcaacaacctgaatgatgcccaagacatcattgtctatcatgaacttgtacagccatcaggtaaaaattggtgtgaagaagacatggagaatggaggatgtgaatacctatgcctgccagcaccacagattaatgatcactctccaaaatatacctgttcctgtcccagtgggtacaatgtagaggaaaatggccgagactgtcaaagtactgcaactactgtgacttacagtgagacaaaagatacgaacacaacagaaatttcagcaactagtggactagttcctggagggatcaatgtgaccacagcagtatcagaggtcagtgttcccccaaaagggacttctgccgcatgggccattcttcctctcttgctcttagtgatggcagcagtaggtggctacttgatgtggcggaattggcaacacaagaacatgaaaagcatgaactttgacaatcctgtgtacttgaaaaccactgaagaggacctctccatagacattggtagacacagtgcttctgttggacacacgtacccagcaatatcagttgtaagcacagatgatgatctagcttgacttctgtgacaaatgttgacctttgaggtctaaacaaataatacccccgtcggaatggtaaccgagccagcagctgaagtctctttttcttcctctcggctggaagaacatcaagatacctttgcgtggatcaagcttgtgtacttgaccgtttttatattacttttgtaaatattcttgtccacattctacttcagctttggatgtggttaccgagtatctgtaacccttgaatttctagacagtattgccacctctggccaaatatgcactttccctagaaagccatattccagcagtgaaacttgtgctatagtgtataccacctgtacatacattgtataggccatctgtaaatatcccagagaacaatcactattcttaagcactttgaaaatatttctatgtaaattattgtaaactttttcaatggttgggacaatggcaataggacaaaacgggttactaagatgaaattgccaaaaaaatttataaactaattttgtacgtatgaatgatatctttgacctcaatggaggtttgcaaagactgagtgttcaaactactgtacattttttttcaagtgctaaaaaattaaaccaagcagcttaa

SEQ ID NO: 137957 - protein, 396 aa, Artificial Sequence
  derived and/or modified sequence
MPRVKAAQAGRQSSAKRHLAEQFAVGEIITDMAKKEWKVGLPIGQGGFGCIYLADMNSSESVGSDAPCVVKVEPSDNGPLFTELKFYQRAAKPEQIQKWIRTRKLKYLGVPKYWGSGLHDKNGKSYRFMIMDRFGSDLQKIYEANAKRFSRKTVLQLSLRILDILEYIHEHEYVHGDIKASNLLLNYKNPDQVYLVDYGLAYRYCPEGVHKEYKEDPKRCHDGTIEFTSIDAHNGVAPSRRGDLEILGYCMIQWLTGHLPWEDNLKDPKYVRDSKIRYRENIASLMDKCFPEKNKPGEIAKYMETVKLLDYTEKPLYENLRDILLQGLKAIGSKDDGKLDLSVVENGGLKAKTITKKRKKEIEESKEPGVEDTEWSNTQTEEAIQTRSRTRKRVQK

SEQ ID NO: 137958 - DNA, 1191 bp, Artificial Sequence
  derived and/or modified sequence
atgcctagagtcaaggctgcccaagcaggccggcagagctcggctaagaggcacttggccgaacaattcgcagtgggcgagatcatcacagatatggctaaaaaggagtggaaggtaggtctcccaatagggcagggcggatttggctgcatttacctagcagacatgaactcaagtgagtcagtgggttcagatgctccttgtgtggtcaaagtggaaccctcagacaacggccctttgttcaccgaactcaagttctaccaacgagccgcaaagccagaacagattcagaaatggataagaactcgcaaactgaaatatttgggggtaccgaaatactggggaagtggattgcacgacaaaaacgggaaatcgtatcgctttatgatcatggaccggttcgggtctgacttgcaaaagatctatgaagcgaatgctaaaaggttttctaggaagacagtgctgcaactgtctctgaggatactggatatacttgaatacattcacgagcatgaatacgttcacggcgacatcaaggcaagcaaccttttgctgaattacaagaacccagatcaggtttacctggtggactatggtctggcatatcgctactgccccgagggcgttcacaaggagtacaaggaggaccccaagcgatgccatgatggcactatagaatttacttctatcgatgcccataacggcgtggctcccagccgtcggggcgatctagaaatcctgggatattgcatgattcagtggctaacagggcatctgccttgggaggacaacctgaaggaccccaagtacgtcagggacagcaaaatccgataccgagagaacatcgccagtctgatggacaagtgttttcccgagaagaacaaacccggtgagatcgccaagtacatggagaccgtgaagctgttggattataccgaaaagccactgtatgagaacctcagggatatcttgctccagggattaaaggctattggatccaaggatgacggaaagcttgacctctccgtggtggagaatggaggattaaaagccaaaaccatcactaagaagcggaagaaggaaatcgaagaatctaaagaacctggagtcgaagacacagaatggtctaacactcagaccgaggaggccattcagacccgctcacgaacgagaaaaagagtgcagaaatag

SEQ ID NO: 137959 - DNA, 1191 bp, Artificial Sequence
  derived and/or modified sequence
atgccccgggtgaaggccgcccaggccggccggcagagcagcgccaagaggcacctggccgagcagtttgctgtgggggagatcatcacagacatggccaagaaggagtggaaggtgggcctgcccatcggccagggcggcttcggctgcatctacctggccgacatgaacagcagcgagagcgtgggcagtgatgccccctgtgtggtgaaggtggagcccagcgacaatggccccctcttcacagagctgaagttctaccagagagctgccaagccagagcagatccagaagtggatccgcaccaggaagctgaagtacctgggcgtgcccaagtactggggcagcggcctgcatgacaagaatggcaagagctaccgcttcatgatcatggaccgcttcggcagtgacctgcagaagatctatgaggccaatgccaagcgcttcagcaggaagacagtgctgcagctgagcctgcgcatcctggacatcctggagtacatccatgaacatgaatatgtgcatggagacatcaaggccagcaacctgctgctgaactacaagaacccagaccaggtgtacctggtggactatggcctggcctaccgctactgcccagagggcgtgcacaaggagtacaaggaggaccccaagcgctgccatgatggcaccatcgagttcaccagcattgatgcccacaacggggtggcccccagccggcggggggacctggagatcctgggctactgcatgatccagtggctgaccggccacctgccctgggaggacaacctgaaggaccccaagtatgtgcgggacagcaagatccgctaccgggagaacatcgccagcctgatggacaagtgcttccctgagaagaacaagccaggagaaattgccaagtacatggagaccgtgaagctgctggactacacagagaagcccctgtatgagaacctgcgggacatcctgctgcagggcctgaaggccatcggcagcaaggatgatggcaagctggacctgtctgtggtggagaatggaggcctgaaggccaagaccatcaccaagaagaggaagaaggagattgaggagagcaaggagcccggggtggaggacacagagtggagcaacacccagacagaggaggccatccagaccaggagcaggaccaggaagagggtgcagaagtag

SEQ ID NO: 137960 - DNA, 1191 bp, Artificial Sequence
  derived and/or modified sequence
atgccccgggtgaaggccgcccaggccggccggcagagcagcgccaaacgacatttggcggagcaatttgctgtgggggaaattatcaccgacatggcaaagaaagaatggaaggttggactgcccatcgggcagggggggttcgggtgtatttacctggccgacatgaattcctcagagtccgtcggttccgacgccccttgcgtggtgaaggtcgagcccagcgacaatggaccactgtttacagaacttaagttctaccagcgcgcagcaaagcctgagcagatccagaagtggattagaacaaggaaactgaagtacctgggcgtgccaaagtattgggggtcaggcctgcatgacaaaaacggtaaatcctaccggtttatgatcatggatcgcttcgggtcggatctgcagaaaatttacgaagcaaacgcgaagcgctttagccgaaagaccgtgctgcaactgagtctgaggattttagatatcctcgaatacattcatgagcacgagtacgtacacggcgacatcaaagccagcaacctgctcttgaactacaagaaccctgaccaagtatacctcgtggactacgggcttgcttacagatactgtccagagggcgtgcataaagagtacaaagaagacccaaagcgttgccacgacgggaccatcgaattcacatccatcgacgctcacaacggagtggccccttcgcggcgtggcgacttagagattctggggtattgcatgatccagtggctgaccggtcacttgccttgggaggacaaccttaaagacccgaaatacgtgcgggacagtaagatccggtaccgggaaaacattgccagccttatggacaagtgcttcccagagaagaacaaacctggcgaaatcgcaaaatacatggaaacagtgaagctgctggactataccgagaaacctctctatgagaaccttcgcgacatactgctgcaaggcttaaaggcaataggcagcaaggatgatggcaaactagacttgtccgtggtagaaaatggaggcctcaaagccaagactattacaaagaaaagaaagaaagaaatcgaagagtcaaaggagcctggggtagaggacacagagtggtcaaacacgcagaccgaagaggcaatccaaacccgcagccgaaccagaaaacgggtgcagaagtag

SEQ ID NO: 137961 - DNA, 1191 bp, Artificial Sequence
  derived and/or modified sequence
atgcctcgggtcaaggctgcacaagcaggccgtcagtcaagtgctaagcggcacttagccgagcagttcgccgtgggtgagattataaccgacatggcaaagaaggaatggaaggtcgggctgccaatcggacaagggggattcgggtgtatatatcttgccgacatgaactcgtcagaatctgtcggaagtgatgccccatgcgtcgtgaaagtggaaccctcggacaatggccctctctttacagagctcaagttctaccagcgggctgccaagccggaacagatacagaaatggatacggacccgtaaactgaagtacctcggagtccctaagtactggggcagcggcttacacgataaaaacggtaaatcctaccgatttatgataatggacaggttcggcagtgacttgcagaagatttacgaggctaatgctaagagatttagtagaaaaacggtactgcagttatctctgaggatcctcgacatactggaatacatacatgaacacgagtacgtccacggtgatataaaggcatccaatctactcctgaactacaagaatcccgaccaagtgtacctcgtggattacgggctcgcgtaccgttactgcccagagggtgtgcacaaagaatacaaggaagaccccaagcgttgccatgacggcaccatcgagttcactagtattgacgctcacaacggagtggctccaagccggaggggcgatttggagatcctcgggtattgtatgatccagtggctaacggggcatctgccatgggaggacaatctgaaagacccaaaatacgttcgtgactctaaaattaggtacagggagaacatcgcctctcttatggataagtgtttcccggagaaaaacaagcctggggaaatcgcgaagtatatggagaccgttaaactcctggattataccgaaaagcccctctacgagaatctgagggacatcctgctgcagggactgaaggctattgggtctaaagacgatggcaaactggacttatcggtggtggagaacggaggactaaaagctaagaccataacgaaaaagcgcaaaaaggaaatagaagagtctaaggagcctggcgttgaagacaccgagtggtctaatacacaaaccgaagaggcgatccaaactcggtcccggacccggaaacgggttcagaagtag

SEQ ID NO: 137962 - DNA, 1191 bp, Artificial Sequence
  derived and/or modified sequence
atgcccagagtgaaggccgcccaggccggcagacagagcagcgccaagagacacctggccgagcagttcgccgtgggcgagatcatcaccgacatggccaagaaggagtggaaggtgggcctgcccatcggccagggcggcttcggctgcatctacctggccgacatgaacagcagcgagagcgtgggcagcgacgccccctgcgtggtgaaggtggagcccagcgacaacggccccctgttcaccgagctgaagttctaccagagagccgccaagcccgagcagatccagaagtggatcagaaccagaaagctgaagtacctgggcgtgcccaagtactggggcagcggcctgcacgacaagaacggcaagagctacagattcatgatcatggacagattcggcagcgacctgcagaagatctacgaggccaacgccaagagattcagcagaaagaccgtgctgcagctgagcctgagaatcctggacatcctggagtacatccacgagcacgagtacgtgcacggcgacatcaaggccagcaacctgctgctgaactacaagaaccccgaccaggtgtacctggtggactacggcctggcctacagatactgccccgagggcgtgcacaaggagtacaaggaggaccccaagagatgccacgacggcaccatcgagttcaccagcatcgacgcccacaacggcgtggcccccagcagaagaggcgacctggagatcctgggctactgcatgatccagtggctgaccggccacctgccctgggaggacaacctgaaggaccccaagtacgtgagagacagcaagatcagatacagagagaacatcgccagcctgatggacaagtgcttccccgagaagaacaagcccggcgagatcgccaagtacatggagaccgtgaagctgctggactacaccgagaagcccctgtacgagaacctgagagacatcctgctgcagggcctgaaggccatcggcagcaaggacgacggcaagctggacctgagcgtggtggagaacggcggcctgaaggccaagaccatcaccaagaagagaaagaaggagatcgaggagagcaaggagcccggcgtggaggacaccgagtggagcaacacccagaccgaggaggccatccagaccagaagcagaaccagaaagagagtgcagaagtag

SEQ ID NO: 137963 - DNA, 1745 bp, Artificial Sequence
  derived and/or modified sequence
cccgcccctcctcgtcgcctccgagccaatgggaaggctccatactgcagggtgcgaaggggccggcgccgctgccgagttacgagtcggcgaaagcggcgggaagttcgtactgggcagaacgcgacgggtctgcggcttaggtgaaaatgcctcgtgtaaaagcagctcaagctggaagacagagctctgcaaagagacatcttgcagaacaatttgcagttggagagataataactgacatggcaaaaaaggaatggaaagtaggattacccattggccaaggaggctttggctgtatatatcttgctgatatgaattcttcagagtcagttggcagtgatgcaccttgtgttgtaaaagtggaacccagtgacaatggacctctttttactgaattaaagttctaccaacgagctgcaaaaccagagcaaattcagaaatggattcgtacccgtaagctgaagtacctgggtgttcctaagtattgggggtctggtctacatgacaaaaatggaaaaagttacaggtttatgataatggatcgctttgggagtgaccttcagaaaatatatgaagcaaatgccaaaaggttttctcggaaaactgtcttgcagctaagcttaagaattctggatattctggaatatattcacgagcatgagtatgtgcatggagatatcaaggcctcaaatcttcttctgaactacaagaatcctgaccaggtgtacttggtagattatggccttgcttatcggtactgcccagaaggagttcataaagaatacaaagaagaccccaaaagatgtcacgatggcactattgaattcacgagcatcgatgcacacaatggcgtggccccatcaagacgtggtgatttggaaatacttggttattgcatgatccaatggcttactggccatcttccttgggaggataatttgaaagatcctaaatatgttagagattccaaaattagatacagagaaaatattgcaagtttgatggacaaatgttttcctgagaaaaacaaaccaggtgaaattgccaaatacatggaaacagtgaaattactagactacactgaaaaacctctttatgaaaatttacgtgacattcttttgcaaggactaaaagctataggaagtaaggatgatggcaaattggacctcagtgttgtggagaatggaggtttgaaagcaaaaacaataacaaagaagcgaaagaaagaaattgaagaaagcaaggaacctggtgttgaagatacggaatggtcaaacacacagacagaggaggccatacagacccgttcaagaaccagaaagagagtccagaagtaattcagatgctgtgaaccagatttccttttctttgttttcttttgacttttttctccttttctatttgaactgttttattttcctgtgagtcttgcgaggtggaagtaatgattaaatactcatgtgttcagaaaacataaactttttttataaaaatattttgtacaattcattaaaggctaatttatgaaatttgaaaatcttcaggttatactccttaagttatcccaaagccgtgtgtttgtgatgttttggagtacatatatatgaaaattattatgacacgcacttttctaatcattgtacatttctcagagtggataaaaatgtttgacaaagtcctcacttttaaggaaatgcaaagcttaaaataaaactctcttttgtttgatgcaaacacacagt

SEQ ID NO: 137964 - protein, 191 aa, Artificial Sequence
  derived and/or modified sequence
MGKQNSKLAPEVMEDLVKSTEFNEHELKQWYKGFLKDCPSGRLNLEEFQQLYVKFFPYGDASKFAQHAFRTFDKNGDGTIDFREFICALSITSRGSFEQKLNWAFNMYDLDGDGKITRVEMLEIIEAIYKMVGTVIMMKMNEDGLTPEQRVDKIFSKMDKNKDDQITLDEFKEAAKSDPSIVLLLQCDIQK

SEQ ID NO: 137965 - protein, 104 aa, Artificial Sequence
  derived and/or modified sequence
MGKQNSKLAPEVMEDLVKSTEFNEHELKQWYKGFLKDCPSGRLNLEEFQQLYVKFFPYGDASKFAQHAFRTFDKNGDGTIDFREFICALSITSRGSFEQKLNWA

SEQ ID NO: 137966 - protein, 118 aa, Artificial Sequence
  derived and/or modified sequence
MGKQNSKLAPEVMEDLVKSTEFNEHELKQWYKGFLKDCPSGRLNLEEFQQLYVKFFPYGDASKFAQHAFRTFDKNGDGTIDFREFICALSITSRGSFEQKLNWAFNMYDLDGDGKITR

SEQ ID NO: 137967 - DNA, 576 bp, Artificial Sequence
  derived and/or modified sequence
atgggcaagcagaacagcaagctggcccccgaggtgatggaggacctggtgaagagcaccgagttcaacgagcacgagctgaagcagtggtacaagggcttcctgaaggactgccccagcggcagactgaacctggaggagttccagcagctgtacgtgaagttcttcccctacggcgacgccagcaagttcgcccagcacgccttcagaaccttcgacaagaacggcgacggcaccatcgacttcagagagttcatctgcgccctgagcatcaccagcagaggcagcttcgagcagaagctgaactgggccttcaacatgtacgacctggacggcgacggcaagatcaccagagtggagatgctggagatcatcgaggccatctacaagatggtgggcaccgtgatcatgatgaagatgaacgaggacggcctgacccccgagcagagagtggacaagatcttcagcaagatggacaagaacaaggacgaccagatcaccctggacgagttcaaggaggccgccaagagcgaccccagcatcgtgctgctgctgcagtgcgacatccagaagtag

SEQ ID NO: 137968 - DNA, 315 bp, Artificial Sequence
  derived and/or modified sequence
atgggcaagcagaacagcaagctggcccccgaggtgatggaggacctggtgaagagcaccgagttcaacgagcacgagctgaagcagtggtacaagggcttcctgaaggactgccccagcggcagactgaacctggaggagttccagcagctgtacgtgaagttcttcccctacggcgacgccagcaagttcgcccagcacgccttcagaaccttcgacaagaacggcgacggcaccatcgacttcagagagttcatctgcgccctgagcatcaccagcagaggcagcttcgagcagaagctgaactgggcctag

SEQ ID NO: 137969 - DNA, 357 bp, Artificial Sequence
  derived and/or modified sequence
atgggcaagcagaacagcaagctggcccccgaggtgatggaggacctggtgaagagcaccgagttcaacgagcacgagctgaagcagtggtacaagggcttcctgaaggactgccccagcggcagactgaacctggaggagttccagcagctgtacgtgaagttcttcccctacggcgacgccagcaagttcgcccagcacgccttcagaaccttcgacaagaacggcgacggcaccatcgacttcagagagttcatctgcgccctgagcatcaccagcagaggcagcttcgagcagaagctgaactgggccttcaacatgtacgacctggacggcgacggcaagatcaccagatag

SEQ ID NO: 137970 - DNA, 576 bp, Artificial Sequence
  derived and/or modified sequence
atgggaaagcagaattccaaactggcccctgaagtgatggaagatcttgtgaagtctacagagttcaacgagcacgagcttaaacagtggtacaaaggcttcctgaaggattgccccagtgggcgcctgaacctcgaggagttccaacaactgtatgtgaagttcttcccatatggggacgcctcgaagtttgcccagcacgcatttcggactttcgataagaacggcgacggtacgattgacttcagagagttcatttgcgctctttcgataacatctcggggctctttcgagcagaagctcaactgggcattcaacatgtatgacttggatggtgacggaaagataacacgtgttgagatgttggagattatcgaggcgatttataaaatggtcggcacggttatcatgatgaaaatgaatgaggatggcctaaccccagaacagagagtggataagatcttctccaagatggataagaataaggacgatcagatcaccctcgacgaattcaaggaggcagccaagagcgatccgagcatcgtcctgctgctgcaatgcgacattcagaaatag

SEQ ID NO: 137971 - DNA, 576 bp, Artificial Sequence
  derived and/or modified sequence
atgggaaagcagaatagcaagctggcccccgaagtgatggaggatctggtaaagtctacagaattcaacgagcacgagctgaagcagtggtataagggtttcctgaaagattgcccaagcggaaggctgaatttggaagaattccagcagctgtacgtcaaattcttcccttacggcgacgcctccaagtttgcacagcatgcgttccggacttttgataagaacggcgacggcacaattgactttagggagttcatatgtgccctcagcataacctcaaggggctctttcgagcagaaattgaactgggccttcaatatgtatgaccttgatggggatggcaagatcacccgcgtcgaaatgctcgaaattatcgaggcaatatataagatggtgggcaccgtaatcatgatgaaaatgaatgaggatgggctgactcccgaacagagagtcgataaaattttttccaaaatggataagaataaagacgaccagattactctcgacgaatttaaagaagccgccaagtcagaccccagcatcgtgctgttgcttcaatgcgacatccagaagtag

SEQ ID NO: 137972 - DNA, 576 bp, Artificial Sequence
  derived and/or modified sequence
atggggaaacaaaactctaagctggcgcctgaagtaatggaagacctggttaagtccactgagttcaatgaacatgaacttaaacagtggtataaaggattcctcaaagactgtccctcaggcaggctgaatttggaagagttccagcagctctacgtcaagttttttccatatggggacgccagcaaattcgcccagcacgctttcaggacgtttgacaagaatggcgatggaactattgacttccgggagttcatctgcgcactcagtattacgtcccgtggtagctttgaacagaaactaaattgggcctttaacatgtatgacttggacggggacggcaagatcacccgcgtggaaatgttagagataattgaagcaatttacaaaatggtgggtacagtgattatgatgaaaatgaatgaggatgggttaactcccgagcagagagtcgataagattttctctaaaatggataaaaataaggatgatcaaatcacactggatgagttcaaggaagccgcgaagtccgaccccagcatcgtgctgctgctccaatgcgatatccagaaatag

SEQ ID NO: 137973 - DNA, 315 bp, Artificial Sequence
  derived and/or modified sequence
atgggaaagcagaattcaaagctggctcctgaggtgatggaggaccttgttaagagcacagaattcaacgagcacgagctcaagcagtggtacaaagggttcctcaaggactgcccctcaggaagactgaacttggaggaattccagcagctctacgtgaaatttttcccttatggcgacgcttctaagttcgcccagcacgcttttcgcacattcgataaaaacggtgacggcacaattgactttagggagttcatctgtgccttatccatcacctcccgtggaagttttgagcaaaagttgaattgggcttag

SEQ ID NO: 137974 - DNA, 357 bp, Artificial Sequence
  derived and/or modified sequence
atgggaaagcaaaattctaaactagctccagaggtcatggaggacttagtaaagtcaactgaattcaacgaacatgagttgaagcagtggtataaaggatttctgaaagattgtccgtccgggcggctaaacctcgaagagtttcagcaattgtacgttaagtttttcccatacggagatgcaagcaagttcgcgcagcacgctttccgtacttttgacaagaacggcgacgggacaatagatttccgggagttcatctgcgctctgagcataaccagcagaggttctttcgaacagaagcttaattgggccttcaacatgtatgatctcgacggcgatggcaagattactagatag

SEQ ID NO: 137975 - DNA, 576 bp, Artificial Sequence
  derived and/or modified sequence
atgggcaagcagaacagcaagctggcccctgaggtgatggaggacctggtgaagagcacagagttcaatgaacatgagctgaagcagtggtacaagggcttcctgaaggactgccccagcggccgcctgaacctggaggagttccagcagctgtatgtgaagttcttcccctatggagatgccagcaagtttgcccagcacgccttccgcacctttgacaagaatggagatggcaccatcgacttccgggagttcatctgtgccctgagcatcaccagccggggcagctttgagcagaagctgaactgggccttcaacatgtatgacctggatggagatggcaagatcaccagggtggagatgctggagatcatcgaggccatctacaagatggtgggcaccgtcatcatgatgaagatgaatgaagatggcctgaccccagagcagagggtggacaagatcttcagcaagatggacaagaacaaggatgaccagatcaccctggatgagttcaaggaggccgccaagagtgaccccagcatcgtgctgctgctgcagtgtgacatccagaagtag

SEQ ID NO: 137976 - DNA, 315 bp, Artificial Sequence
  derived and/or modified sequence
atgggcaagcagaacagcaagctggcccctgaggtgatggaggacctggtgaagagcacagagttcaatgaacatgagctgaagcagtggtacaagggcttcctgaaggactgccccagcggccgcctgaacctggaggagttccagcagctgtatgtgaagttcttcccctatggagatgccagcaagtttgcccagcacgccttccgcacctttgacaagaatggagatggcaccatcgacttccgggagttcatctgtgccctgagcatcaccagccggggcagctttgagcagaagctgaactgggcctag

SEQ ID NO: 137977 - DNA, 357 bp, Artificial Sequence
  derived and/or modified sequence
atgggcaagcagaacagcaagctggcccctgaggtgatggaggacctggtgaagagcacagagttcaatgaacatgagctgaagcagtggtacaagggcttcctgaaggactgccccagcggccgcctgaacctggaggagttccagcagctgtatgtgaagttcttcccctatggagatgccagcaagtttgcccagcacgccttccgcacctttgacaagaatggagatggcaccatcgacttccgggagttcatctgtgccctgagcatcaccagccggggcagctttgagcagaagctgaactgggccttcaacatgtatgacctggatggagatggcaagatcaccaggtag

SEQ ID NO: 137978 - DNA, 576 bp, Artificial Sequence
  derived and/or modified sequence
atgggcaagcagaacagcaagctggcccccgaggtgatggaggaccttgtcaagagcacagagtttaatgagcacgagctcaaacagtggtataagggctttctgaaagattgtccaagtggacggttaaatctggaggaattccagcaactgtatgttaaattcttcccatacggcgatgcgtcaaagtttgcgcagcacgccttccggacctttgataaaaatggcgatgggacaatagacttcagggaattcatttgcgccttgagtatcacatcgcgcggctccttcgagcagaagctgaattgggccttcaacatgtacgatctggacggcgacggaaaaattactcgtgttgagatgctcgaaataatcgaggctatctacaagatggtgggaaccgttattatgatgaaaatgaatgaagacggccttacacctgagcagagggttgataagatattttcgaaaatggataagaataaggatgatcagatcactctggacgagtttaaggaggcggccaagagcgatccatctattgttctgctgctccaatgtgatatccagaaatag

SEQ ID NO: 137979 - DNA, 576 bp, Artificial Sequence
  derived and/or modified sequence
atgggcaagcagaacagcaagctggcccccgaggtgatggaggacctggtcaaatccaccgagtttaatgagcacgagttgaaacagtggtacaaaggattcctgaaagactgtccctctggccgcctgaacctcgaagagtttcagcagttgtatgtgaagttctttccatatggtgacgcgtcaaaatttgcccagcacgccttccgtacctttgacaagaacggagacggtaccatagactttcgcgaattcatctgtgcattgagtattactagtaggggaagttttgagcaaaagcttaattgggcttttaatatgtacgacttagatggagatggaaaaattaccagggtcgagatgttggaaataatcgaggccatttacaaaatggtgggcaccgtgattatgatgaagatgaacgaggacggcttgacccctgagcagcgcgttgacaaaatcttttcgaaaatggacaagaataaggatgatcagataaccttagatgaattcaaagaagccgccaagagcgatccatccattgttctcttactgcaatgcgacatccaaaagtag

SEQ ID NO: 137980 - DNA, 576 bp, Artificial Sequence
  derived and/or modified sequence
atgggcaagcagaacagcaagctggcccccgaggtgatggaggacctagtgaaaagcaccgagttcaacgaacacgagctaaaacagtggtacaagggatttctcaaggattgccctagcggacgcctgaatctcgaggagttccagcagctttatgtaaaattcttcccatatggggatgcttctaagttcgctcagcacgccttccgaacttttgacaagaacggtgatggtacgatagacttcagagaattcatttgtgctctgagcatcacatcaaggggctcatttgaacagaagctgaattgggcctttaacatgtatgaccttgatggcgatggtaaaatcacccgcgttgagatgctggagataattgaggcgatttataagatggttggcacagtgataatgatgaaaatgaacgaagatggactcaccccagaacagagagtggacaagatcttctccaaaatggataaaaataaagacgatcagatcacacttgacgaattcaaggaggcagcaaaatcagacccctcaatcgttctcctgttgcagtgtgatatccagaagtag

SEQ ID NO: 137981 - DNA, 315 bp, Artificial Sequence
  derived and/or modified sequence
atgggcaagcagaacagcaagctggcccccgaggtgatggaggacctggttaagagcacagagttcaacgaacatgagctgaaacagtggtacaaggggttcctgaaggattgccctagcgggcgactgaacctggaggagttccagcagttgtacgtgaagttcttcccgtacggcgacgctagcaagtttgcccagcatgccttccggacattcgacaagaatggagatggtacaattgatttccgtgaattcatttgcgcattgtctataacatcacgcggaagctttgaacaaaaactgaactgggcttag

SEQ ID NO: 137982 - DNA, 357 bp, Artificial Sequence
  derived and/or modified sequence
atgggcaagcagaacagcaagctggcccccgaggtgatggaggaccttgtgaagagcacagaatttaatgaacacgagctgaagcagtggtataagggtttcttgaaagactgtccttccggccgactcaacttagaggagttccagcagctctatgtgaagtttttcccatatggagatgcttccaagtttgcccagcatgcttttcggacattcgacaagaacggggatgggaccatcgattttcgcgaatttatttgcgccctgagcatcacgtcaagaggctctttcgagcagaagttaaactgggcatttaatatgtacgacttagatggcgacggaaaaatcactcgctag

SEQ ID NO: 137983 - DNA, 576 bp, Artificial Sequence
  derived and/or modified sequence
atgggcaagcagaactctaaactcgctcccgaagtaatggaagacttggtcaaaagtaccgaatttaatgagcatgagttgaagcagtggtataagggctttctaaaggattgcccgagtggcaggttgaacttagaagaatttcaacagctttatgtcaagttttttccttatggcgacgccagcaaattcgcacaacatgcgttccggactttcgataagaacggggacggaaccatcgactttcgggaatttatctgtgcccttagtattacctctcgtggttccttcgagcagaagctgaattgggcctttaatatgtatgaccttgacggcgatggtaagatcacccgagtggaaatgctggagataattgaagcaatatacaagatggtcggcacagttattatgatgaaaatgaacgaggacggcctgacccccgagcagcgagttgataaaattttctctaagatggacaaaaacaaggatgatcagattaccctggatgaatttaaggaggcggctaagagtgacccatccattgttttattgctccagtgtgacatacagaaatag

SEQ ID NO: 137984 - DNA, 576 bp, Artificial Sequence
  derived and/or modified sequence
atgggcaagcagaactctaagcttgctcccgaggttatggaagaccttgttaagagcactgagtttaacgagcacgagctgaagcagtggtacaagggattcctgaaagattgcccgtcggggaggctgaacctggaagagtttcagcaactgtacgtgaaattcttcccctacggggacgctagtaaattcgcccagcatgcctttcggacttttgacaaaaacggtgatggcacaattgactttcgcgagttcatatgcgcccttagtatcacaagtcggggtagcttcgaacaaaaactaaactgggccttcaatatgtacgacctggacggcgatggaaagatcactcgcgtggagatgcttgagataattgaagcaatttacaagatggtcggtacggtgatcatgatgaagatgaatgaggatggcctcactcctgagcagcgtgtggacaagattttttccaagatggacaaaaataaggacgatcaaattactctcgacgagttcaaggaagccgctaaatctgatccctctattgttctgctcctccaatgcgatattcagaaatag

SEQ ID NO: 137985 - DNA, 576 bp, Artificial Sequence
  derived and/or modified sequence
atgggcaagcagaatagtaagttagcaccagaggttatggaagacttggtcaaaagcacggagttcaatgaacatgaactgaaacaatggtacaaaggatttctgaaggactgcccctccggcagattaaacctcgaagagttccaacagctttacgttaaatttttcccttacggtgacgccagcaaattcgcccagcacgcgttcaggacatttgacaaaaatggtgatggcacaattgatttcagggaattcatatgcgcactgtccataacttcaaggggatctttcgagcaaaaactgaactgggcatttaatatgtacgatttagatggcgacgggaaaataaccagggtcgagatgctggaaatcatcgaggcaatctataagatggtcggaaccgtgatcatgatgaagatgaatgaagatggcctaacacctgagcagcgcgtcgacaagatcttttccaagatggacaagaataaggacgatcaaattacgctagacgaatttaaggaggctgccaagagtgatccctcaattgttctgcttttgcaatgcgatatccagaaatag

SEQ ID NO: 137986 - DNA, 315 bp, Artificial Sequence
  derived and/or modified sequence
atgggtaaacagaatagcaaactggcacctgaggtcatggaagacctagtgaagagtaccgaatttaacgaacacgagctgaagcagtggtacaagggcttcttgaaggactgtccatccggcaggctgaatttggaggagtttcagcagttgtacgtgaaatttttcccatacggcgatgcctcgaagtttgcacagcacgcctttagaactttcgacaaaaatggggacggcaccattgattttcgtgaatttatctgtgccctcagcatcacctctaggggatcttttgaacagaagttaaattgggcctag

SEQ ID NO: 137987 - DNA, 357 bp, Artificial Sequence
  derived and/or modified sequence
atgggtaaacaaaactcaaaactggcaccggaggtgatggaggatctggtaaaatccacggagttcaatgagcatgagcttaagcagtggtacaagggatttctgaaagactgccccagcgggcgtctcaacctcgaggaattccagcagctttacgtgaaattttttccctatggtgacgctagtaagttcgcacagcacgcttttcgcacctttgataagaatggcgatgggacgatcgatttccgggagttcatatgcgccctgtccatcacttcaagaggctcgtttgagcagaaattgaactgggcgttcaacatgtatgacctggatggggatggtaagataaccagatag

SEQ ID NO: 137988 - DNA, 1892 bp, Artificial Sequence
  derived and/or modified sequence
gcgcatccagctccagggaccctaggttttctatgggattcccaatctgcagcagagatttacccgagcgtgttgcggcagcggctgggcttgcaaggcgcgatccaagagggatttaagcagcccagagctccagagaaaaagagagcgagagagaaccacacacagagacggcttaagcgtttacccgaattaaatatatatttttaaaaagaactgttgagttttatcattttcgttaagtgaccgtgcgcagcgctgtaactgcaggatggggaagcagaatagcaaactggcccctgaagtgatggaggacctggtgaagagcacagagtttaatgagcatgaactcaagcagtggtacaaaggatttctcaaggactgtccaagtgggaggctaaatctcgaggaatttcagcagctctatgtgaagttctttccttatggagacgcctccaagtttgcccagcatgccttccgaaccttcgacaagaatggggacggcaccattgacttccgagagttcatctgcgctctgtccatcacctccaggggcagctttgagcagaagctgaactgggccttcaatatgtatgacctggatggtgatggcaagatcacccgagtggagatgctggagatcatcgaggctatctacaaaatggtaggcactgtgatcatgatgaaaatgaatgaggatggcctgacgcctgagcagcgagtagacaagattttcagcaagatggataagaacaaagatgaccagattacactggatgaattcaaagaagctgcaaagagcgacccttccattgtattacttctgcagtgcgacatccagaaatgagctgatgtcaatgctatggactgcacaaaagtctcaatgttccattcagtctgcagctattcacacacacacacacacacacacacacacacacacacacacacacaaatattgcttggactacctataaatggacttgcttcttgtgtttgaaacactcgtgtgcatgagaatgtcatttgctaatgaattttaaaagcatatataaaacaaaacaaacaacctgccacaatgtgatatgtgtaatatcatttcataaaaatccctcttcctccaaagcctgggcagaaatgtgctgcaaagagttatatgacttcttgttcatgttttgctaatgctcgtatctccttgattacataatgttagtagcactgagacccccatggtaatgtaacttaattataagctatgtcactaccctcctgtaaaatactattggacagacacagagggacccttggctcctgtgtctggtccacacaccacagaagcttgtattatcagtgaatataaatgtactacatttgcatgccttttgggtttgccttaattcttacctcatttgcatcctatcgatctggaaagagctgttttggatgaatgcagtataaaatgtaaaaaccctgctaaatgacttattgattaagtatatctatctatatatacatatacacaaagatattatttatcgaaagtaaaaaagatggaagtgtattggtttctgtttgaattttcaaaggcttccaatgtggtggcaataaatgtcccaaataaatttataacaattgattttccccctaattcttattttataattttaaaattgcagcagttgctagcaacaacttactaaatctactcttaaatatacaactttggaatttgaagaattaatgacaacaaaagggaaaaaagcaactttccaacttttcatccaggctcccaaaagagggacaacgaacatggcatgtgaaaagtaaaacagatttgttcattccgaaaaaaaaatgttcattctatgacaataaattttatctcagtgtga

SEQ ID NO: 137989 - DNA, 1543 bp, Artificial Sequence
  derived and/or modified sequence
caaccttcccgaggcgtcctgcccgggaagccagttcctgggttctgggctggctaggttggcagcgaatgaggcttaggcatcactgcctgaggccctcacttagcatgtcgacagccacagacttgtctggcggagtttctcctggtgcccacttaagtagtctcaagtttgttcaaagctggactcctcgacttggaaccaggagcagctggagatttgtcaatttagagctcatttgccacgggagacgctcttggtgtccccagcaccgaagggcaggatggggaagcagaatagcaaactggcccctgaagtgatggaggacctggtgaagagcacagagtttaatgagcatgaactcaagcagtggtacaaaggatttctcaaggactgtccaagtgggaggctaaatctcgaggaatttcagcagctctatgtgaagttctttccttatggagacgcctccaagtttgcccagcatgccttccgaaccttcgacaagaatggggacggcaccattgacttccgagagttcatctgcgctctgtccatcacctccaggggcagctttgagcagaagctgaactgggccttcaatatgtatgacctggatggtgatggcaagatcacccgagtggagatgctggagatcatcgaggctatctacaaaatggtaggcactgtgatcatgatgaaaatgaatgaggatggcctgacgcctgagcagcgagtagacaagattttcagcaagatggataagaacaaagatgaccagattacactggatgaattcaaagaagctgcaaagagcgacccttccattgtattacttctgcagtgcgacatccagaaatgagctgatgtcaatgctatggactgcacaaaagtctcaatgttccattcagtctgcagctattcacacacacacacacacacacacacacacacacacacacacacacaaatattgcttggactacctataaatggacttgcttcttgtgtttgaaacactcgtgtgcatgagaatgtcatttgctaatgaattttaaaagcatatataaaacaaaacaaacaacctgccacaatgtgatatgtgtaatatcatttcataaaaatccctcttcctccaaagcctgggcagaaatgtgctgcaaagagttatatgacttcttgttcatgttttgctaatgctcgtatctccttgattacataatgttagtagcactgagacccccatggtaatgtaacttaattataagctatgtcactaccctcctgtaaaatactattggacagacacagagggacccttggctcctgtgtctggtccacacaccacagaagcttgtattatcagtgaatataaatgtactacatttgcatgccttttgggtttgccttaattcttacctcatttgcatcctatcgatctggaaagagctgttttggatgaatgcagtataaaatgtaaaaaccctgctaaatgacttattgattaagtatatctatctatatatacatatacacaaagatatta

SEQ ID NO: 137990 - DNA, 2725 bp, Artificial Sequence
  derived and/or modified sequence
agactagatttaagacaggtgaaactgagatgctttcttagtttgtcttagacagatttaagtagctaattgaccgattgtgaagttttccggttgctgataaaactattgagcgggtacagtcgagtagcaacctgtcatccgtgggattggtgcaccatttttctcactgtggaagggcagcaaaggtgtttgctaagtaaaactgagtggatgagattggtatggaaatcatggttgatctctgagcgggatgttagtgtttaagatccacggagtcaggcgcaaaatgagcacatttctctcagtattcagaaatgagtagataatttttttcgtctttgatttttgtcacaatggtgaatgggcagaaaagggaaagatgctctactgcactgtcgattttgaacggagtcacaggctcggtcgctgaatggggactgtcagacccaaactagttacctgcctttgcattccgtgttcgccatccggaatctggggttaaaaaatgtaaatcaaggcaggatggggaagcagaatagcaaactggcccctgaagtgatggaggacctggtgaagagcacagagtttaatgagcatgaactcaagcagtggtacaaaggatttctcaaggactgtccaagtgggaggctaaatctcgaggaatttcagcagctctatgtgaagttctttccttatggagacgcctccaagtttgcccagcatgccttccgaaccttcgacaagaatggggacggcaccattgacttccgagagttcatctgcgctctgtccatcacctccaggggcagctttgagcagaagctgaactgggccttcaatatgtatgacctggatggtgatggcaagatcacccgagtggagatgctggagatcatcgaggctatctacaaaatggtaggcactgtgatcatgatgaaaatgaatgaggatggcctgacgcctgagcagcgagtagacaagattttcagcaagatggataagaacaaagatgaccagattacactggatgaattcaaagaagctgcaaagagcgacccttccattgtattacttctgcagtgcgacatccagaaatgagctgatgtcaatgctatggactgcacaaaagtctcaatgttccattcagtctgcagctattcacacacacacacacacacacacacacacacacacacacacacacaaatattgcttggactacctataaatggacttgcttcttgtgtttgaaacactcgtgtgcatgagaatgtcatttgctaatgaattttaaaagcatatataaaacaaaacaaacaacctgccacaatgtgatatgtgtaatatcatttcataaaaatccctcttcctccaaagcctgggcagaaatgtgctgcaaagagttatatgacttcttgttcatgttttgctaatgctcgtatctccttgattacataatgttagtagcactgagacccccatggtaatgtaacttaattataagctatgtcactaccctcctgtaaaatactattggacagacacagagggacccttggctcctgtgtctggtccacacaccacagaagcttgtattatcagtgaatataaatgtactacatttgcatgccttttgggtttgccttaattcttacctcatttgcatcctatcgatctggaaagagctgttttggatgaatgcagtataaaatgtaaaaaccctgctaaatgacttattgattaagtatatctatctatatatacatatacacaaagatattatttatcgaaagtaaaaaagatggaagtgtattggtttctgtttgaattttcaaaggcttccaatgtggtggcaataaatgtcccaaataaatttataacaattgattttccccctaattcttattttataattttaaaattgcagcagttgctagcaacaacttactaaatctactcttaaatatacaactttggaatttgaagaattaatgacaacaaaagggaaaaaagcaactttccaacttttcatccaggctcccaaaagagggacaacgaacatggcatgtgaaaagtaaaacagatttgttcattccgaaaaaaaaatgttcattctatgacaataaattttatctcagtgtgactttggtgctaacaacgtatgttcagtgcaactacgtggagctgtgcacacacagcaggtaggctgcaggtgtcccccaacataagtcagtaggaaagaagacatctgtcttcccaaatctaaagtaggcaaaaaataacagaagtagctatttttaataacagaacagaactctgactcttttgatcttgaaggaggcagaagagattccatcaaaacctctaaaagcaggtttgcattttcagaacatgcccccctagagagttgagttttttacacagcactacccggtagtactttctctgatgatgggaaggtctacatctgcacagcacgctagctataactgcacatatggctactgagcacttcaagtatggctagcgtgactaaggaactgaattttatactgtaattaagtgtaatttgccacatatagctagtggctttagtaacagacagtttagtgctatattatttattcaagtactttttatcaaattcgttttttaccgaattcgttttttaccattctttatttgtcttaggatcattacataacactaaactagggtctaa

SEQ ID NO: 137991 - DNA, 562 bp, Artificial Sequence
  derived and/or modified sequence
aatctgcagcagagatttacccgagcgtgttgcggcagcggctgggcttgcaaggcgcgatccaagagggatttaagcagcccagagctccagagaaaaagagagcgagagagaaccacacacagagacggcttaagcgtttacccgaattaaatatatatttttaaaaagaactgttgagttttatcattttcgttaagtgaccgtgcgcagcgctgtaactgacttactggattatttccaggcaggatggggaagcagaatagcaaactggcccctgaagtgatggaggacctggtgaagagcacagagtttaatgagcatgaactcaagcagtggtacaaaggatttctcaaggactgtccaagtgggaggctaaatctcgaggaatttcagcagctctatgtgaagttctttccttatggagacgcctccaagtttgcccagcatgccttccgaaccttcgacaagaatggggacggcaccattgacttccgagagttcatctgcgctctgtccatcacctccaggggcagctttgagcagaagctgaactgggcct

SEQ ID NO: 137992 - DNA, 576 bp, Artificial Sequence
  derived and/or modified sequence
agtgcatacagaaggcgcttggctcagggtacacagggcaagaagcctcggatcccagctccctttaacacacattttttcaacgccgttctggaccgagactgtccggggcactgggtgctgcaggacccggctcccagtactcctagcagaagaccctctgatgaaatggcccatgacaaaatgaccaccataaccgttccttcagtaagccaggcaggatggggaagcagaatagcaaactggcccctgaagtgatggaggacctggtgaagagcacagagtttaatgagcatgaactcaagcagtggtacaaaggatttctcaaggactgtccaagtgggaggctaaatctcgaggaatttcagcagctctatgtgaagttctttccttatggagacgcctccaagtttgcccagcatgccttccgaaccttcgacaagaatggggacggcaccattgacttccgagagttcatctgcgctctgtccatcacctccaggggcagctttgagcagaagctgaactgggccttcaatatgtatgacctggatggtgatggcaagatcacccgag

SEQ ID NO: 137993 - protein, 510 aa, Artificial Sequence
  derived and/or modified sequence
MPVPPPPAPPPPPTFALANTEKPTLNKTEQAGRNALLSDISKGKKLKKTVTNDRSAPILDKPKGAGAGGGGGGFGGGGGFGGGGGGGGGGSFGGGGPPGLGGLFQAGMPKLRSTANRDNDSGGSRPPLLPPGGRSTSAKPFSPPSGPGRFPVPSPGHRSGPPEPQRNRMPPPRPDVGSKPDSIPPPVPSTPRPIQSSPHNRGSPPVPGGPRQPSPGPTPPPFPGNRGTALGGGSIRQSPLSSSSPFSNRPPLPPTPSRALDDKPPPPPPPVGNRPSIHREAVPPPPPQNNKPPVPSTPRPSASSQAPPPPPPPSRPGPPPLPPSSSGNDETPRLPQRNLSLSSSTPPLPSPGRSGPLPPPPSERPPPPVRDPPGRSGPLPPPPPVSRNGSTSRALPATPQLPSRSGVDSPRSGPRPPLPPDRPSAGAPPPPPPSTSIRNGFQDSPCEDEWESRFYFHPISDLPPPEPYVQTTKSYPSKLARNESRSGSNRRERGAPPLPPIPRPPKQAAE

SEQ ID NO: 137994 - protein, 503 aa, Artificial Sequence
  derived and/or modified sequence
MPVPPPPAPPPPPTFALANTEKPTLNKTEQAGRNALLSDISKGKKLKKTVTNDRSAPILDKPKGAGAGGGGGGFGGGGGFGGGGGGGGGGSFGGGGPPGLGGLFQAGMPKLRSTANRDNDSGGSRPPLLPPGGRSTSAKPFSPPSGPGRFPVPSPGHRSGPPEPQRNRMPPPRPDVGSKPDSIPPPVPSTPRPIQSSPHNRGSPPVPGGPRQPSPGPTPPPFPGNRGTALGGGSIRQSPLSSSSPFSNRPPLPPTPSRALDDKPPPPPPPVGNRPSIHREAVPPPPPQNNKPPVPSTPRPSASSQAPPPPPPPSRPGPPPLPPSSSGNDETPRLPQRNLSLSSSTPPLPSPGRSGPLPPPPSERPPPPVRDPPGRSGPLPPPPPVSRNGSTSRALPATPQLPSRSGVDSPRSGPRPPLPPDRPSAGAPPPPPPSTSIRNGFQDSPCEDEWESRFYFHPISDLPPPEPYVQTTKSYPSKLARNESRSGSNRRERGAPPLPPIPR

SEQ ID NO: 137995 - protein, 359 aa, Artificial Sequence
  derived and/or modified sequence
MPVPPPPAPPPPPTFALANTEKPTLNKTEQAGRNALLSDISKGKKLKKTVTNDRSAPILDKPKGAGAGGGGGGFGGGGGFGGGGGGGGGGSFGGGGPPGLGGLFQAGMPKLRSTANRDNDSGGSRPPLLPPGGRSTSAKPFSPPSGPGRFPVPSPGHRSGPPEPQRNRMPPPRPDVGSKPDSIPPPVPSTPRPIQSSPHNRGSPPVPGGPRQPSPGPTPPPPPPVRDPPGRSGPLPPPPPVSRNGSTSRALPATPQLPSRSGVDSPRSGPRPPLPPDRPSAGAPPPPPPSTSIRNGFQDSPCEDEWESRFYFHPISDLPPPEPYVQTTKSYPSKLARNESRSGSNRRERGAPPLPPIPR

SEQ ID NO: 137996 - protein, 493 aa, Artificial Sequence
  derived and/or modified sequence
MPVPPPPAPPPPPTFALANTEKPTLNKTEQAGRNALLSDISKGKKLKKTVTNDRSAPILDKPKGAGAGGGGGGFGGGGGFGGGGGGGGGGSFGGGGPPGLGGLFQAGMPKLRSTANRDNDSGGSRPPLLPPGGRSTSAKPFSPPSGPGRFPVPSPGHRSGPPEPQRNRMPPPRPDVGSKPDSIPPPVPSTPRPIQSSPHNRGSPPVPGGPRQPSPGPTPPPFPGNRGTALGGGSIRQSPLSSSSPFSNRPPLPPTPSRALDDKPPPPPPPVGNRPSIHREAVPPPPPQNNKPPVPSTPRPSASSQAPPPPPPPSRPGPPPLPPSSSGNDETPRLPQRNLSLSSSTPPLPSPGRSGPLPPPPSERPPPPVRDPPGRSGPLPPPPPVSRNGSTSRALPATPQLPSRSGVDSPRSGPRPPLPPDRPSAGAPPPPPPSTSIRNGFQDSPCEDEWESRFYFHPISDLPPPEPYVQTTKSYPSKLARNESRSEYFCQGF

SEQ ID NO: 137997 - protein, 100 aa, Artificial Sequence
  derived and/or modified sequence
MPVPPPPAPPPPPTFALANTEKPTLNKTEQAGRNALLSDISKGKKLKKTVTNDRSAPILDKPKGAGAGGGGGGFGGGGGFGGGGGGGGGGSFGGGGPPGL

SEQ ID NO: 137998 - DNA, 1533 bp, Artificial Sequence
  derived and/or modified sequence
atgcccgtgccccccccccccgcccccccccccccccccaccttcgccctggccaacaccgagaagcccaccctgaacaagaccgagcaggccggcagaaacgccctgctgagcgacatcagcaagggcaagaagctgaagaagaccgtgaccaacgacagaagcgcccccatcctggacaagcccaagggcgccggcgccggcggcggcggcggcggcttcggcggcggcggcggcttcggcggcggcggcggcggcggcggcggcggcagcttcggcggcggcggcccccccggcctgggcggcctgttccaggccggcatgcccaagctgagaagcaccgccaacagagacaacgacagcggcggcagcagaccccccctgctgccccccggcggcagaagcaccagcgccaagcccttcagcccccccagcggccccggcagattccccgtgcccagccccggccacagaagcggcccccccgagccccagagaaacagaatgcccccccccagacccgacgtgggcagcaagcccgacagcatccccccccccgtgcccagcacccccagacccatccagagcagcccccacaacagaggcagcccccccgtgcccggcggccccagacagcccagccccggccccacccccccccccttccccggcaacagaggcaccgccctgggcggcggcagcatcagacagagccccctgagcagcagcagccccttcagcaacagaccccccctgccccccacccccagcagagccctggacgacaagcccccccccccccccccccccgtgggcaacagacccagcatccacagagaggccgtgccccccccccccccccagaacaacaagccccccgtgcccagcacccccagacccagcgccagcagccaggcccccccccccccccccccccccagcagacccggccccccccccctgccccccagcagcagcggcaacgacgagacccccagactgccccagagaaacctgagcctgagcagcagcaccccccccctgcccagccccggcagaagcggccccctgccccccccccccagcgagagaccccccccccccgtgagagacccccccggcagaagcggccccctgcccccccccccccccgtgagcagaaacggcagcaccagcagagccctgcccgccaccccccagctgcccagcagaagcggcgtggacagccccagaagcggccccagaccccccctgccccccgacagacccagcgccggcgccccccccccccccccccccagcaccagcatcagaaacggcttccaggacagcccctgcgaggacgagtgggagagcagattctacttccaccccatcagcgacctgcccccccccgagccctacgtgcagaccaccaagagctaccccagcaagctggccagaaacgagagcagaagcggcagcaacagaagagagagaggcgccccccccctgccccccatccccagaccccccaagcaggccgccgagtag

SEQ ID NO: 137999 - DNA, 1512 bp, Artificial Sequence
  derived and/or modified sequence
atgcccgtgccccccccccccgcccccccccccccccccaccttcgccctggccaacaccgagaagcccaccctgaacaagaccgagcaggccggcagaaacgccctgctgagcgacatcagcaagggcaagaagctgaagaagaccgtgaccaacgacagaagcgcccccatcctggacaagcccaagggcgccggcgccggcggcggcggcggcggcttcggcggcggcggcggcttcggcggcggcggcggcggcggcggcggcggcagcttcggcggcggcggcccccccggcctgggcggcctgttccaggccggcatgcccaagctgagaagcaccgccaacagagacaacgacagcggcggcagcagaccccccctgctgccccccggcggcagaagcaccagcgccaagcccttcagcccccccagcggccccggcagattccccgtgcccagccccggccacagaagcggcccccccgagccccagagaaacagaatgcccccccccagacccgacgtgggcagcaagcccgacagcatccccccccccgtgcccagcacccccagacccatccagagcagcccccacaacagaggcagcccccccgtgcccggcggccccagacagcccagccccggccccacccccccccccttccccggcaacagaggcaccgccctgggcggcggcagcatcagacagagccccctgagcagcagcagccccttcagcaacagaccccccctgccccccacccccagcagagccctggacgacaagcccccccccccccccccccccgtgggcaacagacccagcatccacagagaggccgtgccccccccccccccccagaacaacaagccccccgtgcccagcacccccagacccagcgccagcagccaggcccccccccccccccccccccccagcagacccggccccccccccctgccccccagcagcagcggcaacgacgagacccccagactgccccagagaaacctgagcctgagcagcagcaccccccccctgcccagccccggcagaagcggccccctgccccccccccccagcgagagaccccccccccccgtgagagacccccccggcagaagcggccccctgcccccccccccccccgtgagcagaaacggcagcaccagcagagccctgcccgccaccccccagctgcccagcagaagcggcgtggacagccccagaagcggccccagaccccccctgccccccgacagacccagcgccggcgccccccccccccccccccccagcaccagcatcagaaacggcttccaggacagcccctgcgaggacgagtgggagagcagattctacttccaccccatcagcgacctgcccccccccgagccctacgtgcagaccaccaagagctaccccagcaagctggccagaaacgagagcagaagcggcagcaacagaagagagagaggcgccccccccctgccccccatccccagatag

SEQ ID NO: 138000 - DNA, 1080 bp, Artificial Sequence
  derived and/or modified sequence
atgcccgtgccccccccccccgcccccccccccccccccaccttcgccctggccaacaccgagaagcccaccctgaacaagaccgagcaggccggcagaaacgccctgctgagcgacatcagcaagggcaagaagctgaagaagaccgtgaccaacgacagaagcgcccccatcctggacaagcccaagggcgccggcgccggcggcggcggcggcggcttcggcggcggcggcggcttcggcggcggcggcggcggcggcggcggcggcagcttcggcggcggcggcccccccggcctgggcggcctgttccaggccggcatgcccaagctgagaagcaccgccaacagagacaacgacagcggcggcagcagaccccccctgctgccccccggcggcagaagcaccagcgccaagcccttcagcccccccagcggccccggcagattccccgtgcccagccccggccacagaagcggcccccccgagccccagagaaacagaatgcccccccccagacccgacgtgggcagcaagcccgacagcatccccccccccgtgcccagcacccccagacccatccagagcagcccccacaacagaggcagcccccccgtgcccggcggccccagacagcccagccccggccccaccccccccccccccccccccgtgagagacccccccggcagaagcggccccctgcccccccccccccccgtgagcagaaacggcagcaccagcagagccctgcccgccaccccccagctgcccagcagaagcggcgtggacagccccagaagcggccccagaccccccctgccccccgacagacccagcgccggcgccccccccccccccccccccagcaccagcatcagaaacggcttccaggacagcccctgcgaggacgagtgggagagcagattctacttccaccccatcagcgacctgcccccccccgagccctacgtgcagaccaccaagagctaccccagcaagctggccagaaacgagagcagaagcggcagcaacagaagagagagaggcgccccccccctgccccccatccccagatag

SEQ ID NO: 138001 - DNA, 1482 bp, Artificial Sequence
  derived and/or modified sequence
atgcccgtgccccccccccccgcccccccccccccccccaccttcgccctggccaacaccgagaagcccaccctgaacaagaccgagcaggccggcagaaacgccctgctgagcgacatcagcaagggcaagaagctgaagaagaccgtgaccaacgacagaagcgcccccatcctggacaagcccaagggcgccggcgccggcggcggcggcggcggcttcggcggcggcggcggcttcggcggcggcggcggcggcggcggcggcggcagcttcggcggcggcggcccccccggcctgggcggcctgttccaggccggcatgcccaagctgagaagcaccgccaacagagacaacgacagcggcggcagcagaccccccctgctgccccccggcggcagaagcaccagcgccaagcccttcagcccccccagcggccccggcagattccccgtgcccagccccggccacagaagcggcccccccgagccccagagaaacagaatgcccccccccagacccgacgtgggcagcaagcccgacagcatccccccccccgtgcccagcacccccagacccatccagagcagcccccacaacagaggcagcccccccgtgcccggcggccccagacagcccagccccggccccacccccccccccttccccggcaacagaggcaccgccctgggcggcggcagcatcagacagagccccctgagcagcagcagccccttcagcaacagaccccccctgccccccacccccagcagagccctggacgacaagcccccccccccccccccccccgtgggcaacagacccagcatccacagagaggccgtgccccccccccccccccagaacaacaagccccccgtgcccagcacccccagacccagcgccagcagccaggcccccccccccccccccccccccagcagacccggccccccccccctgccccccagcagcagcggcaacgacgagacccccagactgccccagagaaacctgagcctgagcagcagcaccccccccctgcccagccccggcagaagcggccccctgccccccccccccagcgagagaccccccccccccgtgagagacccccccggcagaagcggccccctgcccccccccccccccgtgagcagaaacggcagcaccagcagagccctgcccgccaccccccagctgcccagcagaagcggcgtggacagccccagaagcggccccagaccccccctgccccccgacagacccagcgccggcgccccccccccccccccccccagcaccagcatcagaaacggcttccaggacagcccctgcgaggacgagtgggagagcagattctacttccaccccatcagcgacctgcccccccccgagccctacgtgcagaccaccaagagctaccccagcaagctggccagaaacgagagcagaagcgagtacttctgccagggcttctag

SEQ ID NO: 138002 - DNA, 303 bp, Artificial Sequence
  derived and/or modified sequence
atgcccgtgccccccccccccgcccccccccccccccccaccttcgccctggccaacaccgagaagcccaccctgaacaagaccgagcaggccggcagaaacgccctgctgagcgacatcagcaagggcaagaagctgaagaagaccgtgaccaacgacagaagcgcccccatcctggacaagcccaagggcgccggcgccggcggcggcggcggcggcttcggcggcggcggcggcttcggcggcggcggcggcggcggcggcggcggcagcttcggcggcggcggcccccccggcctgtag

SEQ ID NO: 138003 - DNA, 1533 bp, Artificial Sequence
  derived and/or modified sequence
atgccagtgcctccgccacctgcccccccccctcctcctaccttcgctttagctaacaccgagaaacccacgctaaataaaaccgagcaggccgggcgaaatgctttgttatctgatatctctaagggaaagaagttaaagaagacagtaacaaatgatagatcggccccgattttggataagcccaaaggagctggtgctggtggcggcgggggagggtttggggggggcggcggctttggcggcggaggaggcggaggcggtgggggcagcttcggggggggaggcccccctggcctgggcggtctgtttcaagccggaatgccaaaattgaggtctacagctaacagggacaacgattccggtggaagtagacctccacttctgcctcccgggggcaggtccaccagcgcgaaacccttttcgcctccttctggcccaggaaggtttcccgtcccttcccctgggcaccggagcggcccacctgagccccagagaaaccgaatgcctcctcctagaccagacgtggggtctaagcccgactcaatccccccacccgtaccatctaccccaagacccattcagtctagtccccacaaccgaggcagtcctccggttcctggtggaccaagacagcctagcccaggccccacacctccccctttccctggaaatcgcggcaccgcacttggtgggggaagtatccgccagtcacctttatcgagctccagtcctttctctaatcgcccacccctgcctccaaccccttccagggctttagacgataaaccgccaccgccccctcccccagtcgggaatcgtccctctatccatagggaggccgtcccccctcctcctccacagaacaacaaacccccagttccctctacccctcgtccttctgccagctctcaggcccctcctcctcctcctccacctagtcgtccggggcctccaccactcccccccagcagttcaggaaatgatgagacccctagattacctcagcgaaatctgtctctttcgagcagcactcctccattacctagccctggaaggagcggtcctttgccaccgcccccctcggagcgtccaccccctccggttagagatcctccaggaagatccgggcccttaccccccccgccccccgtctcacgaaatggctccacctcccgtgcgcttcccgccacaccccagctcccatctagatcaggagtagactctcctagatcgggcccacgaccccccttaccccccgatcgtccttcagccggggcccctccccctcctccgccaagcacgagcattcgaaatgggttccaggattcgccatgtgaagatgagtgggaatctaggttctattttcaccccatctccgacttgccacccccagagccatacgtccagactacaaagtcgtaccctagcaaattagccagaaatgaatcccgatctggctccaacaggagagagcggggtgctccccctttgccccccatcccccggccacctaagcaggcagctgagtag

SEQ ID NO: 138004 - DNA, 1512 bp, Artificial Sequence
  derived and/or modified sequence
atgccagtccctcctccgccagcaccaccacccccaccaacgttcgctctggccaacactgaaaaaccgactctgaataagacagaacaagccgggcggaatgctctgctctccgatatatcaaaggggaagaagctgaaaaagacagtgactaacgatcggagcgcgcccatcttagacaagcctaaaggtgcgggagcaggcggtggcggggggggattcggcggtggtggcggatttggcgggggcggggggggtggcggcggaggatcttttggggggggtggccccccaggtctgggcggactcttccaagccggaatgccaaaactacgctccacagcgaacagggacaatgatagcgggggctcacggcccccactgctgcctcctggaggacggagcacgtccgcaaaacccttctctccacccagtggaccaggcaggttcccagttcccagccctggccaccggtcaggcccccccgaacctcagcggaaccgaatgccccctcctaggcctgacgtagggtccaaacctgatagcatccctccccccgtccccagtactccccgcccgatccagtcgtcaccgcataaccgcggttccccaccggtacctggcggacctcgacagccatcgcccgggcctacacctcctccattcccaggaaaccggggcaccgccctcggcggcgggagcatccggcagtcccctttatcctcttcctccccgttctcaaatcgacctccgctgccaccaacaccatctagagcactcgatgacaaaccgcccccaccccctcctcccgtggggaatagaccttcaattcaccgagaagccgtgccacctccacctccccagaataacaagccccctgttccatctactcctcgcccctccgcttcatcccaggcgcccccacctcctcctcctcccagtcgccctgggcccccaccactgccaccctcaagctccggcaatgacgagacaccccggcttccccagaggaatctgtctctgtccagttcgactccccccctcccaagcccaggacgatctggacccctgccaccgccaccctccgaacggcctccacctcctgttagggatccccctggccgctccgggccactaccccctcctccaccagtttctcgcaacggcagtacaagccgggccttgcccgccactccgcagttgcctagccggagtggcgtagatagccctaggagtggccctcggccgccactacctccggatcggccaagtgcaggcgcgcctccccctccccctcccagcaccagcatcagaaacggattccaagactcaccgtgcgaggatgaatgggaatcccgcttttacttccatcccatttcagatctcccaccgcctgaaccttatgtacagacaacaaagagttaccccagtaaattggccagaaacgagagcagatcagggtcaaatcggagggaacggggcgcccctcccttgccccccattcccaggtag

SEQ ID NO: 138005 - DNA, 1512 bp, Artificial Sequence
  derived and/or modified sequence
atgcccgtgcctccacccccagctccaccaccaccgccaacatttgccctagccaatactgaaaagccaactcttaataaaacagagcaggcaggccgcaacgctcttctctcagacatatctaagggtaagaagctcaaaaagacggtcacaaacgatcggagcgctcccatattagacaaacctaagggcgcaggcgccggcgggggtggaggcggctttgggggaggaggagggtttgggggcgggggagggggcgggggcggggggtcttttggcggggggggcccaccgggactcggcgggctcttccaagcaggaatgcctaaactcagatctaccgctaaccgtgataatgactccggaggcagtaggcctcctttgctccccccgggtggccgaagcacctctgcaaaacccttcagccccccctccggccctgggcgcttccctgtgccctctcctggacacagatctgggccacccgagccccaacgaaaccgtatgcctcccccacggcccgatgtgggtagcaaacctgactcgatcccccctcccgttccctcgactcccagaccaatacagagctcaccccacaaccgcggatctcctcctgtccccgggggcccccggcagccttcccctggacccactcctcctcctttccccggaaatcgcggaacagcccttgggggaggctcaattagacagagtccactctcctccagttcccctttctccaatcgaccacccctgccgccaaccccctctagggccctagacgataaacccccaccccctccgcctcccgtgggaaaccgcccctcaattcatagggaagccgtccctcctcctcccccacagaacaataagccacctgtgcctagcactcctcggccaagcgccagctctcaggcgcctcccccgccgcctccaccatccaggccaggaccaccccccctgcctccatccagttctggcaacgacgaaactcccagactgcctcagcgcaacctgagcctgtcatctagtactcctcctctgcccagccccgggcgatcaggacccctcccaccaccaccaagcgagaggccacccccacccgtcagagatccccccggtcgatcggggcccctgcccccaccacccccggtgtctcgaaacggttccacctctagagcactgcccgctaccccacagctaccttcaagaagtggcgttgactcaccacgcagtggacccagacctcctctgccgccggatcgccctagcgccggcgctccaccacccccccccccgagcacatcaatcaggaacggtttccaggacagcccttgtgaagacgaatgggagagtagattctactttcaccctattagcgacttgccacccccagagccctatgtccaaaccaccaaatcctatccctccaagttagctcggaacgagtcccgctcgggctctaatagaagagagcggggtgctccgcctcttcctccgatccctaggtag

SEQ ID NO: 138006 - DNA, 1512 bp, Artificial Sequence
  derived and/or modified sequence
atgccagtgccccctccccctgcacctcccccacccccgacattcgccttagccaacacagaaaaacccacactcaacaagacagagcaagccggtcggaacgccttactatctgacatttccaaagggaaaaagttaaaaaaaacggtgactaacgataggtcggctcctatcttggacaaaccaaagggagccggcgctgggggtggaggcggaggattcggtggcgggggcggattcggggggggcggaggcgggggtggcggtggatctttcggaggcggaggccctccaggattaggcggactctttcaagcgggtatgcctaagcttagatcaacggcaaaccgggacaatgactctggtgggagtcgacctccactcttaccgcccggaggccggtcgacatctgcgaaacctttcagccctccctctggaccaggtaggttcccagtcccttcccctggccatagaagcggcccgccagaaccccagagaaatagaatgccacccccccgccccgatgttggatctaagccagattcaatccccccgccagtccctagcactccccggcccattcagtctagcccacacaaccgagggtcccctcccgtgccaggtggacctcgacagcccagtccaggaccaacaccaccgccatttcccggcaatcgcggaactgctttgggggggggctccattaggcagagccccctctccagcagctcccctttttcaaacaggccacccctaccccccacccccagtagagccctcgatgataagccgccccctccccccccaccagtgggcaacagaccgagcatccatagggaagccgtgccccctcctccgccccagaacaacaagccacctgtgccatccactccccgccctagtgccagtagtcaggctcctccaccacctccgccccctagcagacccggcccacctcctcttcccccatcctccagtggcaatgatgagacgcctaggctcccgcagcgaaatctgtcgctttcatcaagtaccccaccacttccatcaccagggcggtcagggcccctgccaccacccccctccgagcggcctccgccacccgtgagggacccaccgggcagaagcggccctctgccgccgcccccacctgtgagccggaatggcagcacaagccgggcattgccggccacacctcagctgcccagtaggagcggtgtggactccccacggtctggccctcgaccaccactccctcccgaccggccatcagcgggcgctccccctccaccacctccctccacaagcatccggaacggatttcaggatagcccctgtgaagacgagtgggagagtagattctacttccaccccatcagtgatttgcctccacccgagccttatgtacaaaccaccaagagctatccttcaaagttggcccggaacgaaagtaggtctggaagcaaccgccgggagcggggtgctccacccctaccccccataccccgttag

SEQ ID NO: 138007 - DNA, 1080 bp, Artificial Sequence
  derived and/or modified sequence
atgccggtgccccccccaccagcccctcctccacctccaacatttgcgctcgccaataccgagaaacccacactgaacaaaaccgaacaagcagggaggaatgccctcctgtccgacatcagtaagggcaaaaagctgaaaaagactgtgaccaacgaccgttcagcgcctatcctcgataaacctaagggtgccggggctggcggcggcggcggagggttcggaggcggcgggggctttggcggcggcgggggcggcggcgggggaggatccttcggaggaggagggccgcccgggttaggcgggcttttccaagcagggatgcctaagctgaggtccacagccaaccgagacaacgactccgggggatcacgaccacctttgctgcctccgggcggaaggtccacatctgccaagcctttctcacctccaagcggaccagggagattccctgtgcccagtccggggcaccggtctgggccccctgagccacagagaaataggatgccacctcccaggcccgatgtcggaagtaaaccagatagtattcccccacctgtccctagcacccccaggcccattcagagtagtccccacaaccgaggttcaccccctgtacccggcgggccccgccaaccgtcgcctggaccgaccccaccgccccccccacccgtgcgcgatccccccggtaggtcaggtcccctgcccccgcccccaccggtgtctagaaacgggtcaactagcagggccttaccagccactccacagttaccatccaggtctggcgtcgactctcctcgatctggccccagacctccgctaccccctgaccggccaagtgcgggggccccacccccaccaccgccttccacatcaatcagaaatggtttccaagattctccgtgcgaagacgagtgggaatcaaggttctacttccaccccatatccgacttacctccccccgagccatacgtgcagactaccaagtcttatccaagcaaattagcgaggaacgagagcaggagcggttccaacaggcgcgagagaggcgccccccccctacctcccatacctaggtag

SEQ ID NO: 138008 - DNA, 1482 bp, Artificial Sequence
  derived and/or modified sequence
atgcccgtgcctccacctcccgcacctcctccacccccgacctttgccttagccaacaccgaaaaaccgactctgaataagaccgaacaggcggggcggaacgccctgctgagcgacatttcaaaaggcaaaaaactaaaaaaaacggttaccaacgacaggagcgctcctatcctggacaaacctaaaggggcaggggccggcggtggcggaggcgggttcggcggtggcgggggttttggaggcgggggcggtggaggaggcggcgggagcttcggcggcggtggccctcctggactaggtgggctctttcaggctgggatgcctaaactccgatctacggcaaaccgggacaacgactccggaggatcacggcctccgctactgcctcccgggggtaggagtacctccgccaagcccttcagccccccttccggccccgggcggttcccagtgcctagccctggacaccgatccgggccgcctgagccacagcgaaacaggatgcctcccccacggcccgacgttggcagcaagcctgattctattcccccgcccgtcccatctacccctcggcctatccagtctagcccacataaccgcggcagcccccctgtgcctggcggaccacgccagccctcccccggccccacacccccccccttccctggcaacaggggaaccgcgttagggggagggtctattcgccagtctcccctgagcagctcttcacccttcagcaacaggccacctctgccgccgactcccagtagggcactagacgacaagcctccgcccccaccacctcccgtggggaaccgtccatcaattcaccgagaggctgtgccacctccacccccgcaaaacaataagccaccggtgcctagtacgccccgccccagtgcatcctcacaggcccctcctccgcctccacctccctccagaccgggacccccgcctttgcccccttcctcatctggaaacgatgaaacaccacggctgcctcagagaaatctttccctctcatcttccacaccacccctgccatcacccggtcgaagcggtccgctcccaccgcccccttccgaaaggcctccaccgcccgtcagagaccctcccgggaggagtggccccctgccccctccgccaccagtgtctagaaacggcagtaccagccgggcgctgcctgccacaccccagttacctagcaggtctggcgtggattctccgaggagtggtccacgccctccattgccccccgatcggccatccgcaggtgcgcccccaccccctccgccttcaactagcatacggaatgggttccaggattccccttgtgaagacgagtgggagtcaagattttatttccatccgatcagcgatctaccccccccagagccgtacgtccagaccacgaagtcctatccttctaagctggcacgtaacgaaagcagatcagaatatttctgtcagggcttctag

SEQ ID NO: 138009 - DNA, 303 bp, Artificial Sequence
  derived and/or modified sequence
atgcccgtgcccccgcctccggccccacctcccccccctaccttcgctctggccaacactgaaaaacccacactaaacaaaacagagcaagcaggcaggaacgcattgctgagcgacatttcaaaagggaagaaactcaaaaagaccgtcaccaatgaccgcagtgcacctattctggataagcccaagggggcaggagcagggggggggggtgggggtttcggcggtggcggtggcttcggtggaggcggcggcggcggaggcggtggttccttcggcggaggcggacccccgggtctgtag

SEQ ID NO: 138010 - DNA, 1533 bp, Artificial Sequence
  derived and/or modified sequence
atgcctgtgcccccacctccagcccctcctcctccacccacctttgccctggccaacacagagaagcccaccctgaacaagacagagcaggccggcagaaatgccctgctgagtgacatcagcaagggcaagaagctgaagaagacagtgaccaatgacagaagtgcccccatcctggacaagcccaagggagctggagctgggggcggcggcggcggctttggaggcggcggcggctttggaggcggcggcggcggcggcggcggcggcagctttggaggcggcggccccccaggcctgggcggcctcttccaggccggcatgcccaagctgcggagcacagccaacagagacaatgattctgggggcagccggccccccctgctgcccccaggcggccgcagcaccagcgccaagcccttcagccccccatctggccctggccgcttccctgtgcccagccctggccacaggagcggccccccagagccccagaggaacaggatgcccccacccaggccagatgtgggcagcaagccagacagcatccccccacctgtgcccagcaccccccggcccatccagagcagcccccacaacagaggcagcccccctgtgcctgggggcccccggcagcccagccctggccccaccccaccacccttccctggcaacagaggaacagccctgggcggcggcagcatccggcagagccccctgagcagcagcagccccttcagcaaccggccccccctgccccccacccccagccgggccctggatgacaagcccccacctcctcctcctcctgtgggcaaccggcccagcatccaccgggaggccgtgcccccacctccaccccagaacaacaagccccctgtgcccagcaccccccggcccagcgccagcagccaggcccctcctcctcctcctccacccagccggcccggccccccacccctgccccccagcagcagtggaaatgatgagaccccccggctgccccagaggaacctgagcctgagcagcagcaccccacccctgcccagccctggccgcagcggccccctgcccccaccacccagcgagaggcctcctcctcctgtgcgggaccccccaggccgcagcggccccctgcccccacctcctcctgtgtccagaaatggcagcaccagccgggccctgcctgccaccccccagctgcccagccgctctggagtggacagccccaggagcggcccccggccccccctgcccccagaccggcccagcgctggggcccctcctcctcctccacccagcaccagcatcagaaatggcttccaggacagcccctgtgaagatgagtgggagagccgcttctacttccaccccatcagtgacctgcccccacctgagccctacgtgcagaccaccaagagctaccccagcaagctggccagaaatgaaagccgcagcggcagcaacagaagagagcggggggccccacccctgccccccatcccccggccccccaagcaggccgctgagtag

SEQ ID NO: 138011 - DNA, 1512 bp, Artificial Sequence
  derived and/or modified sequence
atgcctgtgcccccacctccagcccctcctcctccacccacctttgccctggccaacacagagaagcccaccctgaacaagacagagcaggccggcagaaatgccctgctgagtgacatcagcaagggcaagaagctgaagaagacagtgaccaatgacagaagtgcccccatcctggacaagcccaagggagctggagctgggggcggcggcggcggctttggaggcggcggcggctttggaggcggcggcggcggcggcggcggcggcagctttggaggcggcggccccccaggcctgggcggcctcttccaggccggcatgcccaagctgcggagcacagccaacagagacaatgattctgggggcagccggccccccctgctgcccccaggcggccgcagcaccagcgccaagcccttcagccccccatctggccctggccgcttccctgtgcccagccctggccacaggagcggccccccagagccccagaggaacaggatgcccccacccaggccagatgtgggcagcaagccagacagcatccccccacctgtgcccagcaccccccggcccatccagagcagcccccacaacagaggcagcccccctgtgcctgggggcccccggcagcccagccctggccccaccccaccacccttccctggcaacagaggaacagccctgggcggcggcagcatccggcagagccccctgagcagcagcagccccttcagcaaccggccccccctgccccccacccccagccgggccctggatgacaagcccccacctcctcctcctcctgtgggcaaccggcccagcatccaccgggaggccgtgcccccacctccaccccagaacaacaagccccctgtgcccagcaccccccggcccagcgccagcagccaggcccctcctcctcctcctccacccagccggcccggccccccacccctgccccccagcagcagtggaaatgatgagaccccccggctgccccagaggaacctgagcctgagcagcagcaccccacccctgcccagccctggccgcagcggccccctgcccccaccacccagcgagaggcctcctcctcctgtgcgggaccccccaggccgcagcggccccctgcccccacctcctcctgtgtccagaaatggcagcaccagccgggccctgcctgccaccccccagctgcccagccgctctggagtggacagccccaggagcggcccccggccccccctgcccccagaccggcccagcgctggggcccctcctcctcctccacccagcaccagcatcagaaatggcttccaggacagcccctgtgaagatgagtgggagagccgcttctacttccaccccatcagtgacctgcccccacctgagccctacgtgcagaccaccaagagctaccccagcaagctggccagaaatgaaagccgcagcggcagcaacagaagagagcggggggccccacccctgccccccatccccaggtag

SEQ ID NO: 138012 - DNA, 1080 bp, Artificial Sequence
  derived and/or modified sequence
atgcctgtgcccccacctccagcccctcctcctccacccacctttgccctggccaacacagagaagcccaccctgaacaagacagagcaggccggcagaaatgccctgctgagtgacatcagcaagggcaagaagctgaagaagacagtgaccaatgacagaagtgcccccatcctggacaagcccaagggagctggagctgggggcggcggcggcggctttggaggcggcggcggctttggaggcggcggcggcggcggcggcggcggcagctttggaggcggcggccccccaggcctgggcggcctcttccaggccggcatgcccaagctgcggagcacagccaacagagacaatgattctgggggcagccggccccccctgctgcccccaggcggccgcagcaccagcgccaagcccttcagccccccatctggccctggccgcttccctgtgcccagccctggccacaggagcggccccccagagccccagaggaacaggatgcccccacccaggccagatgtgggcagcaagccagacagcatccccccacctgtgcccagcaccccccggcccatccagagcagcccccacaacagaggcagcccccctgtgcctgggggcccccggcagcccagccctggccccaccccacctcctcctcctcctgtgcgggaccccccaggccgcagcggccccctgcccccacctcctcctgtgtccagaaatggcagcaccagccgggccctgcctgccaccccccagctgcccagccgctctggagtggacagccccaggagcggcccccggccccccctgcccccagaccggcccagcgctggggcccctcctcctcctccacccagcaccagcatcagaaatggcttccaggacagcccctgtgaagatgagtgggagagccgcttctacttccaccccatcagtgacctgcccccacctgagccctacgtgcagaccaccaagagctaccccagcaagctggccagaaatgaaagccgcagcggcagcaacagaagagagcggggggccccacccctgccccccatccccaggtag

SEQ ID NO: 138013 - DNA, 1482 bp, Artificial Sequence
  derived and/or modified sequence
atgcctgtgcccccacctccagcccctcctcctccacccacctttgccctggccaacacagagaagcccaccctgaacaagacagagcaggccggcagaaatgccctgctgagtgacatcagcaagggcaagaagctgaagaagacagtgaccaatgacagaagtgcccccatcctggacaagcccaagggagctggagctgggggcggcggcggcggctttggaggcggcggcggctttggaggcggcggcggcggcggcggcggcggcagctttggaggcggcggccccccaggcctgggcggcctcttccaggccggcatgcccaagctgcggagcacagccaacagagacaatgattctgggggcagccggccccccctgctgcccccaggcggccgcagcaccagcgccaagcccttcagccccccatctggccctggccgcttccctgtgcccagccctggccacaggagcggccccccagagccccagaggaacaggatgcccccacccaggccagatgtgggcagcaagccagacagcatccccccacctgtgcccagcaccccccggcccatccagagcagcccccacaacagaggcagcccccctgtgcctgggggcccccggcagcccagccctggccccaccccaccacccttccctggcaacagaggaacagccctgggcggcggcagcatccggcagagccccctgagcagcagcagccccttcagcaaccggccccccctgccccccacccccagccgggccctggatgacaagcccccacctcctcctcctcctgtgggcaaccggcccagcatccaccgggaggccgtgcccccacctccaccccagaacaacaagccccctgtgcccagcaccccccggcccagcgccagcagccaggcccctcctcctcctcctccacccagccggcccggccccccacccctgccccccagcagcagtggaaatgatgagaccccccggctgccccagaggaacctgagcctgagcagcagcaccccacccctgcccagccctggccgcagcggccccctgcccccaccacccagcgagaggcctcctcctcctgtgcgggaccccccaggccgcagcggccccctgcccccacctcctcctgtgtccagaaatggcagcaccagccgggccctgcctgccaccccccagctgcccagccgctctggagtggacagccccaggagcggcccccggccccccctgcccccagaccggcccagcgctggggcccctcctcctcctccacccagcaccagcatcagaaatggcttccaggacagcccctgtgaagatgagtgggagagccgcttctacttccaccccatcagtgacctgcccccacctgagccctacgtgcagaccaccaagagctaccccagcaagctggccagaaatgaaagccgctctgagtacttctgccagggcttctag

SEQ ID NO: 138014 - DNA, 303 bp, Artificial Sequence
  derived and/or modified sequence
atgcctgtgcccccacctccagcccctcctcctccacccacctttgccctggccaacacagagaagcccaccctgaacaagacagagcaggccggcagaaatgccctgctgagtgacatcagcaagggcaagaagctgaagaagacagtgaccaatgacagaagtgcccccatcctggacaagcccaagggagctggagctgggggcggcggcggcggctttggaggcggcggcggctttggaggcggcggcggcggcggcggcggcggcagctttggaggcggcggccccccaggcctgtag

SEQ ID NO: 138015 - DNA, 1533 bp, Artificial Sequence
  derived and/or modified sequence
atgcccgtgccccccccccccgcccccccccccccccccaccttcgccttggcgaacacagagaagcctacactgaacaagaccgagcaagcaggccggaatgccttactgtctgatatatccaagggcaagaagcttaagaagacagtgactaatgaccgtagcgcacctattttggataaacccaaaggggccggtgcagggggaggcggcgggggcttcgggggcggaggtggtttcggcgggggcggtgggggtggcggaggtgggagtttcggcggcggcggccccccaggcctgggggggctttttcaggcaggcatgcctaaacttcgctcaactgcaaatcgggacaacgattcagggggctcgcggcccccgcttctcccccccggtgggcgcagcacctccgctaagccctttagtcctccatcgggcccgggccgcttccccgtgccctcacctggtcataggtctgggccaccagagccccagaggaataggatgcctcctccccgaccagacgtgggcagcaagccagattctattccgcctcctgttccgagcacacccagaccaattcagtcctcccctcacaacagaggttcacctccggtgcctggcggaccacgacagccctctccaggcccgactccccctcccttcccagggaatagagggactgccttaggggggggttctataagacagtctccccttagctcctcaagccctttcagcaaccgacctcccctgccccctacacctagtagggccctggacgacaagccacctcctcctcccccacccgtgggaaatcggccttccattcatagggaggcggtaccaccccctcctcctcaaaacaacaagccacctgtaccaagtacaccaagaccttcagccagctctcaggccccaccaccgcctcccccaccttcacgccccgggccccctccgctgcccccttcctctagtggaaacgatgagaccccaagattaccacagaggaatcttagtcttagctcatcaacccctcccctcccctcccctggcagatctgggccactgccaccccctccatctgagagacctcctccccccgtcagagaccctcccggccgctccggcccgctgccccctccacctcctgtgtctagaaacggaagcaccagccgcgcactacccgctaccccgcagctgcccagtcggtccggggttgattcccccagaagcggcccccgtcccccactaccgcccgaccggcctagcgctggcgcaccccccccaccaccaccgtcaaccagcatcagaaacggatttcaggattctccatgcgaggatgaatgggaaagtaggttttattttcaccccatatctgaccttcctccccccgaaccctatgtacagactactaagagttacccaagtaaattagcccggaacgagagcagaagtggtagcaaccgaagagagcgcggagcaccgccactcccccccataccacgacccccaaagcaggcagctgagtag

SEQ ID NO: 138016 - DNA, 1512 bp, Artificial Sequence
  derived and/or modified sequence
atgcccgtgccccccccccccgcccccccccccccccccaccttcgcactagccaatactgagaagccgactctcaacaaaacagagcaggccggacggaatgctctcctgagcgacatttccaaagggaagaagctgaaaaagactgtaactaacgaccgctcagcccccattcttgataagccaaaaggcgccggcgcaggaggaggggggggaggattcggcgggggaggcggcttcggagggggcggcggggggggcggcggcggatcgttcggcggtggggggccgcccggtcttggggggctgttccaggccggcatgcctaagctgcgaagcactgccaatagagataatgactcaggcggaagtcgacccccattgctaccacctggcggaagatcgacaagtgcaaagcccttctccccaccctctggcccaggaaggttccctgtgccctcacccgggcatcggtcaggtcctcctgagccgcagcgtaaccggatgcccccaccacgtccagacgtcggatcaaagcccgacagtatccccccgcccgtgcccagtaccccgagacccatacagtccagtccgcacaatcggggctcacctcccgtgcccggtggtccacgccagccgagccctggcccgacccccccgccatttccaggcaatcgcggaacagcactcgggggaggaagcattcggcaaagcccactgagtagctctagcccattttccaatcgccctccgctgccccctaccccatctcgcgctctggacgataaacctccaccccctccacccccggtcggaaaccgaccctctatccatcgggaagcggtacctcccccacctccacagaataacaagccccccgtgccttccacaccaaggccaagtgcatcaagccaagcaccacctccacctccacctccttcccgacctggtccacccccgctaccaccatccagtagcgggaacgatgagaccccacggctgcctcaacggaatctgtctctgagcagctcaacacccccacttcctagtccaggtaggagtggacccctaccccctcctcctagcgagagacctcccccaccagtgcgggatccacctggcaggagtgggcctctgccacccccccccccagtgagccgaaacggctctacttcacgcgcattgccggctacaccccaactcccctctcggagcggggtggatagcccgagaagtggtccacggcccccactccctcctgacagaccatctgccggagccccacccccgcccccccccagcacaagcattagaaatgggttccaggattccccttgcgaggatgagtgggagtcacgtttttacttccaccctatttccgacctgcctccacctgagccctatgtccagaccacaaagagctaccctagtaagcttgccaggaatgagagtaggtccggctctaatcgcagagaacgcggggctccccccctcccaccgatccctaggtag

SEQ ID NO: 138017 - DNA, 1512 bp, Artificial Sequence
  derived and/or modified sequence
atgcccgtgccccccccccccgcccccccccccccccccaccttcgctttggcaaacaccgaaaaaccaaccttaaataagactgaacaagctggtcgaaatgcactgttaagcgatatttctaaaggaaagaagctgaagaagactgtgactaatgaccgctccgccccaatacttgataaacctaagggtgcaggcgcaggcggaggcggtgggggatttggcggcgggggcggattcggcggaggcggtgggggcggaggcgggggctccttcggcggagggggcccgcctggcttgggaggactattccaagcgggcatgcccaagctaaggtcaacagcaaaccgtgataacgatagtggcggtagcagaccaccactgctccctcctggtggacggtcaacctccgccaagccattcagtcccccctccggccccggccgatttcccgtccccagccctggccatcgatcaggacctccggaacctcagaggaaccgaatgccacctcctcggcctgatgttgggagcaaacctgactccattcccccccctgtgccatccactccacgcccaatccagtccagcccgcacaatcggggatcacctcccgtgccgggcgggccccgccagcctagccctgggccaaccccccccccctttcctggcaatagaggcacagctttaggaggtggaagtattaggcagtcgcccctgagtagctccagtccatttagtaaccgcccacctctgccccccaccccgtcccgggccttagatgacaaaccccctcctccacctcccccagtagggaaccggccgtctatacatagggaggcggtccctccgcctccacctcagaataacaaacctccggtgcccagtacccctaggccttctgcctccagtcaggctcctccacccccaccaccacctagccgaccagggccacctccactaccaccatctagttcaggaaatgacgagacaccccgacttcctcagcggaacctttcactgtcctcctctaccccccccctgcccagccccgggcgtagtggccctctgcctccacctccctccgagcgacctcctccacccgtgagggatcctcctggtcgcagtggacccctacctccccctcccccggtttctcgcaatggttccaccagtcgcgcgctgccagccaccccccagctgcccagccgaagcggcgtggattctccaaggagcggacctcgaccacccctgcccccggaccgtccaagcgccggagccccgcctccaccaccaccttccacttccatccgaaatggattccaggactcaccctgcgaagacgagtgggaatcccgcttctatttccaccccatatcagatctgccgccccctgagccctacgtccagacaacaaagagctacccctctaagttagcacgcaatgaatctagaagcggctccaatcggagggaacgcggggcccctccattgccaccaatcccacgttag

SEQ ID NO: 138018 - DNA, 1512 bp, Artificial Sequence
  derived and/or modified sequence
atgcccgtgccccccccccccgcccccccccccccccccaccttcgcacttgctaatactgagaaaccaacactgaacaaaacagaacaggcaggaagaaacgcgctcctatccgatatatccaaagggaaaaagctaaagaagacggttaccaatgatcgctccgcgcccatactcgacaagcctaaaggagctggagcgggcggaggaggaggtgggtttggggggggaggggggtttgggggcggtggcggcggcggtgggggtggcagttttggtggggggggcccacctggactgggcggactgtttcaggcgggcatgccgaaattacgctctaccgctaaccgagacaatgacagcggaggctctagaccgcctctgctccctcccgggggcaggtccacatcagccaagccattttctccgccaagtggacccggacgatttcccgtaccgtctccaggccaccgctcaggaccccccgaaccccagcgtaacaggatgccccctccccgccccgacgttggctctaaacctgacagtataccacctcctgtaccatccacccccagacctatccaatcgtctcctcataataggggcagtcctcctgtccctggcggtccacgacaaccttcacccggtcctacaccccccccgtttccagggaaccggggaaccgcactgggtggtgggtctattagacagtccccactgtcatccagctctccctttagcaataggccccctctgccccccactccaagccgcgcccttgacgataagccacctcctccaccgccgccagtggggaaccgacccagtattcaccgcgaggcagtaccaccccctcccccccagaataataagccccccgtgccgagcacaccacgtccaagcgcaagctctcaggccccccctcctcccccgccaccttccaggcccggaccacctcccctgcctcctagctcgagcgggaatgatgaaaccccgcgactcccccaaaggaacctgtccttatccagcagcacccctccactccccagtccaggccgctccggcccattaccacctcctccaagcgagcgaccccctccaccagtccgtgacccccccggcagaagcggccctcttccccctcctccacccgtgagccgtaatggttccacgagccgagcccttccagcaacaccacagctcccaagccggtcaggcgttgactcacctagatcaggaccgcgcccccctctgcctccagaccggccctcagcaggcgcaccccctcccccacccccctccacaagcatcaggaatggattccaggattctccctgcgaggatgaatgggagtctcgcttctacttccatcctatcagcgatttgccacctccagagccctacgttcaaacaactaagtcttaccccagtaagctggcgaggaacgaaagccgctccggctccaaccggagagagcgcggagcccctccactcccccccattcccaggtag

SEQ ID NO: 138019 - DNA, 1080 bp, Artificial Sequence
  derived and/or modified sequence
atgcccgtgccccccccccccgcccccccccccccccccaccttcgccctggcgaataccgagaagcctacactgaacaaaacagagcaggccggacgcaatgcattactctcggatatatcaaagggtaagaagttgaagaaaaccgttacaaacgaccgcagcgcgcctattctggacaaaccaaaaggggctggcgctggtggtggcggcgggggcttcgggggtggtggcggatttggtggcggcgggggcggtggaggcgggggcagtttcgggggggggggccctcctgggttgggtggactgttccaggctggaatgccgaagctgcgcagcactgcaaaccgcgataacgacagtgggggttcacgacctccgctgctgcctcccggaggccgctcaacaagtgcaaagccattcagccctcccagcggacctggaaggttccccgtgcctagtcctggacatcggtccgggccacccgagccacagaggaaccgaatgccacccccacgtcccgacgtggggagtaagcctgattccattcctccacccgtcccaagcactccaagacccatccagtcttccccacataatagaggctcccctcccgtccctggcggcccacgccagccaagcccaggcccaactccgccacctcctcccccagtacgcgatcccccagggcgtagcggccccctgccaccaccacctcccgtgagccggaatggcagcacctcaagggcccttcccgctacccctcaactgccctcaaggagcggagtcgattcccctcgttctggcccaagaccacccttgcctcccgaccggccatctgccggagctcctcctccacctcccccaagtacgtccatcagaaacggattccaggattccccatgcgaggacgagtgggaatcacgtttttactttcatcctatctccgaccttccacctcccgagccatatgtccaaaccaccaaaagttatccaagcaaacttgctcgaaacgagagtcggagcggatcaaatagacgggagagaggagctcctccattgccccctatcccccgctag

SEQ ID NO: 138020 - DNA, 1482 bp, Artificial Sequence
  derived and/or modified sequence
atgcccgtgccccccccccccgcccccccccccccccccaccttcgctctggccaatacagaaaaaccaaccctaaataaaaccgagcaagccggccgcaacgccctccttagtgacatttccaagggcaagaaactgaagaaaacagtgaccaatgaccgcagtgccccaattctggacaagccgaagggagcgggcgccggagggggaggagggggcttcggtggagggggagggttcggcggcggaggagggggggggggcggaggaagcttcggcggtggcgggccccccgggcttggtggactctttcaggccggcatgccaaaactccggtcgaccgcgaacagggacaacgattctggaggatccaggccaccgctattgcccccgggcggacgttcaacttcggctaagccgtttagtccaccttccggccctggacgattccccgttccgtcgccgggccataggagtggacctccagagccacagaggaataggatgcctcctcctaggcctgacgtgggctcgaagcctgacagcataccccccccagtgcccagtaccccccgccccattcagagttctccccacaaccgggggagcccaccagttccgggaggacccagacagccatcgcccgggccaacaccgccgccttttcctgggaaccgcggcaccgccctgggaggtggctccattaggcagtcccccctgagctcttcctcccctttcagcaaccgcccgccgctgcctccgaccccttctcgagcattagatgacaagcccccacccccgcctcctccggtgggaaaccggccttccatccaccgggaagccgttcccccccctcctcctcagaacaataaaccacccgtgccaagtacccctaggccgtcagcatcgtcacaggccccacctccacctccgcctccgtcccggcctgggcctccccccctgcctcccagcagttcaggaaatgacgaaaccccccgtttaccacagcgcaacctcagcctcagctcatcaaccccccccctgcccagccctggaagatcggggccacttccacctcctccatctgagaggcctccaccacctgtgcgcgatccccccggcagatcagggcctctgccccccccaccacctgttagtagaaacgggtccacctcacgcgccctcccagctacaccccagctgccgagccgatcaggcgttgattctccacgtagcggtcctagacctccattgccgcccgataggcccagcgccggcgctccgccccctcctcctccttcgacatcgatccgaaacggctttcaggatagcccatgcgaggatgagtgggaaagtagattctactttcacccaatatcagacctgccccctccagagccctacgttcaaactaccaagtcgtatccaagcaagctggccaggaacgagtctaggagcgaatacttctgccaaggcttttag

SEQ ID NO: 138021 - DNA, 303 bp, Artificial Sequence
  derived and/or modified sequence
atgcccgtgccccccccccccgcccccccccccccccccaccttcgctctggcaaatactgagaagccaactctgaacaagactgagcaagctggccggaatgcactcctgtctgacatcagcaaaggaaaaaaactcaagaagaccgtaacaaacgaccgtagcgcccctatcctcgacaagccgaaaggtgctggggccgggggcggcggcggcggatttggggggggtggcggctttggcgggggcgggggcggcggcggcggtggatcctttggggggggggggccaccaggcctgtag

SEQ ID NO: 138022 - DNA, 1533 bp, Artificial Sequence
  derived and/or modified sequence
atgcccgtccccccaccccctgcccctcctccgcctccaaccttcgcactcgcaaacacggagaagccaaccctgaataaaacggagcaggcaggaagaaacgccctactgtccgacatttccaaagggaagaaactgaaaaaaactgtgaccaatgaccgtagcgcgcctatcctggataagcctaaaggtgcaggagcaggcggtggcggtggtggctttggaggtgggggaggcttcgggggagggggaggcggaggcggaggtggctctttcgggggtggcggaccacctgggctaggtggacttttccaggctggaatgcccaagcttagaagtactgcaaatcgcgacaatgatagtggaggctcaagaccaccactgttgccaccgggtggtagaagcacttctgccaaacccttcagtccaccgtccggccctggacgatttcctgtgccgtccccgggtcaccgttcaggcccacccgagcctcagcgcaatcgcatgcctcccccacggccagatgtcggaagcaaaccagacagtattcccccaccagtcccatctacccctaggcctattcagtcaagcccacacaataggggatcccctcctgtccccggaggtcccaggcaaccttcgccgggaccaactccacctcctttccctgggaaccgtggcaccgccctgggcggaggctccatccggcagagccccctcagcagcagctctcccttttcaaatcgccctcccctgcccccaacacctagtcgagctctagacgataagcctccgccaccacctccaccagtggggaaccgcccttctatccaccgagaggccgttcctccaccacctccgcagaacaataagcctccagtgccatccacaccccgtcccagcgcatcttcacaagctccaccaccgccacctcctccctcacgcccaggcccacctcctctaccaccctcgagcagcggcaacgatgaaactccaaggctgccccagagaaatctatccctctcatcctccacaccccctctccctagtccaggacgctcgggacccttacctccaccacccagcgagagacctccccctccagtccgcgacccacccggaagatctggtccccttccccctccccctccagtgagtaggaatggatcaacaagtcgcgctctgcctgcgaccccccagctgccaagtcggtctggagttgattcacctcggtccggaccgcgaccacccctcccaccagacaggccatccgcaggcgcaccgccaccgcctccgccttctacctccatcaggaacggatttcaggacagtccctgtgaagatgagtgggagtctcgcttctactttcatcccattagcgaccttccgccacctgagccttatgttcaaactacgaagtcctatcccagtaagttggcccgaaacgagtcacgttcagggtccaatcgcagggaaaggggggctcctcctcttcctccaattcctcgtcctcccaagcaagccgcagaatag

SEQ ID NO: 138023 - DNA, 1512 bp, Artificial Sequence
  derived and/or modified sequence
atgcctgtgcctccacccccagctccccctccaccccctacattcgcattggctaacaccgaaaaacctacgctcaacaagaccgaacaggctgggcgaaatgccctgctgagtgacatatccaagggaaaaaaactgaagaagactgtgacgaacgatcgatcggcccctattctggacaagcccaagggggctggagccggaggaggagggggagggttcggcggaggtggcggatttggcggaggtgggggaggaggcggaggtggtagcttcggaggaggcggaccaccaggcctgggaggcttgttccaggccggaatgcctaaactgaggtcaactgccaaccgggacaatgactcaggaggatctaggcccccattgctgccccctggcggaaggagtacctccgccaagcccttctctccaccgtcaggtccagggaggtttcctgtgccgtcccccggtcacaggtctggacccccagagccccagcgcaacagaatgccacctcccagaccagatgtaggctccaagcccgacagcattcctccacctgtaccctcgacaccaaggcccatccaaagttcgcctcacaatcgtggctcacctcctgtgcccggaggtcccagacagcccagcccaggtcctacaccgccaccatttccaggaaatcgaggaactgccctgggagggggttccataaggcagagtcccttgtcctcaagctcgcctttttccaatcggcctcccctcccaccaacccctagccgcgcactcgatgacaaaccgcctcctccgccacctcctgtgggaaatagaccatccatccacagagaagccgttcctcctccccctccccaaaacaataagccacctgtacccagcactcctaggccatctgcctcttcacaggcgccacctcctccccctccaccatcgcggccaggcccacccccacttcccccttcatcttccggaaatgatgaaacccctagattaccccaaaggaatctgtcacttagttcaagtaccccgccattgccttctcccggtaggagtgggcctctccccccaccaccctccgaacgcccaccaccccctgtcagagatccgcctgggagatcgggacctctgccaccgccacctcccgtctcaagaaacgggtctacttctcgggctttgcccgctacacctcagctgccctcgcggtcaggcgtggactccccaagatcaggaccaaggccaccgcttccccctgaccggccaagcgccggagccccacctccacccccaccatcaacatcaattcggaatggattccaggatagtccatgcgaggatgagtgggaaagtcgattttacttccacccaatttccgaccttcccccacccgagccttacgttcaaaccacaaagagttatcctagtaagttggcgaggaatgagagtagatcgggtagcaacaggcgtgagagaggcgctccacctctgcctcctatcccaagatag

SEQ ID NO: 138024 - DNA, 1512 bp, Artificial Sequence
  derived and/or modified sequence
atgccagtaccccctcctccagcacctccccctcctcccactttcgcactggctaatacagaaaaacccactctcaacaaaacagaacaggctgggcgaaatgctctgctgagtgatatcagcaagggcaaaaaactcaagaaaactgtgacgaatgaccgtagtgccccaatactggacaaacccaaaggagctggggcaggagggggaggtggcggatttggcggaggcggtggcttcgggggtggaggcggtggaggtgggggtggcagttttggcggaggcggacctcctggacttggtggactgttccaggccggtatgcctaagcttcggagcacagctaatcgggacaacgattctggcggatccagacctccccttctgccaccagggggtaggtcaactagcgccaaacctttttcacccccttccgggcctggcaggtttcccgtgccgtcgcctggacatcgctcaggaccccctgaaccccaaaggaaccgcatgccgccaccccgtcccgacgtgggaagcaaaccagacagcatcccaccccctgtcccaagcacccccagaccaattcagagctctccacataaccgtggaagcccaccagtgcccggtggcccacgtcagcccagtcccggtcctacaccaccacctttccctggcaataggggtaccgcccttggcggagggagcatacgccaatcacccctgagcagttccagtcccttctcaaacaggccacccttaccacccaccccaagtagagctctggacgataaaccccctccccctccccctcctgtcggtaacagaccttctattcaccgcgaggcagtgcccccaccccctccccagaacaacaagccacccgtcccttctactccccgacctagtgcttcatcacaagccccacccccaccccctccaccctctcggcctggtcctcctcctctcccccctagttcatcgggcaatgacgagacgcctaggctgccacaacgtaatctttcacttagctcatccaccccgccattgccctccccagggagatccggccctctccctcccccacccagtgagcggcctccccctccagtaagggaccctcccggtaggtctggacccttaccacctccccctcctgtaagcagaaacggttccaccagccgggctctgccagccaccccacagctgccctcacgaagcggagtggattccccacggtctggaccccgaccgcctttgccacccgaccggccttccgcaggtgctcccccacccccacctccctccacttccattaggaacggtttccaagacagtccttgcgaagacgaatgggagtccagattttacttccaccccattagcgacctcccaccacccgagccttatgtacagacgactaagtcttatccgagtaaactggcacgcaacgaaagccgaagcggctctaatcgtcgcgaaaggggagcgccacctcttccccctattccaagatag

SEQ ID NO: 138025 - DNA, 1512 bp, Artificial Sequence
  derived and/or modified sequence
atgccggtgccgcctccacccgctccacctccacccccaacatttgctcttgcgaacaccgagaagccaaccctgaataagaccgagcaagcaggaaggaacgccctactgagcgacataagtaagggcaaaaaacttaaaaaaactgttaccaacgatagaagcgccccaatccttgacaagcccaagggcgcaggcgctgggggtggcggtggaggatttggtggtgggggaggttttgggggtgggggagggggtgggggtggtggatcttttggtggcggaggcccacccggtctggggggtctgtttcaagctggaatgccaaagcttaggtctactgccaatagggacaatgacagcggaggaagtcgtcccccactgttacccccaggcggtcggtcaacttccgccaaaccgttctcacccccatctgggcctggacgctttcccgtcccctcccccggacaccgttcagggcctccagaacctcagcggaatcgaatgcctcctccccgacccgatgtcggatcaaaaccagatagtattcccccacccgtcccaagcactccacggccaattcagtcgagccctcataaccggggttctccccctgtacccggaggaccacggcagccaagccccggtcccacccccccaccatttccagggaatagaggtacagccctgggtggagggagcatccgacaatcacccctctccagctcttctccattcagcaaccgccctcccctcccaccaacccccagccgggctctggacgacaaaccgccaccccctcctccgcctgtgggaaatagaccaagcattcaccgggaggcggtacctccaccaccaccacagaacaataaacctccagtaccgtctacacccaggccaagcgcctcttcacaggcaccacccccaccccctcctccaagtagacccggtccccctccactcccacctagctccagcggtaacgatgaaacccctcgcctacctcagcgcaatctatctctttcaagcagtaccccccctctgccaagcccaggccgatcagggcctctcccgccaccccctagcgagcgacctccaccaccagtacgagaccctcccggaaggtcagggccactcccgccacctcctccagtctcacgtaacggaagcacatccagggccctccctgctacaccacagctaccctctaggtcaggagtcgatagcccccgatccgggcctcgccctcctttacctcctgatcgcccatctgcgggagctccgcctcccccacccccatccacatcaatacgtaacgggttccaggatagcccgtgcgaggacgagtgggaatcccgattttattttcacccaatatccgacctccccccacccgaaccatatgtgcaaacaacaaagagctacccaagtaagctggctaggaatgagagtaggtccggttccaatcgtcgcgaaagaggggcacctcctctgccacccattccaaggtag

SEQ ID NO: 138026 - DNA, 1080 bp, Artificial Sequence
  derived and/or modified sequence
atgccagtgccgcctccacctgcacctccacccccaccaacgttcgccctggccaataccgagaaaccaaccctgaataaaacagagcaagcgggacggaacgccttattatcagatatctcaaaggggaaaaagctcaagaaaaccgtgactaacgataggtccgccccaattctggacaaaccaaagggcgctggggctggcggaggaggtgggggattcggtggaggaggaggattcgggggagggggagggggaggtggtggcggaagtttcgggggaggtggccctcctggattaggagggctttttcaagcaggtatgcctaagcttcggtctacagcaaatcgtgacaacgacagtggagggtcacggcctcctcttttgcccccaggtggcagaagcacctccgcaaagcccttcagtccccctagcggcccaggcaggttcccagttccatcccctgggcatcgctcagggccacccgagccccagcggaaccggatgcctcccccacgaccagacgtaggtagtaagcccgacagtattccaccacctgttccctccacgccgagacccattcagtctagtccacacaatagggggtcccccccagttcccggaggccctcgacagccatcccctggcccaacacccccaccgcctccgcctgtgcgggatcctcctggacgaagcggccctcttccacctccccctccagtcagcagaaatggctccacgtcgcgcgctctgcccgcaacacctcaactgccttcccgaagtggagtggacagcccacggagtggtcctcgtcctccactgccacctgatagacctagcgcaggtgctcctccacccccacctccgagtacatccattcgcaacggcttccaagattctccctgtgaagacgaatgggagagtaggttctattttcatcccatttccgatctacctcctcccgaaccctatgtgcaaacaaccaagagttacccctccaagttggccaggaacgagtctagatctggttcaaatagaagagagagaggagccccacctcttccgcctatcccacggtag

SEQ ID NO: 138027 - DNA, 1482 bp, Artificial Sequence
  derived and/or modified sequence
atgccagtcccgccacccccagctcctccccctccccctacctttgccctggctaacactgagaaaccaacactgaacaaaacagagcaagccggacgaaatgcacttttatcagatatcagcaaagggaagaagctgaaaaagacagtgactaacgaccgctctgctcctatcttggataagcccaagggcgcaggagccggaggcggaggtgggggatttggtggcggtggagggttcggtggtggcggtggcggaggtggtggagggtcctttgggggagggggacccccaggcctgggcggactgtttcaggcaggaatgccaaagctgcgttcaaccgcaaaccgcgacaatgactccggcggttctagaccaccactgcttcctcctggaggcagatcgacatcagccaagcctttctcgccaccatccggacccggacgattccctgtacccagccccggacatcggtcagggcctcccgagccacagcgcaatcgaatgccgcctccccgtcccgatgtggggagtaaacctgactccataccacctcctgtcccttcgaccccaagaccaatccagtctagtcctcacaacagaggatcgcctccggtccctggcggacctaggcagccatctcctggtcctacacccccaccgtttcctgggaaccgaggcacagcccttggtgggggttccattagacagagccctttgtcctcgagctctcctttcagcaatagaccccctctccctcccaccccatcccgggcactggacgacaaaccccctccgccaccaccaccagtgggaaatcggccatcaatccaccgggaagccgtgccgcctcccccaccacaaaacaataagccaccagtcccatctacgccccgtccgtccgccagctcgcaggcccctcctccaccaccccctccctctcgtcctgggcctccgcctcttcctccctcatcttcgggtaatgacgaaacaccccgtttgcctcagcgcaatttatcattatcttcctcaacacctcccctgcctagcccagggagatcaggacccctgccgccacctcctagtgagagaccaccaccacctgtacgcgacccaccaggtagaagcggacccctcccaccaccaccaccggtcagtcggaacggctcaacatcccgagcactcccagcaacacctcaactaccatctcgtagcggcgtggacagtccacgctcgggccctcggccacctctgccgcctgacaggccatcggccggagcacccccacctccacccccatccaccagcatcagaaacggtttccaagattctccttgtgaagacgagtgggaatctcgattttattttcatcccattagcgatttacctccaccagagccttacgtccagaccaccaaatcatatccaagcaaactggccagaaacgagagtaggtccgaatacttttgccaagggttttag

SEQ ID NO: 138028 - DNA, 303 bp, Artificial Sequence
  derived and/or modified sequence
atgcctgtgccccctcccccagctcccccaccacctccaacatttgctctcgctaacactgaaaaaccaaccttaaacaaaactgaacaggctggacgtaatgccctcctgtctgacatctctaagggaaaaaaattaaagaaaacagttacaaacgatcggagcgccccaattctcgacaaacccaaaggcgcaggcgctggtggcggtggtgggggtttcgggggtggcggtggattcggaggaggcggagggggtggaggcggagggtcattcggcggtgggggaccaccaggactatag

SEQ ID NO: 138029 - DNA, 3028 bp, Artificial Sequence
  derived and/or modified sequence
gcagcctcccggcgctgagcgcttttcctgcccgcccggctcagccctgcggaccccgggagaagtttcccagaaaaaatgcccagcgcggcgcggggctgcggagtcgtccggagccgctgcgcgatttatcagcaagactgttgaacgcataactgcccaagatgcctgtccctccccctccagcacccccgccgcccccgacgtttgcactggccaatacagagaagcctaccttgaataagacagagcaggctgggagaaatgctctcctttctgatatcagcaaagggaagaaactaaagaagacggtcaccaatgacagaagtgcaccaatactggacaaacctaaaggagctggtgctggaggcggtggtggtggctttggtggaggcggcggatttggcggaggaggtggtggcggaggcggtggaagttttggagggggcggacctccaggtctgggaggattgttccaggctggaatgccgaagctgagatccacggccaacagggataatgattctggaggaagccgaccaccattgttgccaccgggaggaagatccacatctgcgaaacccttttcacccccaagtggcccagggaggtttcctgtgccttctccaggccacagaagtggtcccccagagcctcagaggaaccgaatgccgcccccaaggcccgacgtgggctcaaagcctgatagcattcctcctccagtacctagtactccaagacccattcaatcaagtccgcacaaccgggggtccccaccagtgcccggaggccccaggcagcccagccccgggcccactcctccccctttccctggaaaccgcggcactgctttgggaggaggctcaatacgtcagtcccccttgagctcctcctcgcccttctccaaccggcctcccctgccgcctacccccagcagggccttggatgacaaaccccctccaccacctcctccagtgggcaacaggccctccatccacagggaagcggttccccctcctcctcctcagaacaacaagcctccagtgccttccactccgcggccttcggcctcctcacaggccccacctccgccgccacctcccagcaggcccgggccgcctcctctgcctccaagttccagcggcaatgacgaaaccccaagactcccacagcggaatctgtccctcagttcgtccacgcccccgttaccttcgccaggacgttcaggtcctcttcctcccccgcccagtgagagacccccacctccagtgagggacccgccaggccgatcaggccccctcccaccacctcctccagtaagcagaaacggcagcacatctcgggccctgcctgctacccctcagttgccatccaggagtggagtagacagtcccaggagtggacccaggcctccccttcctcctgataggcccagtgctggggcacctcccccacctccaccatcaacatctattagaaatggcttccaagactctccatgtgaagatgagtgggaaagcagattctacttccatccgatttccgatttgccacctccagagccatatgtacaaacgaccaaaagttatcccagcaaactggcaagaaacgaaagccggagtggatccaaccgaagagaaaggggtgctccaccactccctcccatcccgagaccacctaagcaagctgctgagtaagggctcactggaaacttgcagtcacaggatgtccaatctttggcagtccgagcttggctctaggacagagctgtccaatagaaatataatgtgagccccatatacaatttttacatttctaatatattttaaacaagtgaagttaatatgcatccaaaatatttcaacctgtaatcaacataaaattttaatgagatattttatattattttttggtactgaatcttcaaaatccagagtgtattttacacttaccgcacatctccattcagactagtcacatttttaagtgctcagtagccacatgtggctggtggctactggattagacagcacgagtctggaagatggaagctagtgcagaaacctcttgtttaaaaaacaaaaaaggcaagatgggcttgagcgattcaagaggcaactaaaaataaaattaggacccagcaccttgtttgacacacagtttgaccttcgattttcctcccttaacttccctcttcccttaatatctgtatacaagtgttgcttcaaagtaccaaggtcagaaattgattgagtacggtttactaaagtcatgtggaataaagccattggaaacaaatggaaagcctgtcgggacttctgggctcagaaccagctggctcacgcactccacttgtcagctggacttctgccttgtgaaatggaagcagcctttgttcctttctggctgagcaagctcctgaggctgggagagactaggaaggcttggtaggaggggaaaaaagtcaggaaaatatatcaaatcagaaacatggaagaagaagggaaccgatttgagttggtgggcaaaactctaaaaatctaaatctgatgcttatgtaagggttgagcgaattagggagattgctagtggaaattggagggaatttgttttgcatcatttgtctaggatctatgcaaatatagctccactaaaggaccatagggaagagccagccttgccttttcttatatgattttgtttacaaaattttactgggacttttaaatctagctatagagttgggaaaaaatatttccacttagatattttacatggttttgtttaaaattaccattacttgttttttaaaaacacatgaccacatatgtatatgtatatctacctaaacattgtatcatggtttcagtatgttattcatgtattactgggagatgctaccaagaaaccaacccaaagaaaattctgaaaaatacatttctatttatagaataaatgtttcatttatataaaagcaaaagaacttagagttctaataaatgggatgtctaataaattatgaagttac

SEQ ID NO: 138030 - DNA, 2003 bp, Artificial Sequence
  derived and/or modified sequence
gagcgcttttcctgcccgcccggctcagccctgcggaccccgggagaagtttcccagaaaaaatgcccagcgcggcgcggggctgcggagtcgtccggagccgctgcgcgatttatcagcaagactgttgaacgcataactgcccaagatgcctgtccctccccctccagcacccccgccgcccccgacgtttgcactggccaatacagagaagcctaccttgaataagacagagcaggctgggagaaatgctctcctttctgatatcagcaaagggaagaaactaaagaagacggtcaccaatgacagaagtgcaccaatactggacaaacctaaaggagctggtgctggaggcggtggtggtggctttggtggaggcggcggatttggcggaggaggtggtggcggaggcggtggaagttttggagggggcggacctccaggtctgggaggattgttccaggctggaatgccgaagctgagatccacggccaacagggataatgattctggaggaagccgaccaccattgttgccaccgggaggaagatccacatctgcgaaacccttttcacccccaagtggcccagggaggtttcctgtgccttctccaggccacagaagtggtcccccagagcctcagaggaaccgaatgccgcccccaaggcccgacgtgggctcaaagcctgatagcattcctcctccagtacctagtactccaagacccattcaatcaagtccgcacaaccgggggtccccaccagtgcccggaggccccaggcagcccagccccgggcccactcctccccctttccctggaaaccgcggcactgctttgggaggaggctcaatacgtcagtcccccttgagctcctcctcgcccttctccaaccggcctcccctgccgcctacccccagcagggccttggatgacaaaccccctccaccacctcctccagtgggcaacaggccctccatccacagggaagcggttccccctcctcctcctcagaacaacaagcctccagtgccttccactccgcggccttcggcctcctcacaggccccacctccgccgccacctcccagcaggcccgggccgcctcctctgcctccaagttccagcggcaatgacgaaaccccaagactcccacagcggaatctgtccctcagttcgtccacgcccccgttaccttcgccaggacgttcaggtcctcttcctcccccgcccagtgagagacccccacctccagtgagggacccgccaggccgatcaggccccctcccaccacctcctccagtaagcagaaacggcagcacatctcgggccctgcctgctacccctcagttgccatccaggagtggagtagacagtcccaggagtggacccaggcctccccttcctcctgataggcccagtgctggggcacctcccccacctccaccatcaacatctattagaaatggcttccaagactctccatgtgaagatgagtgggaaagcagattctacttccatccgatttccgatttgccacctccagagccatatgtacaaacgaccaaaagttatcccagcaaactggcaagaaacgaaagccggagtggatccaaccgaagagaaaggggtgctccaccactccctcccatcccgaggtgatctttgcctgctcttctctacccaagctcaagagctgcttctgttgctatctaagaactgcataccctcctccctgcttcttcccttgtgcctcatgtatgggcaggaggaaaggtgggagggggagtgggaatatgcgtgtgtgggtgggaatcggtaagaaatgcacctagcttttcatattgtgtttattctccaggctattgcttgcttcagctgcagcctgcctgtgctggctgctggggtcgataggcttttgtcgtaataggcagagatgacttgcatcccagctttccaccaaccaaattcaaacattcactgcttatttgttacagactgtaat

SEQ ID NO: 138031 - DNA, 2180 bp, Artificial Sequence
  derived and/or modified sequence
gaagaagcccttagcctaatgaagcgataaggtaagcaaaggaggaaggaacaacaaacaacaaattaatcagacaggaagcgaataaccacagaaggacgtctgcctctgactcagtatgtcacatttaacaagaggccagagcttgtccaaaatggctgtccaaaaacgaccccacacttgcgttagaagatgatacctttttcagggacagttttctctcttggctcctgtcccgctggccctctgtctgcctgtgtccctgaccatggctccctgcagtaccctttaacgatttatcagcaagactgttgaacgcataactgcccaagatgcctgtccctccccctccagcacccccgccgcccccgacgtttgcactggccaatacagagaagcctaccttgaataagacagagcaggctgggagaaatgctctcctttctgatatcagcaaagggaagaaactaaagaagacggtcaccaatgacagaagtgcaccaatactggacaaacctaaaggagctggtgctggaggcggtggtggtggctttggtggaggcggcggatttggcggaggaggtggtggcggaggcggtggaagttttggagggggcggacctccaggtctgggaggattgttccaggctggaatgccgaagctgagatccacggccaacagggataatgattctggaggaagccgaccaccattgttgccaccgggaggaagatccacatctgcgaaacccttttcacccccaagtggcccagggaggtttcctgtgccttctccaggccacagaagtggtcccccagagcctcagaggaaccgaatgccgcccccaaggcccgacgtgggctcaaagcctgatagcattcctcctccagtacctagtactccaagacccattcaatcaagtccgcacaaccgggggtccccaccagtgcccggaggccccaggcagcccagccccgggcccactcctccccctttccctggaaaccgcggcactgctttgggaggaggctcaatacgtcagtcccccttgagctcctcctcgcccttctccaaccggcctcccctgccgcctacccccagcagggccttggatgacaaaccccctccaccacctcctccagtgggcaacaggccctccatccacagggaagcggttccccctcctcctcctcagaacaacaagcctccagtgccttccactccgcggccttcggcctcctcacaggccccacctccgccgccacctcccagcaggcccgggccgcctcctctgcctccaagttccagcggcaatgacgaaaccccaagactcccacagcggaatctgtccctcagttcgtccacgcccccgttaccttcgccaggacgttcaggtcctcttcctcccccgcccagtgagagacccccacctccagtgagggacccgccaggccgatcaggccccctcccaccacctcctccagtaagcagaaacggcagcacatctcgggccctgcctgctacccctcagttgccatccaggagtggagtagacagtcccaggagtggacccaggcctccccttcctcctgataggcccagtgctggggcacctcccccacctccaccatcaacatctattagaaatggcttccaagactctccatgtgaagatgagtgggaaagcagattctacttccatccgatttccgatttgccacctccagagccatatgtacaaacgaccaaaagttatcccagcaaactggcaagaaacgaaagccggagtggatccaaccgaagagaaaggggtgctccaccactccctcccatcccgaggtgatctttgcctgctcttctctacccaagctcaagagctgcttctgttgctatctaagaactgcataccctcctccctgcttcttcccttgtgcctcatgtatgggcaggaggaaaggtgggagggggagtgggaatatgcgtgtgtgggtgggaatcggtaagaaatgcacctagcttttcatattgtgtttattctccaggctattgcttgcttcagctgcagcctgcctgtgctggctgctggggtcgataggcttttgtcgtaataggcagagatgacttgcatcccagctttccaccaaccaaattcaaacattcactgcttatttgttacaga

SEQ ID NO: 138032 - DNA, 4587 bp, Artificial Sequence
  derived and/or modified sequence
ggctagaagacagcaggggaactcgagaagttggttgttttcagcagattaaaacaatacagatttatcagcaagactgttgaacgcataactgcccaagatgcctgtccctccccctccagcacccccgccgcccccgacgtttgcactggccaatacagagaagcctaccttgaataagacagagcaggctgggagaaatgctctcctttctgatatcagcaaagggaagaaactaaagaagacggtcaccaatgacagaagtgcaccaatactggacaaacctaaaggagctggtgctggaggcggtggtggtggctttggtggaggcggcggatttggcggaggaggtggtggcggaggcggtggaagttttggagggggcggacctccaggtctgggaggattgttccaggctggaatgccgaagctgagatccacggccaacagggataatgattctggaggaagccgaccaccattgttgccaccgggaggaagatccacatctgcgaaacccttttcacccccaagtggcccagggaggtttcctgtgccttctccaggccacagaagtggtcccccagagcctcagaggaaccgaatgccgcccccaaggcccgacgtgggctcaaagcctgatagcattcctcctccagtacctagtactccaagacccattcaatcaagtccgcacaaccgggggtccccaccagtgcccggaggccccaggcagcccagccccgggcccactcctccccctttccctggaaaccgcggcactgctttgggaggaggctcaatacgtcagtcccccttgagctcctcctcgcccttctccaaccggcctcccctgccgcctacccccagcagggccttggatgacaaaccccctccaccacctcctccagtgggcaacaggccctccatccacagggaagcggttccccctcctcctcctcagaacaacaagcctccagtgccttccactccgcggccttcggcctcctcacaggccccacctccgccgccacctcccagcaggcccgggccgcctcctctgcctccaagttccagcggcaatgacgaaaccccaagactcccacagcggaatctgtccctcagttcgtccacgcccccgttaccttcgccaggacgttcaggtcctcttcctcccccgcccagtgagagacccccacctccagtgagggacccgccaggccgatcaggccccctcccaccacctcctccagtaagcagaaacggcagcacatctcgggccctgcctgctacccctcagttgccatccaggagtggagtagacagtcccaggagtggacccaggcctccccttcctcctgataggcccagtgctggggcacctcccccacctccaccatcaacatctattagaaatggcttccaagactctccatgtgaagatgagtgggaaagcagattctacttccatccgatttccgatttgccacctccagagccatatgtacaaacgaccaaaagttatcccagcaaactggcaagaaacgaaagccggagtggatccaaccgaagagaaaggggtgctccaccactccctcccatcccgaggtgatctttgcctgctcttctctacccaagctcaagagctgcttctgttgctatctaagaactgcataccctcctccctgcttcttcccttgtgcctcatgtatgggcaggaggaaaggtgggagggggagtgggaatatgcgtgtgtgggtgggaatcggtaagaaatgcacctagcttttcatattgtgtttattctccaggctattgcttgcttcagctgcagcctgcctgtgctggctgctggggtcgataggcttttgtcgtaataggcagagatgacttgcatcccagctttccaccaaccaaattcaaacattcactgcttatttgttacagactgtaattattaaagtccctgagagctgttttctcccgttcctttttcgcatgcttggcctcctctctgtttctatgaaccacagaccacctaagcaagctgctgagtaagggctcactggaaacttgcagtcacaggatgtccaatctttggcagtccgagcttggctctaggacagagctgtccaatagaaatataatgtgagccccatatacaatttttacatttctaatatattttaaacaagtgaagttaatatgcatccaaaatatttcaacctgtaatcaacataaaattttaatgagatattttatattattttttggtactgaatcttcaaaatccagagtgtattttacacttaccgcacatctccattcagactagtcacatttttaagtgctcagtagccacatgtggctggtggctactggattagacagcacgagtctggaagatggaagctagtgcagaaacctcttgtttaaaaaacaaaaaaggcaagatgggcttgagcgattcaagaggcaactaaaaataaaattaggacccagcaccttgtttgacacacagtttgaccttcgattttcctcccttaacttccctcttcccttaatatctgtatacaagtgttgcttcaaagtaccaaggtcagaaattgattgagtacggtttactaaagtcatgtggaataaagccattggaaacaaatggaaagcctgtcgggacttctgggctcagaaccagctggctcacgcactccacttgtcagctggacttctgccttgtgaaatggaagcagcctttgttcctttctggctgagcaagctcctgaggctgggagagactaggaaggcttggtaggaggggaaaaaagtcaggaaaatatatcaaatcagaaacatggaagaagaagggaaccgatttgagttggtgggcaaaactctaaaaatctaaatctgatgcttatgtaagggttgagcgaattagggagattgctagtggaaattggagggaatttgttttgcatcatttgtctaggatctatgcaaatatagctccactaaaggaccatagggaagagccagccttgccttttcttatatgattttgtttacaaaattttactgggacttttaaatctagctatagagttgggaaaaaatatttccacttagatattttacatggttttgtttaaaattaccattacttgttttttaaaaacacatgaccacatatgtatatgtatatctacctaaacattgtatcatggtttcagtatgttattcatgtattactgggagatgctaccaagaaaccaacccaaagaaaattctgaaaaatacatttctatttatagaataaatgtttcatttatataaaagcaaaagaacttagagttctaataaatgggatgtctaataaattatgaagttactgatttgaatatattatatttctataacttccttgccaaagtcctgatttagtacattagagaacctgtgtttcctctctcctctaccattcatctctcttccatacagtcatttgggctttttactcaaagagaatcaagaaataataaggtataacaagcttggcaaagtgttggctttttaaaaaaaaatttttttaatctctagcagtttggtaatttagcagcatcatttatttgggattcttttatctgatttcaacagtgaaaaacatccctatgataaagcctaatgacccatttcacaaaagatggaatttgcccttcctagaaaatatgacggagaaaagtctgactcagagaaagtgggtctgaattttataaggggtagtaagaattggacaattcctttgcatatctgaacttggcaggtaccgttctaaatctgaaacagggtgatagctcaaagttgccattcatccagaatagattgttttagaatgtagtgtttaagtgactgtttcattaatacacctacaccctttctttgaaagtttgcaacctaattgcatctaaaactatgaataagttctgtggtaaaatcttaaactatggaaaattacaaaaatgaatttttcttccctgaaatcagagcttacatgtgtgtttttttataacattttcagataaatgtattcaacatgtaatacagtattttaacattcacctcttattttatattgaaatgtattacagtattaaaactcagtgttcagtatttatttcactatgcattttatttagtaaaagccaggagaaatgtttaatccaatggtgccttactttgtgatttaaaagaaatcaacttttttttatgtctaagtagtagattatttgcatatttgtaaaaactgttaggtctttatattttaaagtgtaataccagttttgttattttagtagcagaaatgggatgattgttaaagttccccaaaaatgttggcatgaaattaatttttccctccttatagtcaaggaccgtagaggaagaaaaacttttttttcataccatgcactatgtaaacagacacattttgctatctgtgtcatcaggatagtgtaagtggtagggtagagactaccctagacatctgcatctttgtaagttagccagacaataaagaaaagcagaatgata

SEQ ID NO: 138033 - DNA, 4216 bp, Artificial Sequence
  derived and/or modified sequence
gcagcctcccggcgctgagcgcttttcctgcccgcccggctcagccctgcggaccccgggagaagtttcccagaaaaaatgcccagcgcggcgcggggctgcggagtcgtccggagccgctgcgcgatttatcagcaagactgttgaacgcataactgcccaagatgcctgtccctccccctccagcacccccgccgcccccgacgtttgcactggccaatacagagaagcctaccttgaataagacagagcaggctgggagaaatgctctcctttctgatatcagcaaagggaagaaactaaagaagacggtcaccaatgacagaagtgcaccaatactggacaaacctaaaggagctggtgctggaggcggtggtggtggctttggtggaggcggcggatttggcggaggaggtggtggcggaggcggtggaagttttggagggggcggacctccaggtctgggaggattgttccaggctggaatgccgaagctgagatccacggccaacagggataatgattctggaggaagccgaccaccattgttgccaccgggaggaagatccacatctgcgaaacccttttcacccccaagtggcccagggaggtttcctgtgccttctccaggccacagaagtggtcccccagagcctcagaggaaccgaatgccgcccccaaggcccgacgtgggctcaaagcctgatagcattcctcctccagtacctagtactccaagacccattcaatcaagtccgcacaaccgggggtccccaccagtgcccggaggccccaggcagcccagccccgggcccactcctccccccccacctccagtgagggacccgccaggccgatcaggccccctcccaccacctcctccagtaagcagaaacggcagcacatctcgggccctgcctgctacccctcagttgccatccaggagtggagtagacagtcccaggagtggacccaggcctccccttcctcctgataggcccagtgctggggcacctcccccacctccaccatcaacatctattagaaatggcttccaagactctccatgtgaagatgagtgggaaagcagattctacttccatccgatttccgatttgccacctccagagccatatgtacaaacgaccaaaagttatcccagcaaactggcaagaaacgaaagccggagtggatccaaccgaagagaaaggggtgctccaccactccctcccatcccgaggtgatctttgcctgctcttctctacccaagctcaagagctgcttctgttgctatctaagaactgcataccctcctccctgcttcttcccttgtgcctcatgtatgggcaggaggaaaggtgggagggggagtgggaatatgcgtgtgtgggtgggaatcggtaagaaatgcacctagcttttcatattgtgtttattctccaggctattgcttgcttcagctgcagcctgcctgtgctggctgctggggtcgataggcttttgtcgtaataggcagagatgacttgcatcccagctttccaccaaccaaattcaaacattcactgcttatttgttacagactgtaattattaaagtccctgagagctgttttctcccgttcctttttcgcatgcttggcctcctctctgtttctatgaaccacagaccacctaagcaagctgctgagtaagggctcactggaaacttgcagtcacaggatgtccaatctttggcagtccgagcttggctctaggacagagctgtccaatagaaatataatgtgagccccatatacaatttttacatttctaatatattttaaacaagtgaagttaatatgcatccaaaatatttcaacctgtaatcaacataaaattttaatgagatattttatattattttttggtactgaatcttcaaaatccagagtgtattttacacttaccgcacatctccattcagactagtcacatttttaagtgctcagtagccacatgtggctggtggctactggattagacagcacgagtctggaagatggaagctagtgcagaaacctcttgtttaaaaaacaaaaaaggcaagatgggcttgagcgattcaagaggcaactaaaaataaaattaggacccagcaccttgtttgacacacagtttgaccttcgattttcctcccttaacttccctcttcccttaatatctgtatacaagtgttgcttcaaagtaccaaggtcagaaattgattgagtacggtttactaaagtcatgtggaataaagccattggaaacaaatggaaagcctgtcgggacttctgggctcagaaccagctggctcacgcactccacttgtcagctggacttctgccttgtgaaatggaagcagcctttgttcctttctggctgagcaagctcctgaggctgggagagactaggaaggcttggtaggaggggaaaaaagtcaggaaaatatatcaaatcagaaacatggaagaagaagggaaccgatttgagttggtgggcaaaactctaaaaatctaaatctgatgcttatgtaagggttgagcgaattagggagattgctagtggaaattggagggaatttgttttgcatcatttgtctaggatctatgcaaatatagctccactaaaggaccatagggaagagccagccttgccttttcttatatgattttgtttacaaaattttactgggacttttaaatctagctatagagttgggaaaaaatatttccacttagatattttacatggttttgtttaaaattaccattacttgttttttaaaaacacatgaccacatatgtatatgtatatctacctaaacattgtatcatggtttcagtatgttattcatgtattactgggagatgctaccaagaaaccaacccaaagaaaattctgaaaaatacatttctatttatagaataaatgtttcatttatataaaagcaaaagaacttagagttctaataaatgggatgtctaataaattatgaagttactgatttgaatatattatatttctataacttccttgccaaagtcctgatttagtacattagagaacctgtgtttcctctctcctctaccattcatctctcttccatacagtcatttgggctttttactcaaagagaatcaagaaataataaggtataacaagcttggcaaagtgttggctttttaaaaaaaaatttttttaatctctagcagtttggtaatttagcagcatcatttatttgggattcttttatctgatttcaacagtgaaaaacatccctatgataaagcctaatgacccatttcacaaaagatggaatttgcccttcctagaaaatatgacggagaaaagtctgactcagagaaagtgggtctgaattttataaggggtagtaagaattggacaattcctttgcatatctgaacttggcaggtaccgttctaaatctgaaacagggtgatagctcaaagttgccattcatccagaatagattgttttagaatgtagtgtttaagtgactgtttcattaatacacctacaccctttctttgaaagtttgcaacctaattgcatctaaaactatgaataagttctgtggtaaaatcttaaactatggaaaattacaaaaatgaatttttcttccctgaaatcagagcttacatgtgtgtttttttataacattttcagataaatgtattcaacatgtaatacagtattttaacattcacctcttattttatattgaaatgtattacagtattaaaactcagtgttcagtatttatttcactatgcattttatttagtaaaagccaggagaaatgtttaatccaatggtgccttactttgtgatttaaaagaaatcaacttttttttatgtctaagtagtagattatttgcatatttgtaaaaactgttaggtctttatattttaaagtgtaataccagttttgttattttagtagcagaaatgggatgattgttaaagttccccaaaaatgttggcatgaaattaatttttccctccttatagtcaaggaccgtagaggaagaaaaacttttttttcataccatgcactatgtaaacagacacattttgctatctgtgtcatcaggatagtgtaagtggtagggtagagactaccctagacatctgcatctttgtaagttagccagacaataaagaaaagcagaatg

SEQ ID NO: 138034 - DNA, 2568 bp, Artificial Sequence
  derived and/or modified sequence
aacaagaggccagagcttgtccaaaatggctgtccaaaaacgaccccacacttgcgttagaagatgatacctttttcagggacagttttctctcttggctcctgtcccgctggccctctgtctgcctgtgtccctgaccatggctccctgcagtaccctttaacgatttatcagcaagactgttgaacgcataactgcccaagatgcctgtccctccccctccagcacccccgccgcccccgacgtttgcactggccaatacagagaagcctaccttgaataagacagagcaggctgggagaaatgctctcctttctgatatcagcaaagggaagaaactaaagaagacggtcaccaatgacagaagtgcaccaatactggacaaacctaaaggagctggtgctggaggcggtggtggtggctttggtggaggcggcggatttggcggaggaggtggtggcggaggcggtggaagttttggagggggcggacctccaggtctgggaggattgttccaggctggaatgccgaagctgagatccacggccaacagggataatgattctggaggaagccgaccaccattgttgccaccgggaggaagatccacatctgcgaaacccttttcacccccaagtggcccagggaggtttcctgtgccttctccaggccacagaagtggtcccccagagcctcagaggaaccgaatgccgcccccaaggcccgacgtgggctcaaagcctgatagcattcctcctccagtacctagtactccaagacccattcaatcaagtccgcacaaccgggggtccccaccagtgcccggaggccccaggcagcccagccccgggcccactcctccccctttccctggaaaccgcggcactgctttgggaggaggctcaatacgtcagtcccccttgagctcctcctcgcccttctccaaccggcctcccctgccgcctacccccagcagggccttggatgacaaaccccctccaccacctcctccagtgggcaacaggccctccatccacagggaagcggttccccctcctcctcctcagaacaacaagcctccagtgccttccactccgcggccttcggcctcctcacaggccccacctccgccgccacctcccagcaggcccgggccgcctcctctgcctccaagttccagcggcaatgacgaaaccccaagactcccacagcggaatctgtccctcagttcgtccacgcccccgttaccttcgccaggacgttcaggtcctcttcctcccccgcccagtgagagacccccacctccagtgagggacccgccaggccgatcaggccccctcccaccacctcctccagtaagcagaaacggcagcacatctcgggccctgcctgctacccctcagttgccatccaggagtggagtagacagtcccaggagtggacccaggcctccccttcctcctgataggcccagtgctggggcacctcccccacctccaccatcaacatctattagaaatggcttccaagactctccatgtgaagatgagtgggaaagcagattctacttccatccgatttccgatttgccacctccagagccatatgtacaaacgaccaaaagttatcccagcaaactggcaagaaacgaaagccggagtgagtatttctgccaaggtttttgaagattcacgcttgagtagcctgagtgacactcgggctatatagaaagtccaggcttcttgcctggagtggggtagagaaccctttggagccatctacattctagtaaattccccttccacaggcagtgaggaaattgcagatgcccagaatgcatatgagaaacagttattttaatgtgtcattacaagctcaaaataccgtggtttgctagtattaaattttattattttacttctttggacgtcttcctctgttttcatcttcctgagacagcacaagtagagccatcttctattccttctagttttgaaattggcataatgtctgattaattataacaaaaactccctttaactgccttgatcttttaaacgtattgtaatcatagctttacagagcattacatgaaaatgtaaatatatccataatctctccacataatagatattttcattttaccagattctcatccaattttttatccatataattctgtttttttatgtagttataatgacgatgtacagttttttggcggggtttacataacattgcttagtaaatagtgcccatgttatcacatggtttttatttcagcatatagtaatttaccattaccatggacatttaaattatttctgttgttctgctaatgtaggtaatgctaccataaagaactaaattgcttttcctccattgaagaagaatgtcaacaagaaaggaaaaatagacaaactggaattttataacagtaaatgtataggaagtgttacagctctttgagaatttgtctagcaggctttccagggttttgctggaaagcctctgaaatttacttttaaaaaaacacaatagctgggcatggtggctcacgcctgtaat

SEQ ID NO: 138035 - DNA, 373 bp, Artificial Sequence
  derived and/or modified sequence
aatgagaagaagcccttagcctaatgaagcgataagatttatcagcaagactgttgaacgcataactgcccaagatgcctgtccctccccctccagcacccccgccgcccccgacgtttgcactggccaatacagagaagcctaccttgaataagacagagcaggctgggagaaatgctctcctttctgatatcagcaaagggaagaaactaaagaagacggtcaccaatgacagaagtgcaccaatactggacaaacctaaaggagctggtgctggaggcggtggtggtggctttggtggaggcggcggatttggcggaggaggtggtggcggaggcggtggaagttttggagggggcggacctccaggtct

SEQ ID NO: 138036 - DNA, 414 bp, Artificial Sequence
  derived and/or modified sequence
atggccgccctgagccgggccctgggccccctgcggaccccagccccacccctgtggattggcctcttcctggtggccaccggcagccagcagagcctggcccagcccctgcccggcaacaccacagaggccacccccaggagcctgcgggccagcggcagcctgtgtggcccccacgccaaggccccctacctgtgtgaggccacccatgagcctgctgctgcccgcatccgggcccaggtgcctgacacccgctggagccgggtgggcggccagcgcttctacagccgggtgctgagccccctgcaccggggccccagcggccacacagaggccagcgcccagaggagccacatgggcaagctgaaggagccccagccccaggaccacaagccaggcctgggcgccagctag

SEQ ID NO: 138037 - protein, 1046 aa, Artificial Sequence
  derived and/or modified sequence
MQKPSGLKPPGRGGKHSSPMGRTSTGSASSSAAVAASSKEGSPLHKQSSGPSSSPAAAAAPEKPGPKAAEVGDDFLGDFVVGERVWVNGVKPGVVQYLGETQFAPGQWAGVVLDDPVGKNDGAVGGVRYFECPALQGIFTRPSKLTRQPTAEGSGSDAHSVESLTAQNLSLHSGTATPPLTSRVIPLRESVLNSSVKTGNESGSNLSDSGSVKRGEKDLRLGDRVLVGGTKTGVVRYVGETDFAKGEWCGVELDEPLGKNDGAVAGTRYFQCPPKFGLFAPIHKVIRIGFPSTSPAKAKKTKRMAMGVSALTHSPSSSSISSVSSVASSVGGRPSRSGLLTETSSRYARKISGTTALQEALKEKQQHIEQLLAERDLERAEVAKATSHICEVEKEIALLKAQHEQYVAEAEEKLQRARLLVESVRKEKVDLSNQLEEERRKVEDLQFRVEEESITKGDLETQTQLEHARIGELEQSLLLEKAQAERLLRELADNRLTTVAEKSRVLQLEEELTLRRGEIEELQQCLLHSGPPPPDHPDAAEILRLRERLLSASKEHQRESGVLRDKYEKALKAYQAEVDKLRAANEKYAQEVAGLKDKVQQATSENMGLMDNWKSKLDSLASDHQKSLEDLKATLNSGPGAQQKEIGELKAVMEGIKMEHQLELGNLQAKHDLETAMHVKEKEALREKLQEAQEELAGLQRHWRAQLEVQASQHRLELQEAQDQRRDAELRVHELEKLDVEYRGQAQAIEFLKEQISLAEKKMLDYERLQRAEAQGKQEVESLREKLLVAENRLQAVEALCSSQHTHMIESNDISEETIRTKETVEGLQDKLNKRDKEVTALTSQTEMLRAQVSALESKCKSGEKKVDALLKEKRRLEAELETVSRKTHDASGQLVLISQELLRKERSLNELRVLLLEANRHSPGPERDLSREVHKAEWRIKEQKLKDDIRGLREKLTGLDKEKSLSDQRRYSLIDRSSAPELLRLQHQLMSTEDALRDALDQAQQVEKLMEAMRSCPDKAQTIGNSGSANGIHQQDKAQKQEDKH

SEQ ID NO: 138038 - protein, 1046 aa, Artificial Sequence
  derived and/or modified sequence
MQKPSGLKPPGRGGKHSSPMGRTSTGSASSSAAVAASSKEGSPLHKQSSGPSSSPAAAAAPEKPGPKAAEVGDDFLGDFVVGERVWVNGVKPGVVQYLGETQFAPGQWAGVVLDDPVGKNDGAVGGVRYFECPALQGIFTRPSKLTRQPTAEGSGSDAHSVESLTAQNLSLHSGTATPPLTSRVIPLRESVLNSSVKTGNESGSNLSDSGSVKRGEKDLRLGDRVLVGGTKTGVVRYVGETDFAKGEWCGVELDEPLGKNDGAVAGTRYFQCPPKFGLFAPIHKVIRIGFPSTSPAKAKKTKRMAMGVSALTHSPSSSSISSVSSVASSVGGRPSRSGLLTETSSRYARKISGTTALQEALKEKQQHIEQLLAERDLERAEVAKATSHICEVEKEIALLKAQHEQYVAEAEEKLQRARLLVESVRKEKVDLSNQLEEERRKVEDLQFRVEEESITKGDLETQTQLEHARIGELEQSLLLEKAQAERLLRELADNRLTTVAEKSRVLQLEEELTLRRGEIEELQQCLLHSGPPPPDHPDAAEILRLRERLLSASKEHQRESGVLRDKYEKALKAYQAEVDKLRAANEKYAQEVAGLKDKVQQATSENMGLMDNWKSKLDSLASDHQKSLEDLKATLNSGPGAQQKEIGELKAVMEGIKMEHQLELGNLQAKHDLETAMHVKEKEALREKLQEAQEELAGLQRHWRAQLEVQASQHRLELQEAQDQRRDAELRVHELEKLDVEYRGQAQAIEFLKEQISLAEKKMLDYERLQRAEAQGKQEVESLREKLLVAENRLQAVEALCSSQHTHMIESNDISEETIRTKETVEGLQDKLNKRDKEVTALTSQTEMLRAQVSALESKCKSGEKKVDALLKEKRRLEAELETVSRKTHDASGQLVLISQELLRKERSLNELRVLLLEANRHSPGPERDLSREVHKAEWRIKEQKLKDDIRGLREKLTGLDKEKSLSDQRRYSLIDRSSAPELLRLQHQLMSTEDALRDALDQAQQVEKLMEAMRSCPDKAQTIGNSGSANGIHQQDKAQKQENTH

SEQ ID NO: 138039 - DNA, 3141 bp, Artificial Sequence
  derived and/or modified sequence
atgcagaagcccagcggcctgaagccccccggcagaggcggcaagcacagcagccccatgggcagaaccagcaccggcagcgccagcagcagcgccgccgtggccgccagcagcaaggagggcagccccctgcacaagcagagcagcggccccagcagcagccccgccgccgccgccgcccccgagaagcccggccccaaggccgccgaggtgggcgacgacttcctgggcgacttcgtggtgggcgagagagtgtgggtgaacggcgtgaagcccggcgtggtgcagtacctgggcgagacccagttcgcccccggccagtgggccggcgtggtgctggacgaccccgtgggcaagaacgacggcgccgtgggcggcgtgagatacttcgagtgccccgccctgcagggcatcttcaccagacccagcaagctgaccagacagcccaccgccgagggcagcggcagcgacgcccacagcgtggagagcctgaccgcccagaacctgagcctgcacagcggcaccgccaccccccccctgaccagcagagtgatccccctgagagagagcgtgctgaacagcagcgtgaagaccggcaacgagagcggcagcaacctgagcgacagcggcagcgtgaagagaggcgagaaggacctgagactgggcgacagagtgctggtgggcggcaccaagaccggcgtggtgagatacgtgggcgagaccgacttcgccaagggcgagtggtgcggcgtggagctggacgagcccctgggcaagaacgacggcgccgtggccggcaccagatacttccagtgcccccccaagttcggcctgttcgcccccatccacaaggtgatcagaatcggcttccccagcaccagccccgccaaggccaagaagaccaagagaatggccatgggcgtgagcgccctgacccacagccccagcagcagcagcatcagcagcgtgagcagcgtggccagcagcgtgggcggcagacccagcagaagcggcctgctgaccgagaccagcagcagatacgccagaaagatcagcggcaccaccgccctgcaggaggccctgaaggagaagcagcagcacatcgagcagctgctggccgagagagacctggagagagccgaggtggccaaggccaccagccacatctgcgaggtggagaaggagatcgccctgctgaaggcccagcacgagcagtacgtggccgaggccgaggagaagctgcagagagccagactgctggtggagagcgtgagaaaggagaaggtggacctgagcaaccagctggaggaggagagaagaaaggtggaggacctgcagttcagagtggaggaggagagcatcaccaagggcgacctggagacccagacccagctggagcacgccagaatcggcgagctggagcagagcctgctgctggagaaggcccaggccgagagactgctgagagagctggccgacaacagactgaccaccgtggccgagaagagcagagtgctgcagctggaggaggagctgaccctgagaagaggcgagatcgaggagctgcagcagtgcctgctgcacagcggcccccccccccccgaccaccccgacgccgccgagatcctgagactgagagagagactgctgagcgccagcaaggagcaccagagagagagcggcgtgctgagagacaagtacgagaaggccctgaaggcctaccaggccgaggtggacaagctgagagccgccaacgagaagtacgcccaggaggtggccggcctgaaggacaaggtgcagcaggccaccagcgagaacatgggcctgatggacaactggaagagcaagctggacagcctggccagcgaccaccagaagagcctggaggacctgaaggccaccctgaacagcggccccggcgcccagcagaaggagatcggcgagctgaaggccgtgatggagggcatcaagatggagcaccagctggagctgggcaacctgcaggccaagcacgacctggagaccgccatgcacgtgaaggagaaggaggccctgagagagaagctgcaggaggcccaggaggagctggccggcctgcagagacactggagagcccagctggaggtgcaggccagccagcacagactggagctgcaggaggcccaggaccagagaagagacgccgagctgagagtgcacgagctggagaagctggacgtggagtacagaggccaggcccaggccatcgagttcctgaaggagcagatcagcctggccgagaagaagatgctggactacgagagactgcagagagccgaggcccagggcaagcaggaggtggagagcctgagagagaagctgctggtggccgagaacagactgcaggccgtggaggccctgtgcagcagccagcacacccacatgatcgagagcaacgacatcagcgaggagaccatcagaaccaaggagaccgtggagggcctgcaggacaagctgaacaagagagacaaggaggtgaccgccctgaccagccagaccgagatgctgagagcccaggtgagcgccctggagagcaagtgcaagagcggcgagaagaaggtggacgccctgctgaaggagaagagaagactggaggccgagctggagaccgtgagcagaaagacccacgacgccagcggccagctggtgctgatcagccaggagctgctgagaaaggagagaagcctgaacgagctgagagtgctgctgctggaggccaacagacacagccccggccccgagagagacctgagcagagaggtgcacaaggccgagtggagaatcaaggagcagaagctgaaggacgacatcagaggcctgagagagaagctgaccggcctggacaaggagaagagcctgagcgaccagagaagatacagcctgatcgacagaagcagcgcccccgagctgctgagactgcagcaccagctgatgagcaccgaggacgccctgagagacgccctggaccaggcccagcaggtggagaagctgatggaggccatgagaagctgccccgacaaggcccagaccatcggcaacagcggcagcgccaacggcatccaccagcaggacaaggcccagaagcaggaggacaagcactag

SEQ ID NO: 138040 - DNA, 3141 bp, Artificial Sequence
  derived and/or modified sequence
atgcagaaaccgagtggcttaaagccacctggacgcggaggaaagcactcctctcctatggggcgaactagcaccgggtcggcctcaagttctgctgccgtggccgcctcatccaaggagggctctcccctgcataagcaatcctccggaccctccagctcccctgccgcagctgcagcgcccgagaagcccggtccaaaagcagctgaggttggcgatgactttctgggggacttcgtagttggagaacgtgtgtgggtgaacggggtgaagcctggagtagttcagtacctgggggaaacccagttcgctcccggacagtgggccggagtagtccttgatgacccagttggaaaaaacgacggcgcagtcggaggcgtgcgatacttcgagtgccctgccctgcaagggatttttacccgaccgtctaagctgacaaggcagccaaccgcggaaggctccgggtccgacgcccactctgtggagtccctaaccgcccaaaacctcagcctgcactccggcaccgccactccgccattaactagtcgtgtgattcccctacgagagtctgtacttaacagtagcgtgaagacaggaaatgaatccggttcgaacttatccgactccggatccgttaagcggggtgaaaaggatctccggctgggcgacagagtgcttgtcggaggcacaaaaactggcgtggtcaggtatgtgggagagaccgattttgccaagggggagtggtgtggggtggagctggacgaaccactcgggaaaaacgacggagccgtggctgggacgagatatttccagtgtccgcccaaatttggtctgtttgcgcctatccacaaggtcattagaattggattccccagtacttctcccgctaaggctaagaaaacaaagcggatggccatgggggtgagcgccctgactcattctccatcttcaagcagtatttcctccgtttccagtgtagccagctctgtgggcggacgccctagcaggtctggactgcttaccgagactagcagcagatatgcacgtaaaataagcggcaccacagccctgcaggaggccctgaaagaaaaacagcaacacattgagcagctgttagctgagagggatctggagcgggccgaggtcgccaaagcaacatcacacatatgcgaggtcgaaaaggagattgccctactgaaggctcagcacgaacagtacgtcgcggaggccgaggagaagcttcagcgcgctcgactgctggtcgagtctgtcaggaaggaaaaggttgatctctcgaatcagcttgaagaagaacggagaaaagtggaagacctgcagttcagagttgaagaagaaagcatcacaaagggtgacttggagactcaaacccagctggaacacgcacgcattggagagctggagcagagcctcctcctcgaaaaagctcaggccgaacgtttgctgagggaattggcggataatcgattgaccacagtcgcagagaagtcgagagtgctccaattagaggaggaattaactctgagacggggcgaaatcgaagaactgcagcaatgcctgctgcacagcgggccaccaccgccagaccatccagacgctgccgaaatcttacgactcagagaacgactgctatctgcttccaaagaacaccagcgcgagagtggagtactccgtgacaagtacgaaaaggcgctcaaggcctaccaggccgaggtagataagctgcgagccgccaatgaaaaatacgctcaggaagtcgcagggttgaaggacaaagtgcaacaagctacctcagaaaacatggggctcatggataactggaaaagtaagctagattctctggcatccgaccatcaaaagtcgctcgaggacctcaaagccactctgaactctggtcctggagcccaacagaaagaaatcggagaattaaaagccgtgatggagggaatcaagatggaacatcagttggaactaggaaacttgcaggcgaagcatgacctggaaactgcaatgcacgtgaaggaaaaggaagccctgcgtgagaagttgcaagaggcccaggaggaactggctggcctgcaacgccattggagagcgcaactcgaggttcaggctagccagcacagactagaattgcaggaggcccaagatcagaggcgggacgcagagctgcgcgttcacgaactggaaaaactagatgtggagtatcgcggacaggcacaggccattgaatttctcaaagagcagatcagtctggccgagaagaaaatgctggattacgaacgcctccagagggccgaggcccagggaaagcaagaggtagagagcttgagagaaaagctccttgtggccgaaaaccgtctccaggcggtggaagccctgtgcagctctcagcacactcacatgattgagtcaaatgatatctctgaggaaactatccgcacaaaggagaccgtggaaggcctacaggacaagctgaataagagggataaagaggttacagccttaaccagtcaaacagagatgttgcgagcccaggtcagcgcgttggaaagtaagtgtaagagtggggagaagaaggtggatgccttactcaaagagaaacggaggttagaagccgaacttgagactgtttccagaaaaacccacgacgcctccgggcagctagttctgatctctcaagaactgctgagaaaagagcgatctttaaacgaactcagagtgttgctcctggaagccaatcggcactctcctggccctgagcgggaccttagccgggaagttcacaaggcagagtggagaatcaaagaacaaaaactcaaggacgatattcggggcctccgtgagaagctgactgggctagacaaagagaaaagtctgagcgatcagcggcggtactccctcattgatcgctcatctgcccccgagctgttacggctgcagcaccagttaatgtcaactgaagacgcactgcgagacgcactggaccaggcccagcaggtggagaagttaatggaggccatgcgatcctgtccagacaaagcccagaccatcggcaactcagggagcgctaatgggattcatcagcaggataaggcccagaagcaagaggataagcattag

SEQ ID NO: 138041 - DNA, 3141 bp, Artificial Sequence
  derived and/or modified sequence
atgcagaagcccagcggcctgaagcccccaggccggggcggcaagcacagcagccccatgggccgcaccagcactggaagtgccagcagcagcgctgctgtggccgccagcagcaaggagggcagccccctgcacaagcagagcagcggccccagcagcagccctgctgctgctgctgcccctgagaagccaggccccaaggctgctgaggtgggagatgacttcctgggggactttgtggtgggggagcgggtgtgggtgaatggagtgaagccaggagtggtgcagtacctgggggagacccagtttgcccctggccagtgggccggcgtggtgctggatgatcctgtgggcaagaatgatggagctgtgggcggcgtgcgctactttgaatgtcctgccctgcagggcatcttcacccggcccagcaagctgacccggcagcccacagctgagggcagcggcagtgatgcccacagcgtggagagcctgacagcccagaacctgagcctgcacagcggcacagccaccccacccctgaccagcagggtcatccccctgcgggagagcgtgctgaacagctctgtgaagacaggaaatgaaagtggcagcaacctgagtgacagcggctctgtgaagagaggagagaaggacctgcggctgggggacagagtgctggtgggcggcaccaagacaggagtggtgcgctacgtgggggagacagactttgccaagggggagtggtgtggggtggagctggatgagcccctgggcaagaatgatggagctgtggccggcacccgctacttccagtgcccccccaagtttggcctgtttgcccccatccacaaggtgatccgcatcggcttccccagcaccagccctgccaaggccaagaagaccaagaggatggccatgggcgtgtctgccctgacccacagccccagcagcagcagcatcagctctgtgtcctctgtggccagctctgtgggcggccggcccagccgcagcggcctgctgacagagaccagcagccgctatgccaggaagatcagcggcaccacagccctgcaggaggccctgaaggagaagcagcagcacatcgagcagctgctggccgagcgggacctggagcgggcagaggtggccaaggccaccagccacatctgtgaggtggagaaggagatcgccctgctgaaggcccagcacgagcagtatgtggccgaggccgaggagaagctgcagagggcccggctgctggtggagagcgtgaggaaggagaaggtggacctgagcaaccagctggaggaggagaggaggaaggtggaggacctgcagttccgggtggaggaggagagcatcaccaagggggacctggagacccagacccagctggagcacgcccgcatcggggagctggagcagagcctgctgctggagaaggcccaggccgagcggctgctgcgggagctggccgacaaccggctgaccaccgtggccgagaagagccgggtgctgcagctggaggaggagctgaccctgcggcggggggagattgaggagctgcagcagtgcctgctgcacagcggccccccacctccagaccacccagatgctgctgagatcctgcggctgcgggagcggctgctgagcgccagcaaggagcaccagcgggagagcggcgtgctgcgggacaagtatgagaaggccctgaaggcctaccaggccgaggtggacaagctgcgggccgccaatgagaagtatgcccaggaggtggccggcctgaaggacaaggtgcagcaggccaccagcgagaacatgggcctgatggacaactggaagagcaagctggacagcctggccagtgaccaccagaagagcctggaggacctgaaggccaccctgaacagcggccctggggcccagcagaaggagatcggggagctgaaggctgtgatggagggcatcaagatggagcaccagctggagctgggcaacctgcaggccaagcatgacctggagacagccatgcacgtgaaggagaaggaggccctgcgggagaagctgcaggaggcccaggaggagctggccggcctgcagaggcactggagggcccagctggaggtgcaggccagccagcaccggctggagctgcaggaggcccaggaccagaggagagatgctgagctgcgggtgcatgagctggagaagctggatgtggagtaccggggccaggcccaggccatcgagttcctgaaggagcagatcagcctggccgagaagaagatgctggactatgaaaggctgcagagagctgaggcccagggcaagcaggaggtggagagcctgcgggagaagctgctggtggctgaaaatcggctgcaggccgtggaggccctgtgcagcagccagcacacccacatgattgagagcaatgacatcagcgaggagaccatccgcaccaaggagaccgtggagggcctgcaggacaagctgaacaagagggacaaggaggtgacagccctgaccagccagacagagatgctgcgggcccaggtgtctgccctggagagcaagtgcaagagcggggagaagaaggtggatgccctgctgaaggagaagaggcggctggaggccgagctggagaccgtgtccaggaagacccatgatgccagcggccagctggtgctgatcagccaggagctgctgaggaaggagaggagcctgaatgagctgcgggtgctgctgctggaggccaacagacacagccctggccctgagcgggacctgagccgggaggtgcacaaggccgagtggaggatcaaggagcagaagctgaaggatgacatccggggcctgcgggagaagctgaccggcctggacaaggagaagagcctgagtgaccagaggcgctacagcctgattgacaggagcagcgcccctgagctgctgcggctgcagcaccagctgatgagcacagaagatgccctgagagatgccctggaccaggcccagcaggtggagaagctgatggaggccatgaggagctgcccagacaaggcccagaccatcggcaacagcggcagcgccaacggcatccaccagcaggacaaggcccagaagcaggaggacaagcactag

SEQ ID NO: 138042 - DNA, 3141 bp, Artificial Sequence
  derived and/or modified sequence
atgcagaagcccagcggcctgaagccccccggccggggcggcaagcactcctctccaatgggaaggaccagcacaggaagcgcctcaagcagcgcagcagtcgcagcatccagtaaggagggcagtccattacacaaacagagcagcggcccatcttcctctccagccgccgcggccgcaccagagaagccgggccctaaagcagcagaggtaggagatgactttctgggcgacttcgtcgtgggggagagagtctgggtgaatggcgtgaaaccgggcgtcgtgcaataccttggagagacccagttcgcgccagggcaatgggcaggcgttgtgctagatgatccagtggggaaaaacgacggggcagtgggcggtgtccgatacttcgagtgcccagctcttcagggaatttttactcgcccttcgaagctcacaaggcaaccaacagctgagggttcaggttcagacgcccactctgtggagtccctgaccgcgcagaacctgtccctgcatagcggcacagccacaccaccactgacctctcgggttatcccgctacgagagagcgtgctcaactcatccgtaaagactggaaatgagagtggttctaacctgagcgattcgggctcagttaagaggggagagaaagaccttaggcttggagaccgcgtgctggtgggcggcaccaagactggagtcgttcggtacgtgggagaaacggactttgccaaaggtgaatggtgtggggtggaacttgacgaaccgctgggaaaaaacgacggtgccgtagccggcacacgatattttcagtgccctccaaagttcggcctctttgctcctatccacaaggtgatccggataggtttcccctccactagccctgccaaagcaaaaaaaacaaaacggatggccatgggggtgtctgcactgactcatagtccttccagtagttcaatatcttccgttagctctgtggcctcgagcgtagggggccggccttctagatccggcctactcacggagacgtcctctaggtacgcacgaaagatctcgggcacaaccgccctgcaggaggccttaaaggagaaacagcagcacatcgaacagcttctggccgaaagggatctagaacgagccgaagtggccaaggccacttctcatatatgtgaagtcgaaaaggagatagctctcctcaaggcccaacatgagcaatatgtggcagaagcggaggaaaagctacagcgagctaggctgctcgtggagtccgtgcggaaggaaaaggtggacctgtctaatcagttggaagaggagaggaggaaggtggaggatcttcaatttcgggtggaggaggaatccataacaaagggggatttagagacacagacccagttagagcacgcacgaatcggcgaattggagcagtccctcttgctggaaaaggctcaggccgagaggctgttgcgcgaactggctgacaacaggctcacgaccgtggcagaaaagtcgcgggtcctgcagctggaggaagaacttactctgagaaggggagagatcgaagaactccagcagtgcttgttgcactctggccctccacctcccgatcatccagacgcggcggagatcctgagactccgggaaagactgctatccgcctctaaggagcatcaaagggaaagtggggtgctgagggacaagtacgagaaagcactgaaagcataccaggcggaagtggacaagctccgcgccgcgaacgaaaagtatgcgcaagaagtcgccggtcttaaggacaaagtgcagcaggctacttcggagaatatgggccttatggataactggaaatccaagctggactctctagcctccgaccaccaaaagtcactggaggacctgaaggcgacattgaatagcgggcctggagctcaacagaaagaaatcggggagttaaaggcagtgatggaagggatcaaaatggagcatcagctcgaactgggcaacttgcaagccaagcatgacctggagacggctatgcacgtaaaggagaaagaggccctgagagagaagctgcaagaggcacaggaggaactggcaggtctgcaaaggcactggagggcccagttggaagtgcaggcgagccagcaccggttagaattgcaggaagcacaggatcagcggcgggatgcggaactccgagttcacgaactggagaaactagacgtggaatacagaggacaggcgcaggctatcgagtttctaaaagaacagattagcttggcggagaagaagatgctagattacgagagactgcagcgtgcagaggcacaaggaaaacaggaggtcgagtccctgcgagagaaactgctggtggccgaaaaccgcctgcaggcagtcgaagccttgtgtagcagtcaacacactcatatgattgagagcaatgatatcagtgaggaaaccatcagaacaaaagagacagtcgagggcttacaggataaacttaataaacgggataaagaggtcacagctttaacctctcagactgaaatgcttagggctcaggtcagtgctttggaatcaaaatgcaagagcggggagaagaaggtcgacgcactgctgaaggaaaaaaggagactggaggccgagctggaaaccgtttcccggaagactcacgacgccagtggccaactagtgctcatatctcaggaactgcttagaaaggaacgcagcctcaacgaattgagagtgcttctactcgaagcaaacagacacagtccaggacccgagagggacctttcacgcgaggtgcataaggcagagtggagaattaaggagcaaaagctcaaggatgacatccgaggcctgcgtgagaaattaacaggtcttgataaagagaagagtcttagcgatcagagaagatattccctgattgacaggtcctctgctccagaactcttgcgtctgcagcaccagttgatgtcaaccgaggatgcactgagagacgccctcgaccaggctcagcaggtggagaagttaatggaggctatgcgctcttgtcccgataaggcacagaccatcggcaactccggatctgccaacggtattcaccagcaggacaaggctcagaagcaggaggacaaacactag

SEQ ID NO: 138043 - DNA, 3141 bp, Artificial Sequence
  derived and/or modified sequence
atgcagaagccaagtggtctgaaaccccctggtaggggcggtaagcactcatcaccaatgggtaggacctcaaccggttctgcttctagcagtgccgctgtagccgcttctagtaaggaaggcagtcctctccacaagcagtcctcaggtccaagcagtagccccgctgcagccgcagctcccgagaagcctgggcctaaagccgctgaagtgggagacgactttctgggcgattttgtagtgggagaacgagtgtgggtgaacggcgtgaagcccggagtagtccagtatctgggggagactcagtttgccccaggtcagtgggcaggtgtcgtgttggatgacccggtgggcaagaacgatggtgccgtcggcggagtgagatacttcgagtgtccggctcttcaggggattttcaccaggcctagtaagctgacaaggcagccaacagctgaaggatcagggtcagatgcccattctgtggagtctcttaccgcacaaaatctatcactgcatagcgggacagcaacgccaccactcacctcgagggtgattcccctgcgggagtcagtcttaaactcttccgtgaagaccggaaacgagagtggcagcaatctcagtgacagtggaagcgtaaagagaggcgagaaggatctgcgcctaggcgatcgcgttctggtggggggtactaagactggtgttgtgaggtacgtcggagagaccgatttcgccaagggcgaatggtgtggggttgagcttgacgaaccactgggtaagaatgacggagctgtcgctgggacaagatacttccagtgtcccccaaaatttggccttttcgcccctatccacaaggttattagaattggcttcccgtctacaagccccgctaaagccaagaagaccaaacggatggccatgggcgtgtcagctctgacccactcaccatcctcctcatcaatcagttctgtgtccagcgtggccagtagcgtggggggacggccttctcgaagtggcctgctgacagagacctcaagtcggtatgcaagaaaaatttcgggaactacagctctgcaagaagcgttgaaagagaaacaacagcatatcgagcagctcctggcagagcgggacctcgaaagggcggaggtagccaaagcaacctcgcacatctgcgaggtcgaaaaagaaatcgctctcctgaaagcccagcacgagcaatacgtcgctgaagccgaggagaaacttcagcgggcacgactgcttgtcgaaagcgtgcggaaagagaaagtggatctgtcaaaccagctcgaagaggaaagaaggaaggtggaagacctgcagtttcgcgtggaggaagagtcaattacgaaaggggatctcgaaacacagacccagctcgaacacgctcggattggagagctggaacaaagccttctgcttgaaaaggctcaggctgagaggctgctgcgggaactggctgataaccgccttacaaccgtcgctgagaaatctcgcgtcctccagctggaagaggaacttaccctgcgacggggtgaaatcgaagaactgcaacagtgccttctgcactctgggccacccccacctgaccaccccgatgccgctgagatcctcagactccgggaaagactcttatccgccagcaaggaacatcagcgggaatctggagtcttgagagacaaatacgagaaggccctgaaagcttaccaggcagaagtggataagctccgggcagctaatgagaaatatgcccaggaggtggctggtttaaaagacaaggtacagcaggccacctccgagaacatggggttgatggataattggaagagtaagctggactcactggccagcgatcaccagaagagcttggaggacctgaaagctacattgaattccggacctggcgctcagcagaaagagatcggagaactgaaagccgttatggaggggatcaaaatggaacaccaacttgagctggggaatctgcaggcaaaacacgatctcgaaacggcaatgcacgtcaaggagaaggaagccctacgggagaagctgcaggaggctcaagaagaactggctgggcttcagcgccactggagggctcagctcgaagtgcaggcatctcagcatcggttagaactgcaggaagcccaggatcagaggcgcgacgctgagcttagagtccacgagcttgagaaactcgatgtcgaatatagggggcaggcccaggccatcgaatttcttaaagaacagattagcctggcagaaaagaaaatgctggactacgagaggttgcagcgggctgaagcgcagggcaaacaagaggtggaaagtctccgggagaagctccttgtggccgagaaccgcctgcaggcggtggaggcgctgtgttcaagtcaacatacgcacatgatcgaatccaatgatatcagtgaagaaaccattcgaactaaggagaccgtggagggactgcaggataagcttaacaaacgggataaagaagtgacagcccttacctcacaaaccgagatgcttagggctcaggtctcagcactagagtcaaagtgtaaatctggtgagaagaaagtagatgcccttctgaaagagaagagacgactcgaagctgagctggaaactgtcagcagaaaaacacacgacgcaagcggacagctggtcctcatctcccaggagctgcttcggaaggaaagatccctgaacgaactcagggtactgcttcttgaagccaatcgccacagtcctggccctgaaagggacctgagcagggaggtccataaggccgaatggcgtattaaggagcagaagttgaaagacgacatccgagggctgcgcgagaagttaaccggactcgacaaggaaaagtccctgtctgatcagagaagatacagtctgatagaccgaagcagcgcgcctgagttgctccggttacagcatcagctgatgtccactgaagatgccctccgggacgctctcgaccaggctcagcaggttgaaaagttaatggaggccatgcgctcctgcccagacaaagcacagaccatcggaaactcaggaagcgctaacggcatccaccagcaggacaaagcacaaaagcaggaggataagcactag

SEQ ID NO: 138044 - DNA, 67 bp, Artificial Sequence
  derived and/or modified sequence
ggtccattcgatgattctcttcgattccattcgataattccgttttttcccgtttgatgttgattcc

SEQ ID NO: 138045 - DNA, 3141 bp, Artificial Sequence
  derived and/or modified sequence
atgcagaaaccttccggactgaagccaccaggtagaggaggaaaacacagctcccccatgggtcgtacttctacagggagtgcctcgtcatcagcagcggtggctgcatctagtaaagaaggatcccctttgcacaagcagtcatccgggcccagttcgtcccctgccgccgcagccgctcccgagaaacctgggcctaaagccgcagaagtcggagacgactttttaggggattttgtggtgggtgaaagagtatgggtgaacggtgtgaagccaggagttgttcagtatctgggcgagacacagttcgccccaggtcagtgggcaggtgtcgttctagatgatcctgtcggcaagaatgacggcgctgtgggaggcgtgcgatactttgagtgccctgccctgcagggcatctttaccagaccatctaagctgacaaggcaacccaccgccgagggcagtggctctgacgcacactccgtagagtccctaaccgctcagaatctgtctctgcactccgggactgcaacacctcccctgacctcccgggttatcccactccgagagtccgttttgaatagcagcgtgaaaactgggaatgagtcaggcagtaatctcagcgattccggaagtgttaagcggggggaaaaggatctgaggttgggggaccgtgtcctagtcgggggaacaaagaccggggtggtgaggtatgtgggggagacagacttcgccaaaggcgagtggtgtggcgtggaattggatgagccattgggaaagaacgacggcgccgtggccgggacccggtactttcagtgtcccccaaagtttggcctcttcgcccccatccataaggtgattcggattgggttccctagtactagcccggctaaggcaaagaaaaccaaaaggatggccatgggagtgtctgctttaacacatagccctagctccagtagcatttcgagcgtgagctccgttgcctcaagtgtcggtggaagaccatcccgctcgggcctgcttactgagaccagctctaggtacgctcgaaagatttcaggtactactgccctgcaggaggcccttaaagagaaacagcaacacatcgagcagcttttggctgagagagaccttgaacgcgcagaagtggcaaaggccacatcccatatatgtgaggtcgaaaaggagattgccctgctgaaggcccagcatgagcagtacgtggcagaagccgaggaaaaactgcagcgggctcggctactggtggaaagtgtgcgaaaagagaaagttgatttgtccaaccagcttgaggaggagaggcgtaaggtggaggacttgcaatttcgagtcgaggaagaaagcatcacaaagggtgatcttgagacccagacccagcttgagcatgcacggataggggaattagaacagtcgctcctacttgagaaggcacaggcagagcgtctcttacgggagctggcagacaataggctgaccacagtcgccgaaaaaagcagagtgctgcagttagaagaagagctgacgctccggcgcggagagattgaagaattgcagcaatgccttttacactctggcccacctccgcccgatcaccctgatgcggctgaaatcctcaggctgcgtgagaggctattgagcgcctcaaaagagcatcaaagagaatccggcgtactacgggacaagtatgagaaagccctgaaggcataccaagcagaagtggataaactccgggctgcgaacgaaaaatatgcacaggaagttgccgggctgaaggataaggttcagcaggcgacctccgaaaatatgggcttgatggacaactggaagagtaagctggactcgcttgcctccgatcatcagaagagcctcgaggatcttaaagctactctgaactctggaccgggcgcacagcagaaagaaatcggagagctgaaggcggtgatggaaggaatcaagatggagcaccagctggaactggggaatctccaagccaagcatgacttggagaccgctatgcatgtaaaggagaaagaagctctgcgggagaaattgcaggaggcacaggaggaattggcaggactgcagcggcattggagagctcagcttgaggtgcaggcctcccagcaccgcctcgaactacaagaggcccaggaccagcgcagagacgctgaactccgagttcacgaactggagaaactcgacgtggaataccgaggacaggcccaggctatcgagtttctgaaagagcagataagcctggccgaaaagaagatgttggactacgagcggcttcagagggctgaggctcaagggaagcaagaggtggaaagccttagagaaaagctgttggtagctgaaaacaggctgcaggcagtcgaggcgctgtgcagcagccagcatacccatatgatagagtctaacgacatttctgaggagaccatcagaactaaagagacggtggagggtttgcaagataagctgaacaagagggacaaagaagttaccgctctgacatctcagactgagatgctccgggcccaggtcagtgccctggaatctaagtgcaagagcggcgagaaaaaagtcgacgccctgctgaaggaaaaaagaagacttgaggccgaactagaaacggtgagccgtaagacacatgacgcctccggtcagctcgtcctgatctctcaagagctgctgcggaaggagcgtagtctcaatgagttgcgtgtgctcctgctggaggccaaccggcattcacctggccccgagcgagacctgtcacgggaggtgcataaagcagagtggaggattaaggaacagaaattgaaggacgacatcaggggtttgcgtgagaaactgaccggcctagataaggagaaaagcctgtctgaccagaggcgatatagcctgattgaccgctctagcgcgccagagctcttacggctacagcaccaattgatgagcactgaggacgccctgagagatgccttagaccaggcgcagcaggtggaaaaactgatggaggctatgcgtagctgcccagacaaagcgcagactattggtaattcagggagcgccaacggcatacaccagcaggataaagcccaaaaacaggaggataagcactag

SEQ ID NO: 138046 - DNA, 3141 bp, Artificial Sequence
  derived and/or modified sequence
atgcagaagcccagcggcctgaagccccccggccggggcggcaagcacagctcacccatggggaggacctccaccgggtcagcatcatctagtgctgcagtggccgccagttccaaagagggtagtcccctgcacaagcagtccagcgggccgagttcgtctcctgccgcggctgccgccccagagaaacccgggcctaaagccgccgaggttggagatgattttctgggggacttcgtggtcggcgaaagagtgtgggtcaacggtgtgaagcccggtgtagtacagtatctcggagagacacaatttgcaccaggccaatgggcaggagtggtgctggatgaccctgttgggaaaaacgatggcgccgtggggggagtgcggtacttcgaatgccctgctctgcagggcattttcacacgcccgagcaaactcaccagacagcctacggccgagggctctggcagcgacgctcacagcgtggagtctctgacagctcaaaacctcagtttgcactcaggcacggccacaccccctctgacgtcaagggtgattcctttaagggagagcgtcctgaactcgagcgtgaagaccggaaatgagagtgggagcaatctgagtgacagcgggtccgttaagagaggagagaaagatctgcgtctgggagacagagtgctagtgggaggtacaaaaacgggggtggtgcgctatgtcggagaaaccgacttcgcaaagggtgaatggtgtggggtggaactcgatgagcctttaggtaaaaacgacggcgcagtcgccgggactcgctacttccagtgtccaccaaaattcgggttgttcgctcccatccacaaggtgatcaggatagggtttcccagcacgtccccagctaaggcgaagaagacaaaaaggatggctatgggagtgagcgctcttacccacagcccaagttctagctccatcagttccgtgagtagtgtggcctccagcgtgggaggtcgccctagtcggagcggactgctgacagaaacatccagtcgctatgcaagaaaaatttcgggcacgacagccctccaggaagctttgaaggagaaacagcaacacatagaacaactgctggctgagcgggacctcgagcgggccgaagtggctaaagctaccagccatatatgcgaggtggagaaggagatcgcactactgaaggcacagcacgaacagtacgttgccgaagctgaggagaagcttcagcgggctcggttactcgttgagtccgtgcgaaaagaaaaagttgacctgtcgaatcagctggaggaagagcgtagaaaagtggaggatctccagtttcgagtggaagaggaatcaatcacaaaaggagatttggaaactcagacacagttggaacatgcccgcattggggaactggagcagtcgcttctactcgaaaaggcacaggccgagaggttgctgagggaactggcggataaccgactcactacagtcgcagaaaaatccagggtgctgcaacttgaagaagaactgacgttgaggagaggggagatcgaggagctacaacaatgtctcctgcatagcggcccccctcccccggatcacccagacgctgccgaaatcctcaggctcagagaacgccttctgagcgctagtaaggaacaccagcgagaatccggcgtgctgagggataaatatgagaaagcacttaaggcatatcaagctgaagtggacaaactgcgtgccgccaacgagaaatacgcccaagaggttgccggcctgaaagataaggtgcagcaggctaccagcgaaaacatggggctgatggacaattggaagtccaagctcgacagcttggcgtccgatcatcagaaaagcctggaggacttaaaggcgactctgaactcaggtcccggtgcgcagcagaaagagattggagagctgaaggcagtcatggagggaataaagatggagcaccagctggagcttggcaatctccaggcaaagcatgatctggagaccgcaatgcatgtcaaggaaaaggaagcgctgagagaaaaactgcaggaggcgcaggaagaactcgccgggctccaaagacactggagggcacagctggaagtgcaagccagccagcaccgtctggaactgcaagaagcgcaagaccaacgtcgagacgcagaactcagggttcacgaactcgagaaattagatgtcgaataccggggccaagctcaagctatcgagttcttgaaggagcaaatttctctggcggagaagaaaatgttagactacgaaaggctccagcgggccgaagcccaggggaagcaggaagtagagtctctgcgggaaaaactcctcgtcgccgagaatagactgcaggccgtcgaagctttatgctcctcccagcacacgcacatgatcgaatccaatgatattagcgaggaaaccattagaacaaaagaaactgtcgagggattacaggacaagctgaacaaaagggacaaagaggtcacagctctgacgtctcagacagagatgcttcgggcacaggtgtcggccttagagtctaagtgtaagtccggagagaagaaggttgacgccctgctgaaggagaagcgacgactggaggcagagctagagaccgtgtcaagaaaaacacacgacgcctctggacagctcgtgctgatctcccaggagctcttaagaaaggaaagatccctgaacgagctgcgcgtgctcctgttggaggcgaaccggcacagtccaggccctgaaagagatctgagcagggaggtccacaaggcagaatggagaatcaaggaacagaagctgaaggatgacatacggggcctgagagagaaactaacaggcctggataaggaaaagtctcttagtgatcaaagaagatattccttgatcgacagaagtagtgccccagaactgctgaggttgcagcaccaactcatgtctactgaggacgctctcagagacgccctagaccaggctcaacaggtggagaagctcatggaggccatgagatcctgcccagataaagcccaaaccataggtaatagtggcagcgccaatgggatccaccagcaggacaaggctcagaaacaagaggataagcattag

SEQ ID NO: 138047 - DNA, 3141 bp, Artificial Sequence
  derived and/or modified sequence
atgcagaagccaagcggcctgaaaccgccaggaaggggcggaaaacactcctcccctatggggagaacatccaccggatccgcctccagctccgcagctgtggccgctagctccaaggagggtagccctttacacaagcagagctcaggccctagctcttcacctgccgctgccgcagctcctgaaaagcctggtcccaaggcagctgaggttggagacgactttctcggcgacttcgtggtcggtgaaagagtctgggttaatggcgtgaagcccggagtcgtgcagtatctgggtgagactcagttcgcacctggtcagtgggcaggtgtggtgctcgacgatccagtgggcaaaaatgatggggcagtgggaggcgtccggtacttcgaatgccctgccctgcaggggatctttacgagaccgtctaagctaaccagacagcccaccgctgagggaagtggttccgacgcacactctgtggaatctctcacagcccagaatctctcattgcacagcggcaccgccacgccgcctctcacgagccgcgtgattcccctgagggagagcgtactgaattcttctgtgaagacaggaaacgaatctgggagcaacctgtctgactctggtagcgtgaagagaggcgagaaagacttgaggctgggggacagggtgcttgtgggtggaacaaagaccggagtggtacgctatgtgggcgagactgacttcgcgaaaggggaatggtgcggagtcgaactggatgagcctctcggaaaaaatgatggcgcagtggctggcactaggtactttcagtgccccccaaagttcggccttttcgccccaatccataaagtcatccgtattgggtttccaagcacctcaccagctaaggcaaagaagacaaaaaggatggccatgggagtgagtgccttaacacacagcccatcaagcagctccatatcttcagtatcgtccgtcgcttcctccgtgggaggacgcccttctcgctctggcctcctgactgagacctcgagtcggtacgcacgtaaaatatctggaaccaccgccttacaagaggccttaaaggagaagcaacaacatatagaacagctgttggctgaacgagatctggaacgggctgaagttgccaaagcaacgagccatatttgcgaagtggaaaaggagatcgctttgctcaaggctcagcacgagcagtatgtcgccgaagctgaggagaaacttcaaagagctcgtctgcttgtggaaagtgtgcggaaggagaaagtggatttgagcaaccagttagaagaagaaaggcgcaaggtcgaggatctgcagttccgtgtggaagaagaatctattacaaaaggtgatctggaaactcaaacgcagttggaacacgcacgcataggagagctggagcaaagtctcctgctggagaaagctcaagccgagcgcctcttgagggagctagccgacaatcggctgacaacagtggccgaaaaaagtcgggtgttgcagctggaggaagagctgacacttagacggggagaaatcgaagagctgcaacaatgtcttttgcacagcggacctccccctcctgaccaccccgacgccgcagagatcctcagactgcgtgagaggttgctgagcgccagtaaagaacatcagagagagagcggagtgctgagggacaaatacgaaaaagctctgaaggcatatcaggcagaggtggataagctcagggccgctaacgagaagtatgcccaggaggtagccggactgaaggataaggtgcagcaggcgacctcagagaacatgggcctgatggataattggaagtctaagctggatagtctggcttccgatcaccagaaaagcctcgaagacttaaaagcgactcttaatagtggtcccggagcccaacagaaagagattggtgaattaaaagctgtcatggaggggataaaaatggagcaccagctggaactgggaaacctccaggccaagcacgacttggagaccgcgatgcatgtgaaggagaaggaggcactgcgcgagaagctccaggaggcccaagaggagctggcaggattgcaacgccactggagggcccagttggaggtgcaagcgagtcagcacaggctcgagctgcaggaggcacaagatcagagacgggacgcagagctcagggtgcatgaactcgagaagctggatgttgaatatcgaggtcaagctcaggctattgagttcctaaaggaacagatctccctggctgagaagaagatgcttgactatgaaaggctgcagagagcagaggctcagggaaagcaggaagtcgaaagtcttcgtgagaaactgttggtggcagagaatagactccaggcagttgaagctctgtgttcttcacagcacactcacatgatcgaatccaatgatatttcagaggaaactatccggaccaaggagaccgttgagggcctccaggataaactgaacaaacgtgataaggaagttaccgccttgactagccaaactgaaatgcttcgagcccaggtatctgccctggagagcaaatgcaaaagcggggaaaaaaaagttgacgctctgctgaaagagaagcgcaggctggaggctgagcttgaaaccgtttctcgcaaaacgcacgatgcttccggtcaactggtgctaatcagccaggaactgctccgtaaggaacgcagtctcaacgaactgcgggtgctgctccttgaagctaatcgacactcacccggaccagaacgcgacctttctcgagaggtccacaaagcggagtggaggattaaagagcagaagctgaaggacgacattcggggactaagagagaagctgactggtcttgacaaggagaaatcactgtcagatcagagacgctacagcctcatcgacagaagctcagccccagagcttctgagactgcaacatcagctgatgagcacggaagatgccctgcgggacgccctggatcaggcccagcaggtcgagaagctgatggaagcaatgaggagctgccctgacaaggctcaaaccatcggcaactcagggagcgctaacggcatccatcagcaagacaaggcgcagaagcaagaggataaacattag

SEQ ID NO: 138048 - DNA, 5563 bp, Artificial Sequence
  derived and/or modified sequence
cggctcggccgcggggcgcgcaggcggctgctgggcggcctcggtgcgcgcctcccgccttcccagagacgtggcgcgaggcccgggccctgagcacctatcgcggggatccccggcgccaggagggggtgcagccggtgggcagcgccgcgcagggaggggccgcagcatcctcgccccccagcgcgcccgggcccgagaggaggaggccggggctctccgggcctcccgccgcttagcctgatgctggaaggacgaaggtgagtgaagatggcagagaggacgtgaccagcactcacccttgtccacctgcccagtggcaccgccatgcagaagcccagcggcctgaagccccccggccgtggggggaagcactccagccccatgggccggacatctactgggtcagcttcatcctcggcggcggtggccgctagctccaaggaaggctccccactgcacaaacagtcatctggaccctcctcctccccggccgcagctgctgcccccgagaagccgggccccaaggcggcggaagtgggggatgacttcctgggggactttgtggtgggcgagcgggtgtgggtgaacggcgtgaagccaggcgtggtgcagtatctgggagagacgcagttcgcaccgggccagtgggctggcgtggtgctggacgacccggtgggcaagaatgatggcgcggtgggcggcgtgcgctacttcgagtgcccggccctccagggtatcttcacgcggccctccaagctgacccggcagcccacggccgagggctcggggagtgatgcccactccgtggagtcgctgactgcccagaacctgtcattgcattcgggcacggccacgcccccgctgaccagccgcgtcatccccctgcgggagagcgtcctcaacagctccgtgaagactggcaacgagtcgggatccaacctctcagacagcggctctgtgaagcggggcgaaaaggacctgcgcctgggggaccgcgtgctggttggcgggacgaagactggcgtggtgcggtacgtgggggagacagactttgccaagggcgagtggtgtggcgtggagctggacgagccccttgggaagaatgatggggcggtggcgggcaccaggtacttccagtgcccacccaagtttggtctcttcgcgcccatccacaaagtgatccgtatcggcttcccatctaccagcccagccaaggccaagaagaccaagcgtatggccatgggtgtgtcagcactgacccacagtcccagcagttcctccatcagctccgtcagctctgtggcctcctccgtggggggtcggcccagccgcagtggcctgctcacggagacctcttcacgctacgcccgcaagatctcgggcaccacggccttgcaggaggcactgaaggagaagcagcagcacattgagcagctgctggctgaacgagacctggaacgggctgaggtggccaaggccacaagccacatctgcgaggtggagaaggagattgccctgctcaaggcacagcatgagcagtatgttgcagaagccgaggagaagctgcagcgagcccggctgctcgtggagagcgtgcggaaagagaaggtggacctgtccaaccagctggaggaggagaggaggaaggtggaggatctgcagttccgcgtggaggaggagtccatcaccaagggagacctggagacccagacgcagctggagcacgcgcgcattggggagctggaacagagcctgctactggagaaggcgcaggccgagcggctgctccgagaattagcggacaacaggctgaccacagtggccgagaagtcgcgcgtgctgcagctggaggaggagctcaccctgcgccgaggtgaaatcgaggagctccagcagtgcctgttgcactcgggtcccccacctccggaccacccagacgccgccgagatcctgcggctacgggagcggctgctctcggccagcaaggaacaccagagggagagtggggtgctgcgggataaatacgagaaggccctgaaggcctaccaggcggaggtggacaagctccgcgcggccaacgagaagtacgcacaggaggtggcgggcctgaaggacaaggttcagcaggccaccagcgagaacatggggctaatggacaactggaaatccaagctggactcgctggcctcggaccaccagaagtccctggaggacctcaaagccaccctgaactcgggcccaggcgcccagcagaaggagatcggcgagctgaaggcagtgatggagggcatcaagatggagcaccagctggagctgggtaacttgcaggccaagcatgacctggagaccgccatgcacgtgaaggagaaggaggccctgcgagagaagctgcaggaggcccaggaggagctggctgggctgcagcggcactggcgggcccagctggaggtgcaagccagccagcaccggctggagctgcaggaggcccaggaccagcgccgggatgccgagctgcgtgtgcacgagctggaaaaactggacgtggagtaccggggccaggcgcaggctatcgagttcctcaaggagcagatctcgctggccgagaagaagatgttggactacgagcggctgcagcgggcagaagcccagggcaaacaggaggtcgagagtttgcgggagaagctcctggtggctgagaacagactccaggcggtcgaggccctgtgctcctcccagcacacccacatgattgagtcgaatgacatttcagaggagacgatcaggacgaaggaaactgtggagggcctgcaggacaagctgaacaagagggacaaagaggtgacagccttgacctcccagaccgagatgctcagggcccaagtaagtgcgctggagagcaagtgtaagtcaggcgagaagaaggtggacgccctcctgaaggagaagcggcgcctggaggcagagctggagaccgtgtcccggaagacccatgacgcctcgggccagctagtcctcatcagccaggagctgctgcggaaggagcggagcctgaacgaactgcgggtgttgctgctggaggccaatcgtcactccccagggccggagagggacctgagccgtgaggtacacaaggctgagtggcggatcaaggagcagaaactcaaggatgacatccggggcctgcgtgaaaagctgaccgggctggacaaagagaaatccctgtcggatcagaggcgctactccctcatcgaccggtcctcggcgcccgagcttctgcggctgcagcaccagctgatgagcacggaggacgccctgcgggatgcgctggaccaggctcagcaggtggagaagctgatggaggccatgaggagctgccctgacaaggcccagaccatcggcaattccggttctgcaaacggcatccaccagcaggacaaagctcagaaacaagaggacaagcactgatcctgaggggatactgtggagcagcccagtccacaccagagccccacgcggctgcccggcagtacctcctccaggcaggagccgggactgtcactttggagacaaaacagtgtttgtaacaataacgtactcaccgccgcggacaatcccccaccccgatccctcgccagaccaggacgcttcctcaagcccagccttctacagagagtgtgaacggtacagccccggcctgacccggggaccttcagcctggacacccggcagcttctggagtttgtcagtggaggcagaggggatccggccaggcccctctgtccagaaggagctgccctgaggaccatcttagcggccctgtcctctttttccgcccattctccctcgggtctccccagaggggccggcgggggctggggagggggtaagtttatccatgcagacaccaagggggagcatccagtctttaagagccaagtgggggccccttttccgaagccacttccaggccaaggcagtcgccagggcttcttgtccccaccttctgaaccttcttcaaacagtagtacaagctcccctcagccagcctgcctgcccagcgaggcccccaggttcaaggtgttggcgggggcggagggcaggggaacgggatccttctcccgctgcccaccaacaccaacacacacacacctctaagctgctggccgaagatgtcaccaaggccaaagacacagtattatgaaggtttggaaacccctctcctcacctcccaccgtgaccttgggcaaaccctggctcggagcccagggcagaggcagctcagagtggaggctctaggcaggtttgacaaaggtcagtaatacggtttcccctggggttgaccagatgttccaaaatatctgcatccacctggagatgcagctaagtgggtccttatgtacacaccacgttcacacacacacagagggaccacgtgtgcacgcatgaccgtgtgggtggcggcgtttgctgtgaaccacgctcaggccacacagagacacatacttggtttctgggactgagacccaggcctggcaggaccgtgcctacagatactgcaaacgttcctacagcctagaggtgcgtatacacacccaagtacacgcagccaggcattcaggggtgtgtttgccacatggagcatcccttcctggtcttgccaggcacctgcacagagcgtctccagccccatctcctaacgggggctgggggtaagagaaatctaactgcgctcccccaacccctcgccctgccatcttcccctcaagcctgctaagttatcccaggcctgtgcgtggtggaaaaagccagccttggccctgcagcctccacctcgccgctgggggaccaacaggttgcttacagctttgcaccccggcatcagcacaggggtccctgccccaccctccggcagctcagggagtgttttcctgtgaggcctcccccatcagtggaccagagggagaagcccgatgccccatcccggctttcccgtaacgcacaggacacgtgtgcaattcataggaacggcccagatcgccctcatgagtgccacctggtacaggtaggtggcgctcacgttcctgcccaaatgcagcccatcggggagtcacagtcagtccccccggcccccctcccagtccctgttggctttcggtagctctcgcatgcagttctattaacagccgtctagaagcgatgctttagtggcctaacccagggtcaaatacagctctttctagcaaaatcaggcagctctgccccatcggtaggggcaccgattagtctactaacagccagaggtccatctagcagggtgccgggaggagctgagcccccggaggtgggctcctggtgacgggtgtccaagaagcggtttccttgggagcttctgcctccgtgggcctctcagcccgccccgtgtggccgcccgggtgtggctcagccatgtcccctccccaggtccttcattcacccctcccctccccacagtggaattgttgaagtgtggcgagtctgtgctcgggacaataaagcttgtgacaggtccaggaccccggca

SEQ ID NO: 138049 - DNA, 3141 bp, Artificial Sequence
  derived and/or modified sequence
atgcagaaacccagtggcctcaagccccctgggaggggtggcaaacacagctccccaatggggaggaccagcacaggatcagcatccagcagcgccgccgttgcagcctctagcaaggaaggcagtcctctccacaaacagtcttctggtccctcctcatctccggccgcagctgcggctcccgaaaagccagggccaaaggcggcagaggtcggtgatgatttcctcggggacttcgtggtgggcgaaagagtttgggtgaatggagtgaaacccggcgtagtgcagtacctgggcgagacccagtttgcccccggccagtgggccggcgttgtgctggacgacccagttgggaagaatgatggagctgtgggcggggtccggtattttgagtgtcccgccctgcaggggatttttactaggccaagcaaactgaccagacagcctaccgccgaaggaagcggaagtgatgcccacagtgtcgagagcttgaccgctcaaaacctcagcttacactctgggaccgctacacccccgttgacatccagagtgattcctctgcgcgaaagtgtcctcaattcatcggtgaagactggaaatgaaagcggaagtaatctgagcgattcgggctctgtgaaacggggggaaaaggatctgcggctcggagatcgcgtgctagtcggagggactaaaactggggtggtccgatatgtcggcgagaccgattttgccaagggggagtggtgcggggtggaacttgacgaacccctgggcaagaatgacggcgccgtggcagggacgcgatacttccagtgcccgcccaagttcggcctcttcgccccaattcataaggtcattaggattggcttcccctcaacgtctccggcaaaggccaagaaaaccaaaaggatggccatgggcgtttcggccttaacccactccccaagttcttcttctattagcagcgtatcctctgttgcgagttctgtaggcggcagaccctcaaggtctggcctcctcaccgagacaagctctaggtatgccaggaagatttcggggaccactgccctccaggaagctctgaaggagaaacagcagcatattgagcagctgctcgcagaacgtgatctggaaagggcggaggtggcaaaagccacttcccacatctgcgaagttgagaaggaaatcgcactcctgaaggctcagcatgagcaatacgtcgcagaagccgaagaaaaactgcagcgtgctaggctgttagtcgaatccgtcaggaaagaaaaagtggacctgtctaatcagctagaggaggaaagacgcaaagttgaggacctgcaatttcgggtcgaggaggagtccataacaaagggcgatctggaaacccagacacagctggagcatgctaggatcggtgagttagagcagtccctccttctggagaaagcacaggctgagagacttctgagggagctcgccgataatcggctcacaactgtcgctgagaagtcaagagtcctgcagctcgaggaagaattgactctgcgacggggcgaaatcgaagagctgcaacagtgcctgctccacagtgggccacccccccccgatcaccctgacgcagccgagatattaagactgcgtgagcgactgttaagtgcaagcaaggagcaccagcgtgagagcggcgtgctgagggacaaatacgagaaagctttaaaagcttaccaggcagaagtagacaagctgcgggccgctaacgaaaagtatgcccaagaagtggcaggtctgaaggataaagttcagcaagctaccagcgaaaatatgggtctaatggacaattggaagtccaagttagactccctcgcgtcggatcaccagaaaagcctggaggatctgaaggcgactttaaacagcggccctggtgcccagcagaaggagatcggcgaattaaaagccgtcatggaagggatcaaaatggagcaccaactcgagttaggaaacctccaggctaaacacgacctggagactgccatgcatgtaaaggagaaggaagcattaagagagaaactgcaggaagcccaagaggagcttgccgggcttcagaggcattggagagctcagctagaagtccaggcaagccagcaccgactggagctgcaagaagcacaggaccaaagaagagacgccgaactgagggtccacgagttagagaaactcgatgtggagtatcgtggccaagcccaagctatcgagttcttaaaagagcagatctctctggccgaaaaaaaaatgttggactacgaacgtttacagagggccgaagcacaggggaagcaggaggtggaatcattacgcgaaaagctcctcgtggccgagaaccgcctgcaggccgtggaggccctgtgctcttctcaacacactcatatgatagagtcaaatgacatcagcgaggaaacgattcgtacaaaggaaacagttgaggggctgcaagataagctgaacaaacgcgacaaggaggttacggcactgactagccagaccgagatgctgagggcccaggtgtcagccttggaatccaaatgcaagagtggcgaaaaaaaagttgacgctctgctcaaagagaagcgtcggctcgaggccgaattggaaactgtctctcgtaaaacccacgatgcatccggacaactcgtgctgatcagccaagagcttctgcggaaggaaagatcacttaatgaactgcgcgtgttattgttggaggcgaatagacattcacctgggcctgaacgagacctgagcagggaagtgcataaagccgagtggcggatcaaggagcaaaagctgaaggacgatattcgcggtttgcgggaaaagcttactggactggacaaagagaaaagcctgtctgatcaacggcgctattccctgatagatcgctcaagtgcaccagaactgctacggttgcagcaccagctgatgagcacagaagacgcgctgcgggacgcccttgatcaggcccagcaagttgagaagttgatggaagccatgagaagttgcccagataaagcacaaaccattggcaattctggatcagccaacggtatccaccaacaggacaaggctcaaaagcaggaagacaaacattag

SEQ ID NO: 138050 - DNA, 3141 bp, Artificial Sequence
  derived and/or modified sequence
atgcagaagccttcagggctgaaaccacccggtcgcgggggcaaacactccagtccgatggggagaaccagtacaggctccgcctcctcttcagccgccgtagcagcctcaagtaaggagggcagtcctctgcacaagcagtcctccggaccttcgtctagtccagccgctgctgctgcccctgagaaaccaggcccaaaagctgccgaagtgggagacgatttcctgggcgattttgtggtcggggaacgggtctgggtgaacggggtaaagccaggcgttgttcagtatctgggcgagacccagttcgctcccggccaatgggcaggcgtggttttagacgatcctgttgggaagaatgacggggccgtgggcggggtacgatatttcgagtgccccgctcttcagggaatttttactcggccaagcaagctgactcgtcaaccaactgctgaaggaagtggctctgacgctcactctgtggagtcgcttactgcacagaatctttctctgcactctggaacagcaactcccccactcacttccagagtcatccctctcagggagtccgtactcaactcttctgtcaagactggcaatgagagtggttccaacctgagcgattccggctccgtgaagagaggtgagaaagacctcagactaggcgacagagtacttgtggggggtactaaaactggagtggtgagatatgtcggcgaaactgacttcgcaaagggagaatggtgcggagtcgaattggatgaaccactgggcaaaaatgacggggctgtcgccggcacgagatattttcagtgtcctcccaagtttgggctgtttgcaccaattcataaagttattcggatcgggttcccttcaaccagccccgctaaggccaagaaaacaaagcggatggcaatgggagtttcagctctgacgcactccccctctagctcaagtatctcatcagttagctccgtcgctagctccgtgggaggccgtcccagtagatcgggtcttctgacagaaacctctagccgctatgctcgaaagatcagtggaactactgcgctccaagaagcccttaaagaaaaacaacagcacattgagcagctgctagccgagcgcgacttggagagggctgaggtcgcgaaagctactagccatatttgtgaggtagaaaaagaaattgcgctcttgaaggcgcagcatgagcagtatgttgccgaggctgaggagaaactgcagagagccaggcttttggtcgagtcagtgagaaaagagaaggtggatctctcaaaccagctcgaagaagagaggaggaaggttgaggacctgcagtttcgagtcgaagaggaatcgatcactaagggggacctggagactcagactcagctggaacacgcaaggatcggcgagctggagcagtccctgctgttggagaaagcccaagccgagcggttattgcgggagctcgccgataatagactgactaccgtggctgaaaagagccgagtccttcagctcgaggaggagcttactctacgtcggggggagatcgaagaactgcagcaatgtctgctgcatagcggccccccgcccccagatcatccagatgccgccgagatcctgcgactccgcgagagactgttgagcgcatcaaaagagcatcagcgagagtccggcgtcctgcgtgacaagtatgaaaaagctttaaaggcctaccaagcagaggtcgataaattgagggccgctaacgagaaatatgcgcaagaggtagcaggccttaaagataaagttcagcaagctacttctgagaatatgggactgatggacaactggaaaagcaaactggatagcctcgcttctgatcatcagaaatctctcgaagatttgaaggcaaccctgaattccggaccaggagcacaacagaaggagatcggcgagctgaaagctgtgatggagggcatcaaaatggaacaccagttggaactgggcaacctgcaggccaagcacgacctggagacggccatgcatgtgaaggagaaggaggccctacgagagaaactgcaagaggcgcaagaggaacttgctggtctgcagagacattggcgagcccagcttgaggttcaagctagtcagcacaggctcgaactgcaggaggcgcaggaccagagacgcgacgctgagcttcgagtccacgagctcgaaaagcttgacgtggagtacagaggccaagcgcaggcaattgagttcttaaaggaacagatctccctggctgaaaaaaagatgctggattacgaaaggctgcagcgcgccgaagcccagggcaagcaagaggtggaatctcttcgcgaaaagttacttgttgccgagaataggctccaggctgtagaggccctgtgctctagtcagcatacgcacatgatcgaaagcaatgatatctctgaagagactatccgaacaaaggagacagtggaagggcttcaggacaagctgaataaaagagataaagaggtcactgctttaaccagtcagactgagatgctgcgcgcccaggtgtcggctttagagagtaagtgtaagtccggcgaaaagaaagttgatgcccttctcaaagagaagagaagacttgaagccgaactcgagacagtctccagaaaaactcatgatgcaagcggccagctggttctcatatcccaggaactcctgagaaaagagcgttcactcaacgagctaagagtgctgttacttgaagccaacaggcattcacctggacccgaacgcgatttgtccagagaggtgcacaaagccgagtggaggatcaaggagcagaagttgaaagatgatatccgcggtttacgggagaaattgaccggtctggataaggagaaatctctctctgatcagcgtagatactccctgatcgatagatcatctgcacccgagttgttgagactgcagcatcagctgatgagcacggaggacgcgctacgggacgccctggaccaggcccaacaggtcgagaagctgatggaagccatgcggagttgtccggataaggctcagacgatcggcaatagcggaagcgctaacgggatccatcagcaggacaaggcacagaaacaagagaacactcactag

SEQ ID NO: 138051 - DNA, 3141 bp, Artificial Sequence
  derived and/or modified sequence
atgcagaagcccagcggcctgaagcccccaggccggggcggcaagcacagcagccccatgggccgcaccagcactggaagtgccagcagcagcgctgctgtggccgccagcagcaaggagggcagccccctgcacaagcagagcagcggccccagcagcagccctgctgctgctgctgcccctgagaagccaggccccaaggctgctgaggtgggagatgacttcctgggggactttgtggtgggggagcgggtgtgggtgaatggagtgaagccaggagtggtgcagtacctgggggagacccagtttgcccctggccagtgggccggcgtggtgctggatgatcctgtgggcaagaatgatggagctgtgggcggcgtgcgctactttgaatgtcctgccctgcagggcatcttcacccggcccagcaagctgacccggcagcccacagctgagggcagcggcagtgatgcccacagcgtggagagcctgacagcccagaacctgagcctgcacagcggcacagccaccccacccctgaccagcagggtcatccccctgcgggagagcgtgctgaacagctctgtgaagacaggaaatgaaagtggcagcaacctgagtgacagcggctctgtgaagagaggagagaaggacctgcggctgggggacagagtgctggtgggcggcaccaagacaggagtggtgcgctacgtgggggagacagactttgccaagggggagtggtgtggggtggagctggatgagcccctgggcaagaatgatggagctgtggccggcacccgctacttccagtgcccccccaagtttggcctgtttgcccccatccacaaggtgatccgcatcggcttccccagcaccagccctgccaaggccaagaagaccaagaggatggccatgggcgtgtctgccctgacccacagccccagcagcagcagcatcagctctgtgtcctctgtggccagctctgtgggcggccggcccagccgcagcggcctgctgacagagaccagcagccgctatgccaggaagatcagcggcaccacagccctgcaggaggccctgaaggagaagcagcagcacatcgagcagctgctggccgagcgggacctggagcgggcagaggtggccaaggccaccagccacatctgtgaggtggagaaggagatcgccctgctgaaggcccagcacgagcagtatgtggccgaggccgaggagaagctgcagagggcccggctgctggtggagagcgtgaggaaggagaaggtggacctgagcaaccagctggaggaggagaggaggaaggtggaggacctgcagttccgggtggaggaggagagcatcaccaagggggacctggagacccagacccagctggagcacgcccgcatcggggagctggagcagagcctgctgctggagaaggcccaggccgagcggctgctgcgggagctggccgacaaccggctgaccaccgtggccgagaagagccgggtgctgcagctggaggaggagctgaccctgcggcggggggagattgaggagctgcagcagtgcctgctgcacagcggccccccacctccagaccacccagatgctgctgagatcctgcggctgcgggagcggctgctgagcgccagcaaggagcaccagcgggagagcggcgtgctgcgggacaagtatgagaaggccctgaaggcctaccaggccgaggtggacaagctgcgggccgccaatgagaagtatgcccaggaggtggccggcctgaaggacaaggtgcagcaggccaccagcgagaacatgggcctgatggacaactggaagagcaagctggacagcctggccagtgaccaccagaagagcctggaggacctgaaggccaccctgaacagcggccctggggcccagcagaaggagatcggggagctgaaggctgtgatggagggcatcaagatggagcaccagctggagctgggcaacctgcaggccaagcatgacctggagacagccatgcacgtgaaggagaaggaggccctgcgggagaagctgcaggaggcccaggaggagctggccggcctgcagaggcactggagggcccagctggaggtgcaggccagccagcaccggctggagctgcaggaggcccaggaccagaggagagatgctgagctgcgggtgcatgagctggagaagctggatgtggagtaccggggccaggcccaggccatcgagttcctgaaggagcagatcagcctggccgagaagaagatgctggactatgaaaggctgcagagagctgaggcccagggcaagcaggaggtggagagcctgcgggagaagctgctggtggctgaaaatcggctgcaggccgtggaggccctgtgcagcagccagcacacccacatgattgagagcaatgacatcagcgaggagaccatccgcaccaaggagaccgtggagggcctgcaggacaagctgaacaagagggacaaggaggtgacagccctgaccagccagacagagatgctgcgggcccaggtgtctgccctggagagcaagtgcaagagcggggagaagaaggtggatgccctgctgaaggagaagaggcggctggaggccgagctggagaccgtgtccaggaagacccatgatgccagcggccagctggtgctgatcagccaggagctgctgaggaaggagaggagcctgaatgagctgcgggtgctgctgctggaggccaacagacacagccctggccctgagcgggacctgagccgggaggtgcacaaggccgagtggaggatcaaggagcagaagctgaaggatgacatccggggcctgcgggagaagctgaccggcctggacaaggagaagagcctgagtgaccagaggcgctacagcctgattgacaggagcagcgcccctgagctgctgcggctgcagcaccagctgatgagcacagaagatgccctgagagatgccctggaccaggcccagcaggtggagaagctgatggaggccatgaggagctgcccagacaaggcccagaccatcggcaacagcggcagcgccaacggcatccaccagcaggacaaggcccagaagcaggagaacacccactag

SEQ ID NO: 138052 - DNA, 3141 bp, Artificial Sequence
  derived and/or modified sequence
atgcagaagcccagcggcctgaagccccccggccggggcggcaagcactctagccctatgggaaggacaagtaccggctccgccagcagcagtgctgccgtggcagcgtctagcaaggagggttcccccctacacaaacaaagcagcggacccagcagtagtcctgctgccgccgccgcacctgaaaagcccggccccaaagcggctgaagtgggtgacgattttctgggtgattttgtagtgggcgagcgggtctgggttaacggggtcaaacccggggttgtgcagtatttaggtgagacacagtttgctcctggacagtgggccggtgttgtgcttgatgaccccgtggggaagaacgacggagcagtgggaggcgtcaggtatttcgagtgtcccgccttgcagggcatcttcactaggccgtcgaagcttacacgccagcctacggcagaggggagcggcagtgatgcacacagcgtagaaagtctaaccgcacagaacctcagcctgcacagcgggactgctactcctcctttgacgagcagagtgatccccctgagagaaagcgtgctcaactcttccgtgaaaacaggcaatgaatctggaagtaatctgtcagactctggatctgtgaagcggggggaaaaggacctcagactcggtgatcgcgtgctcgtggggggcactaaaacaggagtcgtgcgctatgtaggcgagacagactttgccaagggagagtggtgcggtgtcgagctggacgagcccttggggaagaacgacggtgccgtcgcgggcaccagatacttccagtgtccccctaaattcggactcttcgctcctatccataaggtcattcggattgggttcccttcgacatcccctgctaaggccaagaagaccaagaggatggcgatgggggtgagcgcattgactcactcaccctcttcttcctcgatttcttctgtcagcagtgtggcttcttctgttggcggacggccaagccggtcaggactgttgaccgaaacctcttctcgctacgcaaggaagatatccggtacaactgccctacaagaggcccttaaggagaagcagcagcatatcgagcagctgttggccgaacgggatcttgaacgggcagaggttgccaaggccacatcccatatctgtgaggtcgaaaaagagatcgcactgcttaaagcccaacacgagcagtacgtcgctgaagccgaggagaaactgcaacgcgcccgactgcttgttgaatcagtacgtaaggagaaggttgacctctctaaccagcttgaagaagagaggcgaaaagtcgaggatttacagttcagagtggaggaagagtccattaccaagggagatctggaaacccagacacagctggaacatgcgcgcataggcgaattggagcagagtttgctactggaaaaagctcaggctgagaggctgttgcgtgagctcgccgacaataggctgaccacagttgccgaaaagagcagggtgctgcagctggaggaagagctgactttgagaaggggggagatagaagaactacagcagtgtctcctgcacagcggccctccgccccctgatcatcctgatgccgccgaaatacttcggctgcgcgaacggctgctgagcgcgtctaaagagcatcagcgggagtctggtgtcctgcgagataaatacgagaaggctctgaaagcctaccaagccgaagtcgacaaactgcgcgcagcgaacgaaaaatacgcgcaggaagttgccggcctaaaggacaaagtgcaacaggccacatccgagaatatgggcctgatggacaactggaaatctaaactggattccctggccagcgaccaccagaagagtctggaggatctcaaagccacactgaactctggccctggtgcccagcaaaaggagatcggtgaactcaaggccgtcatggagggtataaaaatggagcaccagttggagctggggaatctgcaagccaagcacgatcttgaaacagcaatgcatgttaaggaaaaggaggccttgcgcgaaaagttgcaagaggcacaagaggaactggccggtctgcaacggcactggcgggcccaactggaagtgcaggctagtcaacaccggctggaactgcaggaggcccaggatcagcgcagggacgcagaactgagagtccatgagctggagaaacttgacgtggaatatcgtgggcaggctcaggcgattgagtttctgaaagagcagattagtctcgctgaaaagaagatgctggactacgaaaggttacagagagccgaagcacaaggtaagcaagaagtggagtcactcagggaaaagctcctggtggccgaaaatagactccaggcagtggaagccctatgtagctcacagcacacccacatgatcgagtccaacgacattagtgaggagacaatacgtaccaaagagaccgtggaggggctgcaagacaagctgaacaaaagggacaaggaagtgaccgcgctgacctcccagaccgagatgctgcgagcccaggtctccgccttagagtctaagtgcaagtccggcgaaaaaaaggtcgatgcactgcttaaagagaagcggaggcttgaagcggaattagagacagttagccgaaaaacgcacgatgcgagcgggcagctggtcctcattagccaggaactgctaagaaaggagcgctcactgaacgaattgagggtccttctgctggaagccaatcgacattctccaggccccgaacgcgatctttcccgtgaggtgcacaaggcggagtggcggataaaagaacagaagctgaaagacgacatacgcggcctgcgggaaaagctcacaggcctcgacaaagagaagtctcttagcgaccaaaggagatattctctcattgatcggagctctgctccagagctgctgcgcctccagcatcagctcatgagtactgaggatgccctgcgggacgctttagaccaagctcagcaagtagagaagctgatggaagctatgaggagctgtcccgataaggcccagacaataggcaatagcgggagtgctaacggaatacatcagcaagataaggctcaaaagcaggaagacaagcactag

SEQ ID NO: 138053 - DNA, 3141 bp, Artificial Sequence
  derived and/or modified sequence
atgcagaagcccagcggcctgaagccccccggccggggcggcaagcactcctctccgatgggcagaacctctacaggatcagcttccagcagtgcagctgtagcagcgagctcgaaagaaggtagccccttgcacaaacagtcttccggaccctcctctagccctgcagcagctgccgccccagagaagccagggccaaaggcggccgaagttggcgacgatttcctcggcgactttgtggtcggtgagagggtctgggtcaatggtgtgaaacccggtgtggtgcagtacctcggcgagacacaatttgctccaggacagtgggccggcgtcgtattggacgatcctgtcggaaaaaacgacggggccgtgggcggtgttagatactttgagtgtcctgcgctgcagggtatctttacaaggccgtccaagctgacgcggcagcccacagctgaaggctctggaagtgacgcacatagtgtggagagtctcacggcccagaacctgagtttgcatagtgggaccgcaactcccccactgacttcaagagtaattcccctgcgggagtcagtcttgaactcatccgtaaagacagggaacgagtcagggtctaacctatctgattccggatctgtcaagcgcggcgagaaagatctgcgcctcggtgacagggtccttgtgggcggcaccaaaactggcgtggtaagatacgtgggcgagaccgactttgcgaaaggtgaatggtgtggggtggaactcgacgagcccctggggaagaacgatggagcggttgcggggacccgctattttcagtgtccccctaaattcggcttattcgcaccaatccacaaggtgattaggataggctttcctagtaccagcccagcaaaggctaagaaaaccaagcgcatggctatgggcgtgtccgctttgacgcatagcccatcctctagttccataagttctgtgtcatcagtagccagctccgtgggaggacgaccaagtcgctccggtctgcttactgaaacttcctctcgatacgccagaaaaataagcggcacaacagcactgcaggaggcattgaaagagaagcaacagcatattgagcagctcttagccgagagagatctagaacgggccgaggtggctaaagcaaccagccacatttgtgaagttgaaaaggaaattgctctcttaaaggcccagcacgagcaatatgtagctgaggccgaagagaaattgcagcgtgccaggctgctggtggaatctgtacgtaaggagaaagttgatttatccaaccagctcgaggaggaaagaaggaaggttgaagacctgcagtttcgcgtggaagaggaatccataacaaagggtgacctcgaaacccagacccagcttgagcacgcaaggatcggcgagcttgaacagagcctgttgttggagaaggcgcaggctgagcgcctgctgagggaactggcagataataggctaacgactgtagccgagaagtcaagagttctgcagctggaggaggagctgaccttgagacgaggagaaatcgaggagcttcagcagtgtctgttgcattccggtccccctccgcctgatcaccccgacgccgcagagatcctccgtttaagagaacggctgctctctgcttctaaagagcatcaacgagaatcgggtgtgcttcgggacaagtatgagaaggcgctcaaggcctatcaggctgaggtcgacaagctgagagcagctaacgagaaatatgctcaggaggtcgcagggttgaaggacaaggtgcaacaggctacttccgagaatatggggttaatggacaactggaagtctaaattagactcactagcaagcgaccatcagaaaagtctggaagatctgaaagcgacactcaactcaggcccaggggcacagcaaaaggagatcggggaattaaaagctgtgatggaggggatcaagatggaacaccagctggagctggggaacctgcaggcaaaacatgacctcgagacagctatgcacgtgaaagagaaggaggccctacgcgaaaagctgcaagaggcgcaggaggagctcgccggcctgcagcgccattggcgggctcagttagaagtgcaggcaagtcagcaccgacttgagctccaggaagcccaggaccaaaggcgcgacgctgaactacgtgtacacgaactcgaaaagttggacgtcgaatacaggggccaggctcaagctatcgagttcttgaaagaacagatctccctcgcggagaaaaagatgctggattacgaacgattgcagagggctgaagcccaagggaaacaggaagtggaaagcctaagggaaaaactgctggtggctgaaaacaggctgcaagcagtggaggcactctgtagctcccagcatactcatatgatagagagtaatgacatctcggaggagaccatcaggaccaaggagaccgtggaaggattgcaagataagctcaacaagagggacaaggaggtgactgcactgacctcccaaactgagatgctccgggcacaggtcagtgccctcgagtctaaatgtaagagcggagaaaaaaaagttgatgccctgctcaaggagaagagacgcctcgaggctgaactggagacagtgagtcgcaagacacacgacgcctccgggcagcttgttttaataagccaagaactcctgcgaaaggagaggtcactgaacgagctccgcgttttactgctagaggctaaccgacatagcccagggcccgaaagagacctgtcacgcgaggtgcacaaagctgaatggagaattaaggaacagaagttgaaggacgatatccgtggtctccgggagaaattgaccggcctcgacaaggagaagtcactgtccgatcagcgacgctactcactgatcgatcgctcttccgcgcctgagctgctccgactgcagcaccagttgatgtctacagaggatgccctgagagacgctttggatcaagctcagcaggttgaaaaacttatggaagctatgcgcagttgcccagacaaagcccaaacgatcgggaactcagggtcagctaatggaattcatcaacaggataaagctcagaagcaggagaacactcattag

SEQ ID NO: 138054 - DNA, 3141 bp, Artificial Sequence
  derived and/or modified sequence
atgcagaagccttccggcctgaagccccctggtcggggtgggaagcacagcagccctatgggtagaacctccacaggctctgcctcgagctcggccgctgtggctgcatccagtaaagaaggatcaccactgcacaaacagagcagcgggcctagcagtagcccagctgctgccgcagcaccagagaagccaggccctaaagcagccgaggtgggcgacgatttcctgggagacttcgtggtgggggaaagggtctgggtcaatggagttaaaccaggggtggtccagtacctcggggaaactcagtttgccccaggtcagtgggccggagtggtgctcgacgatcccgtcgggaagaacgacggtgctgtggggggagtccgctatttcgagtgccctgccctccagggcatcttcacccgcccatcaaaactgactagacaaccaactgccgaaggtagcggttcagatgcccacagcgtagaaagtctcacggctcagaacttgtccctacacagcggaactgctacgccacccttgacctctagagtgattccccttagagagtctgtgttgaattcaagtgtgaaaacgggcaacgagtccgggagcaacctgtctgactcaggatcagttaaacgcggtgagaaagatctccggctcggagacagagtgctggtcggtggtactaagaccggggtcgtcagatacgtgggcgaaactgattttgccaagggggagtggtgcggcgtagagttagacgagcccctgggaaagaacgatggggctgtcgccggaaccagatactttcagtgcccccctaaattcggcctctttgccccaattcacaaagttatccggatcggcttcccttcgacgtctccagccaaggctaagaaaacaaaaaggatggcgatgggagtatctgctttaacgcactccccctcttcctcgagcatcagcagcgtgagcagtgtggcttcctcagttgggggaaggccttcccgctcaggactgctgactgagacatccagcaggtacgctagaaagatctccggcaccactgcacttcaggaggccctgaaagaaaagcagcagcacatcgaacagctgcttgcggaaagagacctcgaaagggcggaagtggcaaaggcaacctcacatatctgcgaggtggaaaaagagatagcccttcttaaggcccaacacgagcaatacgtcgcggaggccgaagaaaagctgcagcgtgctcggcttctagtcgaaagcgtacggaaggagaaagtcgacctgtcgaatcagctggaggaggagcgacgcaaagtggaggatttgcaattccgcgtggaggaggagtcaataaccaaaggggatctggagactcagacccagctggaacatgcaagaatcggcgaactggaacagagtttgctactggaaaaggcacaagctgaacggttactccgagaattagctgataatagactgacaaccgtggctgagaagagcagagttctgcaattggaggaagagctaacccttagaaggggtgaaatcgaagagctacagcaatgccttctgcattccggtccacccccacccgaccacccagatgcagcagagattctacggctcagggagaggctgctctcagcctccaaggagcaccaaagagaatcaggcgtgttacgagacaagtatgaaaaagcactaaaagcttaccaggctgaggtggataaactccgagccgcaaacgaaaagtatgcacaggaggtcgcgggtttgaaagacaaagtccagcaggccacctccgagaatatgggcctaatggataattggaagtccaagctggattcattagcatccgatcaccaaaagtcattggaagatctcaaagccactcttaactcaggtccaggagcacagcagaaagagattggcgagctgaaggccgttatggaaggaatcaagatggagcaccagctcgagcttgggaacttgcaggccaaacatgacttagagacagcaatgcacgtcaaagaaaaggaagccctacgggagaagctgcaggaagcgcaggaagagctcgctggtttgcagcggcattggcgggcacaactcgaggtgcaggcttcccagcatcgattagaactgcaggaagcacaggaccaacggagggacgccgagttacgcgttcatgaactggagaaactcgatgtcgagtaccggggacaggctcaggctatcgagtttctgaaggaacagatctcccttgcagagaagaagatgctggattatgagcgattacagagggcagaggcgcaggggaagcaggaggtggagtcactgagagagaaactgttggtggcagagaatcgccttcaggctgttgaggcgctctgttcatcccagcacacccatatgatcgagagcaatgacatctccgaggagactattagaaccaaagaaacagttgagggcctgcaagacaagctgaacaaaagggacaaagaggttacagcactgacgtctcagaccgagatgttgcgggcacaagtgagcgcgttggagtcaaagtgcaagagtggtgaaaaaaaagtggacgctctcctgaaggagaaacgcaggttggaagctgagcttgagacagtttcaagaaaaactcatgatgcgtctggccaacttgtactcatctcccaggagttgcttcgaaaagaaaggagccttaatgagttgcgagtactactactagaggctaaccggcactctcctggaccggaacgcgacctctctagggaggtgcacaaggcggaatggaggatcaaggaacaaaaattgaaggacgacattcgagggttgcgggaaaagttgactggactggacaaggagaaaagtctgtccgaccaaagaagatattcactcatcgacaggtccagcgctcccgagctgctccgcctacagcatcagttgatgagtaccgaggacgcactgcgcgatgcattggaccaagcccaacaagttgagaagctgatggaagccatgcgctcttgccctgataaagctcagactataggaaacagtggctcagccaacggaattcatcagcaggataaagctcagaaacaggaagataagcattag

SEQ ID NO: 138055 - DNA, 3141 bp, Artificial Sequence
  derived and/or modified sequence
atgcagaagcccagtgggctaaaacctcctggcagagggggtaaacacagttctccaatgggccgtacatcaacaggcagtgctagtagctcggccgctgtcgcagcctccagcaaggagggctccccactgcataagcagtctagtggaccttcaagttcccccgctgcggcagctgcccctgagaaaccaggccctaaagctgcagaagtgggggatgacttcctaggcgacttcgtggtcggagagagggtttgggtcaatggcgtcaagcctggcgttgtccaatacttgggggagacacagtttgccccaggccaatgggccggtgtggtcctcgacgatcccgtgggtaaaaatgatggggctgtggggggtgtgcgctactttgaatgtcccgctttgcaaggaatttttacccggccaagtaagcttacacggcaacccacagctgagggcagtggaagcgacgctcattcagtcgagtcactgactgcccagaatctgagtctccactcaggaacagcaacccctcccctgaccagccgcgtgatccctctgcgcgagtccgtgctgaactctagtgtcaagacaggtaatgagagcgggagcaacctgtccgattctggttccgtcaaacgcggtgagaaggacctgcgacttggagatcgggtcctcgtgggcggaactaagacaggagtcgtgcggtacgtcggcgagactgacttcgcaaaaggcgagtggtgcggggtggagcttgatgagccactggggaagaacgatggcgcagtagccggaacacgatattttcaatgtccacccaagtttggcttatttgccccaatccacaaggtgatacgcatcggattccccagcacaagtccagcaaaggccaaaaaaaccaaaagaatggccatgggcgtgtccgctttaactcacagtccatcaagtagcagcataagctctgtgagcagcgtggcctccagtgtggggggacgaccctcacggagcgggctacttaccgaaacttcctcccgctacgcacgcaaaatctcagggaccactgcactgcaggaagcactgaaggagaagcagcagcatatcgagcagctgctcgccgagagggacctagagcgagctgaggtagcgaaagccaccagtcatatttgtgaagtggaaaaagagatcgcactgctaaaggcacagcatgagcaatacgtggctgaagccgaagagaaattgcagcgggcacgtctactggttgaatctgtgagaaaggagaaagtcgatttgagcaatcagttggaagaagaaagacgtaaagttgaagatctgcagtttcgcgtcgaagaggagagtattacaaagggcgatttagagacacagactcagctggaacacgcaagaattggtgaattagaacagtctctgctgttggagaaggctcaggctgagcgactgctccgggagttggctgataaccggctgacgacagtggccgagaaatccagggttcttcagctggaggaggaactgacgctgcgacggggtgagattgaggagctgcaacagtgcctacttcactcaggacctcctcccccagatcacccagacgccgcagagatcttacgccttagggaaagacttctgtctgcctctaaagagcatcagcgggagagcggggtactcagggataaatatgagaaggcactcaaggcataccaggccgaggttgacaagctccgggcagcaaatgagaagtacgcgcaagaggtagcagggctgaaagacaaagttcagcaggcgacgtctgaaaatatggggttaatggataattggaaaagcaagttagactcactggcctctgaccatcagaagtctttggaggatctgaaggccaccttgaattccgggcctggggctcagcaaaaggaaattggcgaactcaaggccgtgatggaaggcatcaagatggagcatcagctcgaattgggcaatctgcaggccaagcacgaccttgaaacagctatgcatgtaaaggaaaaggaagctctccgtgaaaagcttcaggaggcccaggaggagctagcgggacttcaaaggcattggagggcccaactagaggtccaggcctcccagcataggttagaactgcaggaggctcaggaccagagaagggatgccgagctgcgcgtgcatgagctcgaaaagttggatgtggagtaccggggtcaagctcaggccatcgagtttctgaaagagcagatttcccttgccgagaaaaaaatgctcgattacgaacgccttcagagggcggaagcccaaggcaagcaggaggtggaatccctgagggagaagctccttgtggcggaaaacaggctgcaggccgttgaggccctctgctcatcccagcacacccacatgatagagtctaatgacatctccgaagagaccattagaacaaaagagaccgttgaaggccttcaggataagttgaacaaacgcgacaaagaggttactgctctgacaagccagaccgagatgctccgggcacaggtgtctgccctcgagtctaagtgcaagagcggcgagaagaaagtggacgcgctcctgaaggaaaagaggcggttggaagccgaactggaaacggtgtccagaaaaacacatgacgctagcgggcagctcgtgctgatatctcaggagctgctacgcaaagaacggtcactgaacgagttaagggtgctgctcctggaggccaataggcacagtccgggacctgaacgggacctgagccgtgaggtgcataaggccgaatggcggattaaagagcagaagctgaaagatgatatcaggggcttacgggagaagttgaccggcctcgataaagagaagagtctcagcgatcagcgcaggtatagcctcattgaccgaagtagcgcccctgagctgctgcggctccagcaccagttgatgagcaccgaagatgccctccgtgatgccctggatcaggcacagcaggttgaaaagttgatggaggctatgaggtcctgcccagataaagctcagactattgggaactcgggctccgctaatggcattcaccagcaagataaagctcagaaacaggagaacactcattag

SEQ ID NO: 138056 - DNA, 3141 bp, Artificial Sequence
  derived and/or modified sequence
atgcagaagcccagcggcctgaagccccccggccgtggggggaagcactccagccccatgggccggacatctactgggtcagcttcatcctcggcggcggtggccgctagctccaaggaaggctccccactgcacaaacagtcatctggaccctcctcctccccggccgcagctgctgcccccgagaagccgggccccaaggcggcggaagtgggggatgacttcctgggggactttgtggtgggcgagcgggtgtgggtgaacggcgtgaagccaggcgtggtgcagtatctgggagagacgcagttcgcaccgggccagtgggctggcgtggtgctggacgacccggtgggcaagaatgatggcgcggtgggcggcgtgcgctacttcgagtgcccggccctccagggtatcttcacgcggccctccaagctgacccggcagcccacggccgagggctcggggagtgatgcccactccgtggagtcgctgactgcccagaacctgtcattgcattcgggcacggccacgcccccgctgaccagccgcgtcatccccctgcgggagagcgtcctcaacagctccgtgaagactggcaacgagtcgggatccaacctctcagacagcggctctgtgaagcggggcgaaaaggacctgcgcctgggggaccgcgtgctggttggcgggacgaagactggcgtggtgcggtacgtgggggagacagactttgccaagggcgagtggtgtggcgtggagctggacgagccccttgggaagaatgatggggcggtggcgggcaccaggtacttccagtgcccacccaagtttggtctcttcgcgcccatccacaaagtgatccgtatcggcttcccatctaccagcccagccaaggccaagaagaccaagcgtatggccatgggtgtgtcagcactgacccacagtcccagcagttcctccatcagctccgtcagctctgtggcctcctccgtggggggtcggcccagccgcagtggcctgctcacggagacctcttcacgctacgcccgcaagatctcgggcaccacggccttgcaggaggcactgaaggagaagcagcagcacattgagcagctgctggctgaacgagacctggaacgggctgaggtggccaaggccacaagccacatctgcgaggtggagaaggagattgccctgctcaaggcacagcatgagcagtatgttgcagaagccgaggagaagctgcagcgagcccggctgctcgtggagagcgtgcggaaagagaaggtggacctgtccaaccagctggaggaggagaggaggaaggtggaggatctgcagttccgcgtggaggaggagtccatcaccaagggagacctggagacccagacgcagctggagcacgcgcgcattggggagctggaacagagcctgctactggagaaggcgcaggccgagcggctgctccgagaattagcggacaacaggctgaccacagtggccgagaagtcgcgcgtgctgcagctggaggaggagctcaccctgcgccgaggtgaaatcgaggagctccagcagtgcctgttgcactcgggtcccccacctccggaccacccagacgccgccgagatcctgcggctacgggagcggctgctctcggccagcaaggaacaccagagggagagtggggtgctgcgggataaatacgagaaggccctgaaggcctaccaggcggaggtggacaagctccgcgcggccaacgagaagtacgcacaggaggtggcgggcctgaaggacaaggttcagcaggccaccagcgagaacatggggctaatggacaactggaaatccaagctggactcgctggcctcggaccaccagaagtccctggaggacctcaaagccaccctgaactcgggcccaggcgcccagcagaaggagatcggcgagctgaaggcagtgatggagggcatcaagatggagcaccagctggagctgggtaacttgcaggccaagcatgacctggagaccgccatgcacgtgaaggagaaggaggccctgcgagagaagctgcaggaggcccaggaggagctggctgggctgcagcggcactggcgggcccagctggaggtgcaagccagccagcaccggctggagctgcaggaggcccaggaccagcgccgggatgccgagctgcgtgtgcacgagctggaaaaactggacgtggagtaccggggccaggcgcaggctatcgagttcctcaaggagcagatctcgctggccgagaagaagatgttggactacgagcggctgcagcgggcagaagcccagggcaaacaggaggtcgagagtttgcgggagaagctcctggtggctgagaacagactccaggcggtcgaggccctgtgctcctcccagcacacccacatgattgagtcgaatgacatttcagaggagacgatcaggacgaaggaaactgtggagggcctgcaggacaagctgaacaagagggacaaagaggtgacagccttgacctcccagaccgagatgctcagggcccaagtaagtgcgctggagagcaagtgtaagtcaggcgagaagaaggtggacgccctcctgaaggagaagcggcgcctggaggcagagctggagaccgtgtcccggaagacccatgacgcctcgggccagctagtcctcatcagccaggagctgctgcggaaggagcggagcctgaacgaactgcgggtgttgctgctggaggccaatcgtcactccccagggccggagagggacctgagccgtgaggtacacaaggctgagtggcggatcaaggagcagaaactcaaggatgacatccggggcctgcgtgaaaagctgaccgggctggacaaagagaaatccctgtcggatcagaggcgctactccctcatcgaccggtcctcggcgcccgagcttctgcggctgcagcaccagctgatgagcacggaggacgccctgcgggatgcgctggaccaggctcagcaggtggagaagctgatggaggccatgaggagctgccctgacaaggcccagaccatcggcaattccggttctgcaaacggcatccaccagcaggacaaagctcagaaacaagaggacaagcactga

SEQ ID NO: 138057 - DNA, 3467 bp, Artificial Sequence
  derived and/or modified sequence
ctcggctcggccgcggggcgcgcaggcggctgctgggcggcctcggtgcgcgcctcccgccttcccagagacgtggcgcgaggcccgggccctgagcacctatcgcggggatccccggcgccaggagggggtgcagccggtgggcagcgccgcgcagggaggggccgcagcatcctcgccccccagcgcgcccgggcccgagaggaggaggccggggctctccgggcctcccgccgcttagcctgatgctggaaggacgaaggtgagtgaagatggcagagaggacgtgaccagcactcacccttgtccacctgcccagtggcaccgccatgcagaagcccagcggcctgaagccccccggccgtggggggaagcactccagccccatgggccggacatctactgggtcagcttcatcctcggcggcggtggccgctagctccaaggaaggctccccactgcacaaacagtcatctggaccctcctcctccccggccgcagctgctgcccccgagaagccgggccccaaggcggcggaagtgggggatgacttcctgggggactttgtggtgggcgagcgggtgtgggtgaacggcgtgaagccaggcgtggtgcagtatctgggagagacgcagttcgcaccgggccagtgggctggcgtggtgctggacgacccggtgggcaagaatgatggcgcggtgggcggcgtgcgctacttcgagtgcccggccctccagggtatcttcacgcggccctccaagctgacccggcagcccacggccgagggctcggggagtgatgcccactccgtggagtcgctgactgcccagaacctgtcattgcattcgggcacggccacgcccccgctgaccagccgcgtcatccccctgcgggagagcgtcctcaacagctccgtgaagactggcaacgagtcgggatccaacctctcagacagcggctctgtgaagcggggcgaaaaggacctgcgcctgggggaccgcgtgctggttggcgggacgaagactggcgtggtgcggtacgtgggggagacagactttgccaagggcgagtggtgtggcgtggagctggacgagccccttgggaagaatgatggggcggtggcgggcaccaggtacttccagtgcccacccaagtttggtctcttcgcgcccatccacaaagtgatccgtatcggcttcccatctaccagcccagccaaggccaagaagaccaagcgtatggccatgggtgtgtcagcactgacccacagtcccagcagttcctccatcagctccgtcagctctgtggcctcctccgtggggggtcggcccagccgcagtggcctgctcacggagacctcttcacgctacgcccgcaagatctcgggcaccacggccttgcaggaggcactgaaggagaagcagcagcacattgagcagctgctggctgaacgagacctggaacgggctgaggtggccaaggccacaagccacatctgcgaggtggagaaggagattgccctgctcaaggcacagcatgagcagtatgttgcagaagccgaggagaagctgcagcgagcccggctgctcgtggagagcgtgcggaaagagaaggtggacctgtccaaccagctggaggaggagaggaggaaggtggaggatctgcagttccgcgtggaggaggagtccatcaccaagggagacctggagacccagacgcagctggagcacgcgcgcattggggagctggaacagagcctgctactggagaaggcgcaggccgagcggctgctccgagaattagcggacaacaggctgaccacagtggccgagaagtcgcgcgtgctgcagctggaggaggagctcaccctgcgccgaggtgaaatcgaggagctccagcagtgcctgttgcactcgggtcccccacctccggaccacccagacgccgccgagatcctgcggctacgggagcggctgctctcggccagcaaggaacaccagagggagagtggggtgctgcgggataaatacgagaaggccctgaaggcctaccaggcggaggtggacaagctccgcgcggccaacgagaagtacgcacaggaggtggcgggcctgaaggacaaggttcagcaggccaccagcgagaacatggggctaatggacaactggaaatccaagctggactcgctggcctcggaccaccagaagtccctggaggacctcaaagccaccctgaactcgggcccaggcgcccagcagaaggagatcggcgagctgaaggcagtgatggagggcatcaagatggagcaccagctggagctgggtaacttgcaggccaagcatgacctggagaccgccatgcacgtgaaggagaaggaggccctgcgagagaagctgcaggaggcccaggaggagctggctgggctgcagcggcactggcgggcccagctggaggtgcaagccagccagcaccggctggagctgcaggaggcccaggaccagcgccgggatgccgagctgcgtgtgcacgagctggaaaaactggacgtggagtaccggggccaggcgcaggctatcgagttcctcaaggagcagatctcgctggccgagaagaagatgttggactacgagcggctgcagcgggcagaagcccagggcaaacaggaggtcgagagtttgcgggagaagctcctggtggctgagaacagactccaggcggtcgaggccctgtgctcctcccagcacacccacatgattgagtcgaatgacatttcagaggagacgatcaggacgaaggaaactgtggagggcctgcaggacaagctgaacaagagggacaaagaggtgacagccttgacctcccagaccgagatgctcagggcccaagtaagtgcgctggagagcaagtgtaagtcaggcgagaagaaggtggacgccctcctgaaggagaagcggcgcctggaggcagagctggagaccgtgtcccggaagacccatgacgcctcgggccagctagtcctcatcagccaggagctgctgcggaaggagcggagcctgaacgaactgcgggtgttgctgctggaggccaatcgtcactccccagggccggagagggacctgagccgtgaggtacacaaggctgagtggcggatcaaggagcagaaactcaaggatgacatccggggcctgcgtgaaaagctgaccgggctggacaaagagaaatccctgtcggatcagaggcgctactccctcatcgaccggtcctcggcgcccgagcttctgcggctgcagcaccagctgatgagcacggaggacgccctgcgggatgcgctggaccaggctcagcaggtggagaagctgatggaggccatgaggagctgccctgacaaggcccagaccatcggcaattccggttctgcaaacggcatccaccagcaggacaaagctcagaaacaagagaatacacac

SEQ ID NO: 138058 - DNA, 3141 bp, Artificial Sequence
  derived and/or modified sequence
atgcagaagcccagcggcctgaagccccccggcagaggcggcaagcacagcagccccatgggcagaaccagcaccggcagcgccagcagcagcgccgccgtggccgccagcagcaaggagggcagccccctgcacaagcagagcagcggccccagcagcagccccgccgccgccgccgcccccgagaagcccggccccaaggccgccgaggtgggcgacgacttcctgggcgacttcgtggtgggcgagagagtgtgggtgaacggcgtgaagcccggcgtggtgcagtacctgggcgagacccagttcgcccccggccagtgggccggcgtggtgctggacgaccccgtgggcaagaacgacggcgccgtgggcggcgtgagatacttcgagtgccccgccctgcagggcatcttcaccagacccagcaagctgaccagacagcccaccgccgagggcagcggcagcgacgcccacagcgtggagagcctgaccgcccagaacctgagcctgcacagcggcaccgccaccccccccctgaccagcagagtgatccccctgagagagagcgtgctgaacagcagcgtgaagaccggcaacgagagcggcagcaacctgagcgacagcggcagcgtgaagagaggcgagaaggacctgagactgggcgacagagtgctggtgggcggcaccaagaccggcgtggtgagatacgtgggcgagaccgacttcgccaagggcgagtggtgcggcgtggagctggacgagcccctgggcaagaacgacggcgccgtggccggcaccagatacttccagtgcccccccaagttcggcctgttcgcccccatccacaaggtgatcagaatcggcttccccagcaccagccccgccaaggccaagaagaccaagagaatggccatgggcgtgagcgccctgacccacagccccagcagcagcagcatcagcagcgtgagcagcgtggccagcagcgtgggcggcagacccagcagaagcggcctgctgaccgagaccagcagcagatacgccagaaagatcagcggcaccaccgccctgcaggaggccctgaaggagaagcagcagcacatcgagcagctgctggccgagagagacctggagagagccgaggtggccaaggccaccagccacatctgcgaggtggagaaggagatcgccctgctgaaggcccagcacgagcagtacgtggccgaggccgaggagaagctgcagagagccagactgctggtggagagcgtgagaaaggagaaggtggacctgagcaaccagctggaggaggagagaagaaaggtggaggacctgcagttcagagtggaggaggagagcatcaccaagggcgacctggagacccagacccagctggagcacgccagaatcggcgagctggagcagagcctgctgctggagaaggcccaggccgagagactgctgagagagctggccgacaacagactgaccaccgtggccgagaagagcagagtgctgcagctggaggaggagctgaccctgagaagaggcgagatcgaggagctgcagcagtgcctgctgcacagcggcccccccccccccgaccaccccgacgccgccgagatcctgagactgagagagagactgctgagcgccagcaaggagcaccagagagagagcggcgtgctgagagacaagtacgagaaggccctgaaggcctaccaggccgaggtggacaagctgagagccgccaacgagaagtacgcccaggaggtggccggcctgaaggacaaggtgcagcaggccaccagcgagaacatgggcctgatggacaactggaagagcaagctggacagcctggccagcgaccaccagaagagcctggaggacctgaaggccaccctgaacagcggccccggcgcccagcagaaggagatcggcgagctgaaggccgtgatggagggcatcaagatggagcaccagctggagctgggcaacctgcaggccaagcacgacctggagaccgccatgcacgtgaaggagaaggaggccctgagagagaagctgcaggaggcccaggaggagctggccggcctgcagagacactggagagcccagctggaggtgcaggccagccagcacagactggagctgcaggaggcccaggaccagagaagagacgccgagctgagagtgcacgagctggagaagctggacgtggagtacagaggccaggcccaggccatcgagttcctgaaggagcagatcagcctggccgagaagaagatgctggactacgagagactgcagagagccgaggcccagggcaagcaggaggtggagagcctgagagagaagctgctggtggccgagaacagactgcaggccgtggaggccctgtgcagcagccagcacacccacatgatcgagagcaacgacatcagcgaggagaccatcagaaccaaggagaccgtggagggcctgcaggacaagctgaacaagagagacaaggaggtgaccgccctgaccagccagaccgagatgctgagagcccaggtgagcgccctggagagcaagtgcaagagcggcgagaagaaggtggacgccctgctgaaggagaagagaagactggaggccgagctggagaccgtgagcagaaagacccacgacgccagcggccagctggtgctgatcagccaggagctgctgagaaaggagagaagcctgaacgagctgagagtgctgctgctggaggccaacagacacagccccggccccgagagagacctgagcagagaggtgcacaaggccgagtggagaatcaaggagcagaagctgaaggacgacatcagaggcctgagagagaagctgaccggcctggacaaggagaagagcctgagcgaccagagaagatacagcctgatcgacagaagcagcgcccccgagctgctgagactgcagcaccagctgatgagcaccgaggacgccctgagagacgccctggaccaggcccagcaggtggagaagctgatggaggccatgagaagctgccccgacaaggcccagaccatcggcaacagcggcagcgccaacggcatccaccagcaggacaaggcccagaagcaggagaacacccactag

SEQ ID NO: 138059 - protein, 646 aa, Artificial Sequence
  derived and/or modified sequence
MSFLSRQQPPPPRRAGAACTLRQKLIFSPCSDCEEEEEEEEEEGSGHSTGEDSAFQEPDSPLPPARSPTEPGPERRRSPGPAPGSPGELEEDLLLPGACPGADEAGGGAEGDSWEEEGFGSSSPVKSPAAPYFLGSSFSPVRCGGPGDASPRGCGARRAGEGRRSPRPDHPGTPPHKTFRKLRLFDTPHTPKSLLSKARGIDSSSVKLRGSSLFMDTEKSGKREFDVRQTPQVNINPFTPDSLLLHSSGQCRRRKRTYWNDSCGEDMEASDYELEDETRPAKRITITESNMKSRYTTEFHELEKIGSGEFGSVFKCVKRLDGCIYAIKRSKKPLAGSVDEQNALREVYAHAVLGQHSHVVRYFSAWAEDDHMLIQNEYCNGGSLADAISENYRIMSYFKEAELKDLLLQVGRGLRYIHSMSLVHMDIKPSNIFISRTSIPNAASEEGDEDDWASNKVMFKIGDLGHVTRISSPQVEEGDSRFLANEVLQENYTHLPKADIFALALTVVCAAGAEPLPRNGDQWHEIRQGRLPRIPQVLSQEFTELLKVMIHPDPERRPSAMALVKHSVLLSASRKSAEQLRIELNAEKFKNSLLQKELKKAQMAKAAAEERALFTDRMATRSTTQSNRTSRLIGKKMNRSVSLTIY

SEQ ID NO: 138060 - DNA, 1941 bp, Artificial Sequence
  derived and/or modified sequence
atgagcttcctgagcagacagcagccccccccccccagaagagccggcgccgcctgcaccctgagacagaagctgatcttcagcccctgcagcgactgcgaggaggaggaggaggaggaggaggaggagggcagcggccacagcaccggcgaggacagcgccttccaggagcccgacagccccctgccccccgccagaagccccaccgagcccggccccgagagaagaagaagccccggccccgcccccggcagccccggcgagctggaggaggacctgctgctgcccggcgcctgccccggcgccgacgaggccggcggcggcgccgagggcgacagctgggaggaggagggcttcggcagcagcagccccgtgaagagccccgccgccccctacttcctgggcagcagcttcagccccgtgagatgcggcggccccggcgacgccagccccagaggctgcggcgccagaagagccggcgagggcagaagaagccccagacccgaccaccccggcacccccccccacaagaccttcagaaagctgagactgttcgacaccccccacacccccaagagcctgctgagcaaggccagaggcatcgacagcagcagcgtgaagctgagaggcagcagcctgttcatggacaccgagaagagcggcaagagagagttcgacgtgagacagaccccccaggtgaacatcaaccccttcacccccgacagcctgctgctgcacagcagcggccagtgcagaagaagaaagagaacctactggaacgacagctgcggcgaggacatggaggccagcgactacgagctggaggacgagaccagacccgccaagagaatcaccatcaccgagagcaacatgaagagcagatacaccaccgagttccacgagctggagaagatcggcagcggcgagttcggcagcgtgttcaagtgcgtgaagagactggacggctgcatctacgccatcaagagaagcaagaagcccctggccggcagcgtggacgagcagaacgccctgagagaggtgtacgcccacgccgtgctgggccagcacagccacgtggtgagatacttcagcgcctgggccgaggacgaccacatgctgatccagaacgagtactgcaacggcggcagcctggccgacgccatcagcgagaactacagaatcatgagctacttcaaggaggccgagctgaaggacctgctgctgcaggtgggcagaggcctgagatacatccacagcatgagcctggtgcacatggacatcaagcccagcaacatcttcatcagcagaaccagcatccccaacgccgccagcgaggagggcgacgaggacgactgggccagcaacaaggtgatgttcaagatcggcgacctgggccacgtgaccagaatcagcagcccccaggtggaggagggcgacagcagattcctggccaacgaggtgctgcaggagaactacacccacctgcccaaggccgacatcttcgccctggccctgaccgtggtgtgcgccgccggcgccgagcccctgcccagaaacggcgaccagtggcacgagatcagacagggcagactgcccagaatcccccaggtgctgagccaggagttcaccgagctgctgaaggtgatgatccaccccgaccccgagagaagacccagcgccatggccctggtgaagcacagcgtgctgctgagcgccagcagaaagagcgccgagcagctgagaatcgagctgaacgccgagaagttcaagaacagcctgctgcagaaggagctgaagaaggcccagatggccaaggccgccgccgaggagagagccctgttcaccgacagaatggccaccagaagcaccacccagagcaacagaaccagcagactgatcggcaagaagatgaacagaagcgtgagcctgaccatctactag

SEQ ID NO: 138061 - DNA, 1941 bp, Artificial Sequence
  derived and/or modified sequence
atgtccttcctctctagacaacagccacctcccccacgccgcgcaggtgcggcatgtactttgcggcagaagctgatattttccccatgctctgattgcgaagaagaggaagaagaggaggaagaggagggtagcgggcactctaccggagaagactccgccttccaagagcctgattctcccttacctccagcccggtctcccaccgagccagggccagagcgacgacgatcgcccggtcccgctcctggcagccccggggagctagaagaggatctgctactgccaggggcctgcccaggggctgatgaagccggaggcggagcagaaggcgatagctgggaggaagaggggttcggcagcagttcaccagtcaagtcacccgcagcaccctatttcctgggcagctcctttagtcccgttagatgcggagggcccggcgatgcaagccctcggggctgcggggcacggcgcgccggtgaaggaagaaggtcacctaggccagatcaccccggtacaccacctcacaagacttttcggaagcttcgcctcttcgatacccctcacacaccaaagagtctcctttccaaagcccgtggaatcgatagctctagcgtcaaactccgtgggtcctcactttttatggataccgaaaagagcggaaagagagaattcgacgtgcgacagacgccccaagtcaacataaaccccttcactccggattccttgctcctgcattctagtgggcaatgtagacgaaggaaacgtacttactggaatgactcctgcggggaagatatggaagctagtgactacgaacttgaagatgagacaaggcctgcgaaacggatcaccattacggaatctaatatgaagtctcggtataccaccgaatttcacgagctggagaagattggttctggtgagtttggctcggtttttaagtgcgtcaaaaggctggatgggtgcatttacgccataaagcgctcaaaaaagcctctagctggttctgttgacgagcaaaatgctttacgagaagtttacgctcacgccgttcttgggcagcacagccatgtggtgaggtacttttcagcgtgggcagaggatgatcacatgctaattcaaaacgagtattgcaacggcgggagtctggccgacgcaatctcagagaattatagaataatgtcttacttcaaggaggccgagttgaaagatctcctgttgcaggtgggccgcggcctgcggtatattcactcaatgtctttggtacacatggatatcaagccctctaatatttttattagtaggacatctattcctaatgcagcttcagaagagggcgacgaggatgactgggcatcaaataaggttatgtttaaaattggcgacctgggccacgttacgcgtatctctagcccacaggtcgaggagggtgacagccgattcttagccaacgaggttcttcaggagaattatacccaccttcccaaggccgatatttttgctcttgctttgacggtcgtatgtgctgccggagctgaaccgctcccaagaaacggcgatcaatggcacgagatcaggcaggggcgactccctcgcatcccacaggtcctgagccaagaattcactgagttattgaaagtcatgatccatcctgacccagaacgtagaccttctgcgatggctctggtgaagcacagcgtcctactctccgctagcaggaagtcagcggaacagctcaggatcgagctgaatgcagaaaaatttaaaaacagcctgcttcagaaagagttaaaaaaggcacagatggccaaagccgcagctgaagaaagagctctatttacagatcgcatggcgaccagatctacaactcagagcaacagaactagtcgcctgattggcaaaaaaatgaaccggagcgtgtcactcaccatatattag

SEQ ID NO: 138062 - DNA, 1941 bp, Artificial Sequence
  derived and/or modified sequence
atgtccttcctgagccggcagcagcccccacctccaagaagagctggagctgcctgcaccctgcggcagaagctgatcttcagcccctgcagcgactgtgaggaggaggaggaggaggaggaggaggagggcagcggccacagcactggagaagattctgccttccaggagccagacagccccctgcccccagcccggagccccacagagcccggccctgagcggcggcgcagccctggccctgcccctggcagccctggagagctggaggaggacctgctgctgcccggggcctgccctggagcagatgaagctgggggcggcgctgagggggacagctgggaggaggagggcttcggcagcagcagccctgtgaagagccctgctgccccctacttcctgggcagcagcttcagccctgtgcgctgtggcggccctggagatgccagcccccggggctgtggggccaggagagctggggagggcagaagaagccccaggccagaccaccctggcaccccaccccacaagaccttcaggaagctgcggctgtttgacaccccccacacccccaagagcctgctgagcaaggcccggggcatcgacagcagctctgtgaagctgcggggcagcagcctcttcatggacacagagaagagcggcaagcgggagtttgatgtgcggcagaccccccaggtgaacatcaaccccttcaccccagacagcctgctgctgcacagcagcggccagtgcagaagaaggaagaggacctactggaatgacagctgtggggaggacatggaggccagtgactatgagctggaggatgagaccaggcctgccaagaggatcaccatcacagagagcaacatgaagagccgctacaccacagagttccacgagctggagaagattggcagcggggagtttggcagcgtcttcaagtgtgtgaagaggctggatggctgcatctatgccatcaagaggagcaagaagcccctggccggctctgtggatgagcagaatgccctgcgggaggtgtatgcccatgctgtgctgggccagcacagccacgtggtgcgctacttcagcgcctgggccgaggatgaccacatgctgatccagaatgagtactgcaatggaggcagcctggctgatgccatcagcgagaactaccgcatcatgagctacttcaaggaggccgagctgaaggacctgctgctgcaggtgggccggggcctgcgctacatccacagcatgagcctggtgcacatggacatcaagcccagcaacatcttcatcagcaggaccagcatccccaatgctgccagcgaggagggagatgaagatgactgggccagcaacaaggtgatgttcaagattggagacctgggccacgtgacccgcatcagcagcccccaggtggaggagggggacagccgcttcctggccaatgaggtgctgcaggagaactacacccacctgcccaaggctgacatctttgccctggccctgactgtggtgtgtgccgccggggctgagcccctgcccagaaatggagaccagtggcatgagatccggcagggccgcctgccccgcatcccccaggtgctgagccaggagttcacagagctgctgaaggtgatgatccacccagaccctgagcggcggcccagcgccatggccctggtgaagcacagcgtgctgctgagcgccagcaggaagtctgctgagcagctgcgcatcgagctgaatgctgagaagttcaagaacagcctgctgcagaaggagctgaagaaggcccagatggccaaggctgctgctgaggagcgggccctcttcacagacaggatggccaccaggagcaccacccagagcaacagaaccagccggctgattggcaagaagatgaacagatctgtgtccctgaccatctactag

SEQ ID NO: 138063 - DNA, 1941 bp, Artificial Sequence
  derived and/or modified sequence
atgagcttcctgagccggcagcagcccccccccccccggcgggccggggctgcttgtaccctgcgccagaagctgattttttcaccatgttcagactgtgaggaagaggaggaggaggaggaagaggagggttcgggacacagcacgggcgaagatagcgccttccaggaacccgactccccgcttccgcccgctagatcacctaccgaacccgggcctgagcggaggaggtctcctggtccagcacccggaagcccgggagagttagaggaggatttgctcctgcctggagcatgtcccggagcagacgaggctggaggtggcgccgagggagacagttgggaggaggagggatttggatcctcgtccccagtcaaaagcccagccgctccttacttcctgggctcctcttttagtcctgttcgctgtggaggccctggggatgcaagcccgagaggttgtggcgctagacgagcaggtgaaggcaggaggtcacctaggcccgatcatcccggaacacctccgcataaaacgttccgcaagctacgtctttttgacacaccacacacccccaaaagtttgctgtcaaaagcaaggggaattgacagctcaagcgtaaagttgcggggatcgtcactgttcatggataccgaaaagtccggtaaacgggaatttgacgtcagacaaacgcctcaggtaaatattaatcctttcacccctgattctctgctgctgcatagctctggccaatgccggaggcgcaaacggacttactggaacgattcgtgtggcgaggacatggaagcatccgactacgagctagaggacgaaactcgcccagccaaacgcattaccatcacagagagcaatatgaagtccaggtatacgaccgagtttcacgagctcgaaaagatcggttccggagagttcggcagcgtgtttaagtgcgtgaaaaggttggacggctgtatctatgccatcaaaaggagcaagaaaccccttgccgggtccgttgacgaacagaatgcactgcgcgaagtctatgctcacgcagttctggggcaacatagccatgtggttagatatttctccgcatgggcagaggatgatcatatgcttatccagaacgaatattgtaatggaggtagcttggcagacgcaatcagcgagaactacaggatcatgtcctacttcaaggaagccgagctgaaagaccttctcctgcaggttggacggggcctgaggtatatccatagcatgtcacttgtacatatggacataaagcccagtaatatatttatcagccggacatccatccctaacgcagcatccgaggaaggagacgaagacgattgggccagcaacaaggtgatgtttaagattggcgacctgggtcatgtcacaaggatttcttcaccacaggtcgaggaaggggacagtcggttcctcgcaaacgaggtgctgcaggagaattatacacacctgcctaaggctgatattttcgcactcgctttgaccgtggtttgtgcagctggcgcagagcctctcccgagaaacggggatcagtggcacgagatccggcagggaagactcccccgcatacctcaagtgctcagtcaggagtttactgagcttttgaaagtgatgatccacccggatcccgagcggcgccctagtgccatggccctcgtgaaacattccgtcctgctgtcagcttcgagaaagtccgctgagcagctaagaattgaactcaacgctgaaaagttcaagaattccctgctacagaaggagctgaagaaggcacagatggctaaggccgccgcagaagaaagggcactattcactgatcgcatggccactcgttccacgacccagagcaacagaaccagccgcttaatcggtaagaagatgaatcgatctgtgagcttgactatttactag

SEQ ID NO: 138064 - DNA, 1941 bp, Artificial Sequence
  derived and/or modified sequence
atgtcattcctgtcacgccagcagcctcccccaccaaggcgggcaggcgcagcctgcactttgcgccagaagctgatcttctctccctgttctgattgcgaggaggaagaagaggaagaggaggaggagggctctggccactctacaggcgaagacagcgcctttcaagagcccgactctccactgccacccgcacgatcccctaccgagcctgggccagaacgacggaggtcacccggaccagccccaggctcccctggagaacttgaagaagatctgctcttgccaggagcctgtccaggcgcagatgaggccggtggaggggcagagggcgactcttgggaggaagagggtttcggatcttcttcacccgttaagagccctgcagcaccatattttcttgggtcgagcttctctccagtgcgttgtggtggccctggggatgcaagtcctagaggctgtggcgctcgaagagccggagaagggaggcgatcgccccgacccgaccatcctggtactcctccccacaaaacattccgtaaactgcgcctcttcgataccccacatactccgaagagcctcctgtctaaggcgaggggtatcgactcatcaagcgtcaaactgaggggttcttccctttttatggatactgagaaaagtgggaagagggagttcgatgtacggcagaccccccaggtcaacataaacccattcacccccgatagcttattgctgcacagttccgggcagtgcagacggcgaaagcgcacttattggaatgacagctgcggtgaggacatggaggcctccgattacgagctcgaggatgaaacacgccctgcaaagcgcattacaataacagaaagcaatatgaagagcagatatacaacggaatttcacgaattggaaaaaattggcagcggcgaatttggctctgtgtttaagtgcgtgaagagattagacggttgcatttatgctattaaaagaagcaagaaacctctcgcaggttcagtggatgaacagaatgccctcagagaagtctacgcacatgcggtcctggggcagcacagtcatgtggtccgttacttttcggcttgggcggaagacgatcatatgttaattcagaatgagtactgtaacgggggttccctggctgacgccattagtgagaactaccgtatcatgtcctactttaaggaggcggagctgaaggatctgttgctgcaggtgggacggggactcaggtacatccactctatgagtctggtccatatggatattaaaccaagtaacatctttataagccggacttccatacccaacgctgcaagcgaagagggagacgaggatgattgggccagtaataaagtcatgtttaaaatcggcgacttgggccacgtcacccgcatatcctccccacaggttgaagaaggcgactcccgattcctggccaatgaggtgttacaggagaattacacacacctcccaaaggctgacatttttgccttagccctgactgtggtgtgcgccgctggtgctgaacctctgccacggaatggcgatcaatggcacgagatccgtcagggcagactcccaagaattccacaggtgttgtcccaggagtttaccgaactgctcaaggtaatgatccatccggatcccgagaggcgcccaagtgcaatggcattagtgaagcactccgtgttattaagcgcttcaagaaaatctgcagagcaactgaggatagaactcaatgccgagaaattcaagaactctctgctccagaaagaacttaagaaagctcagatggctaaggccgctgccgaggaaagagccctgtttaccgatcggatggctactcgctccactacccagtccaatagaacatcccgcctgatcgggaaaaagatgaataggtcagtgagcctgacaatatattag

SEQ ID NO: 138065 - DNA, 3203 bp, Artificial Sequence
  derived and/or modified sequence
atgtaactgaacaatgggcctcgtctggaacttcatcttacaaaggggccgatcggcccgtccgggtggccaaggatttgccgcccgttgagtccgggccgccccgagcgtgtcagccccgagtgcggcaccgataacgcggttcgcgaggatgctggagggtgccggcccggccacctgacactcccgagccataggatgccttttaaacgcggcgatcgggcctgtaatttgggcggcgcgggcagaaggagtttaaagaaaaataattgtcccgccctgatcgtgtcgtgtcgtgtggcgtggatgggggaaaggtctggggcatgcagggagactacgcttggacttgggagtaaaggctggccttccaagcatttacagtcctacagactcatcctaagtccaggcagtactgaggcctgtttctggacaaggtcttggcccagcatttgtttttatcgtgggtttgcggtgcccagagtttggccggcctccgtgtgattaggaacatcctaccgtagataaggtatcttaaagaaggaggtgttcagcacctgtgttttgaaaggccttcgagtactgcgcagatgaccacttttaaaactgcagattttaaagctgatacttccagagattaagacaagcctcgcatttgtaaggttaacagggaagatgcaccttttaaaagtttgctctccaaagctcggggaattgattccagctctgttaaactccggggtagttctctcttcatggatacagaaaaatcaggaaaaagggaatttgatgtgcgacagactcctcaagtgaatattaatccttttactccggattctttgttgcttcattcctcaggacagtgtcgtcgtagaaagagaacgtattggaatgattcctgtggtgaagacatggaagccagtgattatgagcttgaagatgaaacaagacctgctaagagaattacaattactgaaagcaatatgaagtcccggtatacaacagaatttcatgagctagagaaaatcggctctggagaatttggttctgtatttaagtgtgtgaagaggctggatggatgcatttatgccattaagcgatcaaaaaagccattggcgggctctgttgatgagcagaacgctttgagagaagtatatgctcatgcagtgcttggacagcattctcatgtagttcgatatttctctgcgtgggcagaagatgatcatatgcttatacagaatgaatattgtaatggtggaagtttagctgatgctataagtgaaaactacagaatcatgagttactttaaagaagcagagttgaaggatctccttttgcaagttggccgaggcttgaggtatattcattcaatgtctttggttcacatggatataaaacctagtaatattttcatatctcgaacctcaatcccaaatgctgcctctgaagaaggagacgaagatgattgggcatccaacaaagttatgtttaaaataggtgatcttgggcatgtaacaaggatctccagtccacaagttgaagagggcgatagtcgttttcttgcaaatgaagttttacaggagaattatacccatctaccaaaagcagatatttttgcgcttgccctcacagtggtatgtgctgctggtgctgaacctcttccgagaaatggagatcaatggcatgaaatcagacagggtagattacctcggataccacaagtgctttcccaagaatttacagagttgctaaaagttatgattcatccagatccagagagaagaccttcagcaatggcactggtaaagcattcagtattgctgtccgcttctagaaagagtgcagaacaattacgaatagaattgaatgccgaaaagttcaaaaattcacttttacaaaaagaactcaagaaagcacagatggcaaaagctgcagctgaggaaagagcactcttcactgaccggatggccactaggtccaccacccagagtaatagaacatctcgacttattggaaagaaaatgaaccgctctgtcagccttactatatactgagctactcctttcccacctccccctgaacactgtgacaagaggaagctaggttgaaatcactgatagaatccagtttgcaattactttctcgattggtgtcagtagttttactgattaggacttttattgtgaattacagttgaaagctgtattttgatgattgctatgtcaggctttcatctaatcttaccagtctgtcttctgtaggatgtgtcactgttggatgttacaccagcctttccagggttaaccactgtggtggtgtgctgcttatagtttgctgttgcattgtaataaaaggtgtctttccctgtagtgacctgtaaaaagtactcaagggctttattacagacataccctccctttgaaaagggacatgctaaaagactcattactactcagccttcaatgtacctgtgtgtccatcttatatttcttttttttttaattgtgaattagacttgtatatcccactgggagcactttgtaggcattgcatgaaccatgggatgatgattctgtggaggtattgccttgtgaatttgctgctattttagttttgtctttgctgtaaacttgtagcattaaacaatcattgttgttaataggtcttctttttgaaacaattatgtgaaatgtatagctgcttttgatgaaaagcagctatttgcctttttttttttttcctttgaactttgaagctagtgcattggaaaaatgcaccctttccctcctttggaatgctgtattaatgtagtataataattactggttttgtaacttgttctggtaatgtccttcccggactctttttaaatgtctccccctaagttttatacttgattgtattattagtctgtttttaaatgttttgcccggtttttctcttcaatatttgtgtatataaaccgatcttcgtgatactgtacatagctgtttgaaatgccagaatgacttctgacattccaagtttttcacaaaatatattttatctgtgattagccatttgactaataatactggctaacagatgttgaaaaaaattgtctgtttgttttctcattaattttggtctaaaacatgtttgcacttgtctttgacttgtgttttattaacattgattggcatattaaaagtcactctgagctt

SEQ ID NO: 138066 - DNA, 2799 bp, Artificial Sequence
  derived and/or modified sequence
ctgagactggacctgaggagacctcagcctcggtgctcgggccgccccgcctctgccggaaagtccgcgccgccgctgccgccaccgtccgcagcccgagcgccccggagccgcaggccgccgccgcgcagagacgccgcggctgcgactaggcgcgcccagccgcacgtggcggacccgcccccaggcccgcagtgtcctggaccccgcaggcctccgctctcctgtcctcggccccgtccccagggccgcgatgagcttcctgagccgacagcagccgccgccaccccgccgcgccggggcggcctgcaccttgcggcagaagctgatcttctcgccctgcagcgactgtgaggaggaggaagaagaggaggaggaggagggcagcggccacagcaccggggaggactcggcctttcaagagcccgactcgccgctgccgcccgcgcggagccccacggagcccgggcccgagcgccgccgctcgcccgggccggcccccggcagccccggcgagctggaggaggacctgttgctgcccggcgcctgcccgggcgcggacgaggcgggcggtggggcggagggcgactcgtgggaggaggagggcttcggctcctcgtcgccggtcaagtcgccggcggccccctacttcctgggtagctctttctcgccggtgcgctgcggcggcccaggagatgcgtcgccgcggggttgcggggcgcgccgggcgggcgaaggccgccgctcgccgcggccggaccacccgggcaccccgccacacaagaccttccgcaagctgcgactcttcgacaccccgcacacgcccaagagtttgctctccaaagctcggggaattgattccagctctgttaaactccggggtagttctctcttcatggatacagaaaaatcaggaaaaagggaatttgatgtgcgacagactcctcaagtgaatattaatccttttactccggattctttgttgcttcattcctcaggacagtgtcgtcgtagaaagagaacgtattggaatgattcctgtggtgaagacatggaagccagtgattatgagcttgaagatgaaacaagacctgctaagagaattacaattactgaaagcaatatgaagtcccggtatacaacagaatttcatgagctagagaaaatcggctctggagaatttggttctgtatttaagtgtgtgaagaggctggatggatgcatttatgccattaagcgatcaaaaaagccattggcgggctctgttgatgagcagaacgctttgagagaagtatatgctcatgcagtgcttggacagcattctcatgtagttcgatatttctctgcgtgggcagaagatgatcatatgcttatacagaatgaatattgtaatggtggaagtttagctgatgctataagtgaaaactacagaatcatgagttactttaaagaagcagagttgaaggatctccttttgcaagttggccgaggcttgaggtatattcattcaatgtctttggttcacatggatataaaacctagtaatattttcatatctcgaacctcaatcccaaatgctgcctctgaagaaggagacgaagatgattgggcatccaacaaagttatgtttaaaataggtgatcttgggcatgtaacaaggatctccagtccacaagttgaagagggcgatagtcgttttcttgcaaatgaagttttacaggagaattatacccatctaccaaaagcagatatttttgcgcttgccctcacagtggtatgtgctgctggtgctgaacctcttccgagaaatggagatcaatggcatgaaatcagacagggtagattacctcggataccacaagtgctttcccaagaatttacagagttgctaaaagttatgattcatccagatccagagagaagaccttcagcaatggcactggtaaagcattcagtattgctgtccgcttctagaaagagtgcagaacaattacgaatagaattgaatgccgaaaagttcaaaaattcacttttacaaaaagaactcaagaaagcacagatggcaaaagctgcagctgaggaaagagcactcttcactgaccggatggccactaggtccaccacccagagtaatagaacatctcgacttattggaaagaaaatgaaccgctctgtcagccttactatatactgagctactcctttcccacctccccctgaacactgtgacaagaggaagctaggttgaaatcactgatagaatccagtttgcaattactttctcgattggtgtcagtagttttactgattaggacttttattgtgaattacagttgaaagctgtattttgatgattgctatgtcaggctttcatctaatcttaccagtctgtcttctgtaggatgtgtcactgttggatgttacaccagcctttccagggttaaccactgtggtggtgtgctgcttatagtttgctgttgcattgtaataaaaggtgtctttccctgtagtgacctgtaaaaagtactcaagggctttattacagacataccctccctttgaaaagggacatgctaaaagactcattactactcagccttcaatgtacctgtgtgtccatcttatatttcttttttttttaattgtgaattagacttgtatatcccactgggagcactttgtaggcattgcatgaaccatgggatgatgattctgtggaggtattgccttgtgaatttgctgctattttagttttgtctttgctgtaaacttgtagcattaaacaatcattgttgttaa

SEQ ID NO: 138067 - protein, 360 aa, Artificial Sequence
  derived and/or modified sequence
MNAPLGGIWLWLPLLLTWLTPEVNSSWWYMRATGGSSRVMCDNVPGLVSSQRQLCHRHPDVMRAISQGVAEWTAECQHQFRQHRWNCNTLDRDHSLFGRVLLRSSRESAFVYAISSAGVVFAITRACSQGEVKSCSCDPKKMGSAKDSKGIFDWGGCSDNIDYGIKFARAFVDAKERKGKDARALMNLHNNRAGRKAVKRFLKQECKCHGVSGSCTLRTCWLAMADFRKTGDYLWRKYNGAIQVVMNQDGTGFTVANERFKKPTKNDLVYFENSPDYCIRDREAGSLGTAGRVCNLTSRGMDSCEVMCCGRGYDTSHVTRMTKCGCKFHWCCAVRCQDCLEALDVHTCKAPKNADWTTAT

SEQ ID NO: 138068 - DNA, 1083 bp, Artificial Sequence
  derived and/or modified sequence
atgaacgcccccctgggcggcatctggctgtggctgcccctgctgctgacctggctgacccccgaggtgaacagcagctggtggtacatgagagccaccggcggcagcagcagagtgatgtgcgacaacgtgcccggcctggtgagcagccagagacagctgtgccacagacaccccgacgtgatgagagccatcagccagggcgtggccgagtggaccgccgagtgccagcaccagttcagacagcacagatggaactgcaacaccctggacagagaccacagcctgttcggcagagtgctgctgagaagcagcagagagagcgccttcgtgtacgccatcagcagcgccggcgtggtgttcgccatcaccagagcctgcagccagggcgaggtgaagagctgcagctgcgaccccaagaagatgggcagcgccaaggacagcaagggcatcttcgactggggcggctgcagcgacaacatcgactacggcatcaagttcgccagagccttcgtggacgccaaggagagaaagggcaaggacgccagagccctgatgaacctgcacaacaacagagccggcagaaaggccgtgaagagattcctgaagcaggagtgcaagtgccacggcgtgagcggcagctgcaccctgagaacctgctggctggccatggccgacttcagaaagaccggcgactacctgtggagaaagtacaacggcgccatccaggtggtgatgaaccaggacggcaccggcttcaccgtggccaacgagagattcaagaagcccaccaagaacgacctggtgtacttcgagaacagccccgactactgcatcagagacagagaggccggcagcctgggcaccgccggcagagtgtgcaacctgaccagcagaggcatggacagctgcgaggtgatgtgctgcggcagaggctacgacaccagccacgtgaccagaatgaccaagtgcggctgcaagttccactggtgctgcgccgtgagatgccaggactgcctggaggccctggacgtgcacacctgcaaggcccccaagaacgccgactggaccaccgccacctag

SEQ ID NO: 138069 - DNA, 1083 bp, Artificial Sequence
  derived and/or modified sequence
atgaacgccccactgggaggaatttggctctggttgcccttactgctgacctggttaactcccgaggtgaacagctcgtggtggtacatgcgagcaaccggaggaagcagtcgggtcatgtgcgataatgtgcccggtctagtaagcagtcagcgacagctgtgtcataggcatcccgatgtgatgcgggccatcagtcagggcgttgcagaatggacagcagagtgccaacaccagttcagacagcataggtggaattgcaataccttggatagagatcacagcctgttcggccgcgttttgctgcgctcttctcgagaatcagctttcgtgtatgccataagtagtgcaggagtagtgttcgctatcactagggcgtgttcgcaaggggaggtgaagtcctgctcatgcgacccgaagaaaatgggcagtgcaaaggactcaaaaggaatctttgattggggaggttgctccgataacatcgattatggaataaaatttgcacgagcctttgtggatgcaaaggaaaggaaggggaaggatgctcgggctctgatgaatctgcataataaccgggccgggagaaaagcagtaaagcgcttcctgaaacaggagtgcaagtgtcacggtgtctcgggctcctgcacactcaggacctgctggctcgccatggcagatttccggaagacgggagattatctttggagaaagtacaacggagccatccaagtcgtgatgaatcaggacggaaccgggtttactgtcgccaatgagcgatttaagaagcctaccaaaaacgacctggtctatttcgaaaatagccctgactattgcattcgggatcgagaggctggcagtctgggcacagcgggcagggtctgtaatctgacctcccggggcatggattcttgcgaggtgatgtgctgcgggcggggctacgacacctctcatgtgactagaatgacaaaatgtggatgcaagttccactggtgctgtgcggtgaggtgccaggactgccttgaggcactcgatgtacacacatgcaaggcccccaaaaacgccgactggactaccgctacctag

SEQ ID NO: 138070 - DNA, 1083 bp, Artificial Sequence
  derived and/or modified sequence
atgaatgcccccctgggcggcatctggctgtggctgcccctgctgctgacctggctgaccccagaggtgaacagctcctggtggtacatgagggccactggaggcagcagccgggtgatgtgtgacaacgtgcccggcctggtgagcagccagaggcagctgtgccaccgccacccagatgtgatgagggccatcagccagggcgtggccgagtggacagctgagtgccagcaccagttccggcagcaccgctggaactgcaacaccctggaccgggaccacagcctgtttggccgggtgctgctgcggagcagccgggagagcgcctttgtgtatgccatcagcagcgctggggtggtgtttgccatcacccgggcctgcagccagggcgaggtgaagagctgcagctgtgaccccaagaagatgggcagcgccaaggacagcaagggcatctttgactggggcggctgcagcgacaacattgattatggcatcaagtttgcccgggcctttgtggatgccaaggagaggaagggcaaggatgcccgggccctgatgaacctgcacaacaacagagctggcaggaaggctgtgaagcgcttcctgaagcaggagtgcaagtgccacggcgtgtctggcagctgcaccctgcggacctgctggctggccatggctgacttcaggaagacaggagactacctgtggaggaagtacaatggagccatccaggtggtgatgaaccaggacggcaccggcttcaccgtggccaatgaacgcttcaagaagcccaccaagaatgacctggtgtactttgagaacagcccagactactgcatccgggaccgggaggccggcagcctgggcacagctggccgggtgtgcaacctgaccagccggggcatggacagctgtgaggtgatgtgctgcggccggggctatgacaccagccacgtgaccaggatgaccaagtgtggctgcaagttccactggtgctgtgctgtgcgctgccaggactgcctggaggccctggatgtgcacacctgcaaggcccccaagaatgctgactggaccacagccacctag

SEQ ID NO: 138071 - DNA, 1083 bp, Artificial Sequence
  derived and/or modified sequence
atgaacgcccccctgggcggcatctggctgtggctgcccctgctgctcacatggcttacgccagaagtgaactcatcatggtggtacatgcgagcgacaggcggatcctccagggtgatgtgcgacaacgtccctggactggtgagtagccagcgacagttatgccacagacatccggacgtcatgagagccataagtcagggcgtcgccgaatggacagccgaatgccagcaccagtttcgacaacatcggtggaactgcaacacacttgatcgagaccattcactgtttggccgagtgctccttagatcctcgagggagagtgcatttgtctatgccattagcagcgcaggcgtggtgttcgcaattactagggcgtgcagtcagggcgaggtgaagagttgttcttgtgaccctaaaaaaatgggctccgccaaagactctaaaggaatcttcgactgggggggatgtagcgacaacattgactacggaataaagttcgctcgcgcctttgtggatgcaaaagagcgtaagggcaaggacgcccgtgctctgatgaacttgcataacaatcgcgcaggccggaaggccgtaaagagattcctgaagcaggaatgcaaatgccatggcgtttctgggtcctgcacactgagaacctgctggctggctatggccgactttcggaaaaccggtgactatctgtggcgaaaatacaacggggctatccaagtcgtaatgaaccaagatggtactggttttactgtggctaatgagaggtttaagaagcccaccaagaacgacttagtgtactttgaaaacagtccagactattgtatacgagatcgggaggccggctcactcggaaccgctggccgcgtgtgcaatctgaccagccgagggatggattcgtgtgaggtcatgtgttgcggcagggggtacgacaccagtcacgttaccagaatgaccaagtgcggctgcaaattccactggtgttgcgcagtgaggtgtcaagactgtctggaggctctcgatgttcacacctgcaaggcccccaagaatgccgactggaccactgccacatag

SEQ ID NO: 138072 - DNA, 1083 bp, Artificial Sequence
  derived and/or modified sequence
atgaacgctcctctgggcggtatttggctgtggctccctcttctgctgacttggctcaccccagaagtcaactcctcatggtggtatatgagagcaactggaggctcatcgcgggtaatgtgtgataatgttcccggactggtgagttcgcagcggcaactgtgccataggcacccagacgtcatgagagccatcagtcagggagtagctgagtggacagccgagtgccagcatcagtttcggcagcaccggtggaattgcaacaccctggatcgcgaccattcgctgtttgggagggttctgctgcgctcctcgagggagagtgccttcgtgtatgcgatttcctctgccggtgtcgtgtttgccatcacaagggcatgttcacagggcgaggtgaaaagctgcagctgtgaccccaaaaaaatgggctccgctaaggattcgaaagggatctttgattggggcggttgcagtgataacatagactatgggattaaattcgcccgtgcatttgtggatgccaaagagcgcaaaggtaaggatgcccgtgccctgatgaaccttcacaataatagagccggacggaaagccgtgaaacggtttctgaagcaagaatgtaagtgccacggcgtctcaggcagttgcactttgcgaacatgttggctggccatggcagattttaggaagacaggggactacctttggcggaagtataacggggcaattcaggttgtaatgaatcaggacggcaccggctttacggtcgctaacgagaggtttaagaagcccacaaagaatgacctcgtttactttgaaaatagccctgactattgtattagggatagagaggctggtagtttgggaaccgccggtagggtgtgcaaccttacctcacgaggcatggacagttgcgaggtgatgtgctgtggcagagggtacgatacgtcccacgtcacccgcatgactaaatgtggatgcaagttccactggtgctgtgcagttagatgccaggattgcctggaggctcttgatgtccacacatgcaaggcacccaagaacgccgattggaccacagcaacgtag

SEQ ID NO: 138073 - DNA, 2907 bp, Artificial Sequence
  derived and/or modified sequence
agcagagcggacggggcgcgcgggaggcgcgcagagctttcgggctgcaggcgctcgctgcgcctggggaattgggctgtgggcgaggcggtccgggctggcctttatcgctcgctgggcccatcgtttgaaactttatcagcgagtctcgccactcgtcgcagacgcgagcggggggcgggggcgcggcgaggcgccggcggccgtgacgaggcgctcccggagctgagcgcttctgctctgggcacgcatggcgcccgcacacggagtctgacctgatgcagacgcaagggggttaatatgaacgcccctctcggtggaatctggctctggctccctctgctcttgacctggctcacccccgaggtcaactcttcatggtggtacatgagagctacaggtggctcctccagggtgatgtgcgataatgtgccaggcctggtgagcagccagcggcagctgtgtcaccgacatccagatgtgatgcgtgccattagccagggcgtggccgagtggacagcagaatgccagcaccagttccgccagcaccgctggaattgcaacaccctggacagggatcacagcctttttggcagggtcctactccgaagtagtcgggaatctgcctttgtttatgccatctcctcagctggagttgtatttgccatcaccagggcctgtagccaaggagaagtaaaatcctgttcctgtgatccaaagaagatgggaagcgccaaggacagcaaaggcatttttgattggggtggctgcagtgataacattgactatgggatcaaatttgcccgcgcatttgtggatgcaaaggaaaggaaaggaaaggatgccagagccctgatgaatcttcacaacaacagagctggcaggaaggctgtaaagcggttcttgaaacaagagtgcaagtgccacggggtgagcggctcatgtactctcaggacatgctggctggccatggccgacttcaggaaaacgggcgattatctctggaggaagtacaatggggccatccaggtggtcatgaaccaggatggcacaggtttcactgtggctaacgagaggtttaagaagccaacgaaaaatgacctcgtgtattttgagaattctccagactactgtatcagggaccgagaggcaggctccctgggtacagcaggccgtgtgtgcaacctgacttcccggggcatggacagctgtgaagtcatgtgctgtgggagaggctacgacacctcccatgtcacccggatgaccaagtgtgggtgtaagttccactggtgctgcgccgtgcgctgtcaggactgcctggaagctctggatgtgcacacatgcaaggcccccaagaacgctgactggacaaccgctacatgaccccagcaggcgtcaccatccaccttcccttctacaaggactccattggatctgcaagaacactggacctttgggttctttctggggggatatttcctaaggcatgtggcctttatctcaacggaagccccctcttcctccctgggggccccaggatgggggggccacacgctgcacctaaagcctaccctattctatccatctcctggtgttctgcagtcatctcccctcctggcgagttctctttggaaatagcatgacaggctgttcagccgggagggtggtgggcccagaccactgtctccacccaccttgacgtttcttctttctagagcagttggccaagcagaaaaaaaagtgtctcaaaggagctttctcaatgtcttcccacaaatggtcccaattaagaaattccatacttctctcagatgggaacagtaaagaaagcagaatcaactgcccctgacttaactttaacttttgaaaagaccaagacttttgtctgatcaagtggttttacagctaccacccttaggggtaattggtaattacctggagaagaatggctttcaatacccttttaagtttaaaatgtgtatttttcaaggcatttattgccatattaaaatctgatgtaacaaggtggggacgtgtgtcctttggtactatggtgtgttgtatctttgtaagagcaaaagcctcagaaagggattgctttgcattactgtccccttgatataaaaaatctttagggaatgagagttccttctcacttagaatccgaagggaattaaaaagaagatgaatggtctggcaatattctgtaactattgggtgaatatggtggaaaataatttagtggatggaatatcagaagtatatctgtacagatcaagaaaaaaagggagaataaaattcctatctcatattatgcatgtgacccatggaatctcataactgaaagacttgaaggatgaaaattttggggatacaagattggtgaactaaaatgctgacagagaggtttccagagctaactcgtgcctggggcggccttacaataagcagatgcctgaaagaagtcggccacgtccgccgtctgctaatgcccatcacccttcaagcccagtttaaagacctgtcatatttaattgtatttatttgatgcttacaagatgatgtgatactgtagcctaaagcaaatgacacatagcattgcttataaagttggtaaccctgctatattatattgcaaacaaatcgtaacttggagactatgtttaagggactcaactgtaattatgggagcatcagtatgcaaatagtggttggcttctgccatcagccaaaagatgacattcagggaaaatggagaggctgcctgcaccgtttttttatgttaaatgaaagaaaggtgaaatagctacttctcgtcttcttgaaaaatttggttcttattctgtatatgacttccttacagtgctacattaacaggatatttcattacatgcatctggtatcaaa

SEQ ID NO: 138074 - protein, 380 aa, Artificial Sequence
  derived and/or modified sequence
MKKSIGILSPGVALGMAGSAMSSKFFLVALAIFFSFAQVVIEANSWWSLGMNNPVQMSEVYIIGAQPLCSQLAGLSQGQKKLCHLYQDHMQYIGEGAKTGIKECQYQFRHRRWNCSTVDNTSVFGRVMQIGSRETAFTYAVSAAGVVNAMSRACREGELSTCGCSRAARPKDLPRDWLWGGCGDNIDYGYRFAKEFVDARERERIHAKGSYESARILMNLHNNEAGRRTVYNLADVACKCHGVSGSCSLKTCWLQLADFRKVGDALKEKYDSAAAMRLNSRGKLVQVNSRFNSPTTQDLVYIDPSPDYCVRNESTGSLGTQGRLCNKTSEGMDGCELMCCGRGYDQFKTVQTERCHCKFHWCCYVKCKKCTEIVDQFVCK

SEQ ID NO: 138075 - protein, 129 aa, Artificial Sequence
  derived and/or modified sequence
MKKSIGILSPGVALGMAGSAMSSKFFLVALAIFFSFAQVVIEANSWWSLGMNNPVQMSQDVGGHGWLRAHVLRPWLRPVQDRADGALPLQVPLVLLRQVQEVHGDRGPVCVQVVGATQHSAPLPGPAYL

SEQ ID NO: 138076 - protein, 214 aa, Artificial Sequence
  derived and/or modified sequence
MAGSAMSSKFFLVALAIFFSFAQVVIEANSWWSLGMNNPVQMSEVYIIGAQPLCSQLAGLSQGQKKLCHLYQDHMQYIGEGAKTGIKECQYQFRHRRWNCSTVDNTSVFGRVMQIGSRETAFTYAVSAAGVVNAMSRACREGELSTCGCSRAARPKDLPRDWLWGGCGDNIDYGYRFAKEFVDARERERIHAKGSYESARILMNLHNNEAGRRV

SEQ ID NO: 138077 - protein, 365 aa, Artificial Sequence
  derived and/or modified sequence
MAGSAMSSKFFLVALAIFFSFAQVVIEANSWWSLGMNNPVQMSEVYIIGAQPLCSQLAGLSQGQKKLCHLYQDHMQYIGEGAKTGIKECQYQFRHRRWNCSTVDNTSVFGRVMQIGSRETAFTYAVSAAGVVNAMSRACREGELSTCGCSRAARPKDLPRDWLWGGCGDNIDYGYRFAKEFVDARERERIHAKGSYESARILMNLHNNEAGRRTVYNLADVACKCHGVSGSCSLKTCWLQLADFRKVGDALKEKYDSAAAMRLNSRGKLVQVNSRFNSPTTQDLVYIDPSPDYCVRNESTGSLGTQGRLCNKTSEGMDGCELMCCGRGYDQFKTVQTERCHCKFHWCCYVKCKKCTEIVDQFVCK

SEQ ID NO: 138078 - protein, 291 aa, Artificial Sequence
  derived and/or modified sequence
MQYIGEGAKTGIKECQYQFRHRRWNCSTVDNTSVFGRVMQIGSRETAFTYAVSAAGVVNAMSRACREGELSTCGCSRAARPKDLPRDWLWGGCGDNIDYGYRFAKEFVDARERERIHAKGSYESARILMNLHNNEAGRRTVYNLADVACKCHGVSGSCSLKTCWLQLADFRKVGDALKEKYDSAAAMRLNSRGKLVQVNSRFNSPTTQDLVYIDPSPDYCVRNESTGSLGTQGRLCNKTSEGMDGCELMCCGRGYDQFKTVQTERCHCKFHWCCYVKCKKCTEIVDQFVCK

SEQ ID NO: 138079 - DNA, 1143 bp, Artificial Sequence
  derived and/or modified sequence
atgaagaagagcatcggcatcctgagccccggcgtggccctgggcatggccggcagcgccatgagcagcaagttcttcctggtggccctggccatcttcttcagcttcgcccaggtggtgatcgaggccaacagctggtggagcctgggcatgaacaaccccgtgcagatgagcgaggtgtacatcatcggcgcccagcccctgtgcagccagctggccggcctgagccagggccagaagaagctgtgccacctgtaccaggaccacatgcagtacatcggcgagggcgccaagaccggcatcaaggagtgccagtaccagttcagacacagaagatggaactgcagcaccgtggacaacaccagcgtgttcggcagagtgatgcagatcggcagcagagagaccgccttcacctacgccgtgagcgccgccggcgtggtgaacgccatgagcagagcctgcagagagggcgagctgagcacctgcggctgcagcagagccgccagacccaaggacctgcccagagactggctgtggggcggctgcggcgacaacatcgactacggctacagattcgccaaggagttcgtggacgccagagagagagagagaatccacgccaagggcagctacgagagcgccagaatcctgatgaacctgcacaacaacgaggccggcagaagaaccgtgtacaacctggccgacgtggcctgcaagtgccacggcgtgagcggcagctgcagcctgaagacctgctggctgcagctggccgacttcagaaaggtgggcgacgccctgaaggagaagtacgacagcgccgccgccatgagactgaacagcagaggcaagctggtgcaggtgaacagcagattcaacagccccaccacccaggacctggtgtacatcgaccccagccccgactactgcgtgagaaacgagagcaccggcagcctgggcacccagggcagactgtgcaacaagaccagcgagggcatggacggctgcgagctgatgtgctgcggcagaggctacgaccagttcaagaccgtgcagaccgagagatgccactgcaagttccactggtgctgctacgtgaagtgcaagaagtgcaccgagatcgtggaccagttcgtgtgcaagtag

SEQ ID NO: 138080 - DNA, 390 bp, Artificial Sequence
  derived and/or modified sequence
atgaagaagagcatcggcatcctgagccccggcgtggccctgggcatggccggcagcgccatgagcagcaagttcttcctggtggccctggccatcttcttcagcttcgcccaggtggtgatcgaggccaacagctggtggagcctgggcatgaacaaccccgtgcagatgagccaggacgtgggcggccacggctggctgagagcccacgtgctgagaccctggctgagacccgtgcaggacagagccgacggcgccctgcccctgcaggtgcccctggtgctgctgagacaggtgcaggaggtgcacggcgacagaggccccgtgtgcgtgcaggtggtgggcgccacccagcacagcgcccccctgcccggccccgcctacctgtag

SEQ ID NO: 138081 - DNA, 1143 bp, Artificial Sequence
  derived and/or modified sequence
atgaagaagtcaataggcattctgtcccccggcgtagccctcggcatggccggaagcgctatgtcctctaagtttttcctggttgccctggctattttttttagctttgcacaggtggtgatcgaggctaacagctggtggagcttggggatgaacaatccggtgcaaatgtcggaagtgtacatcatcggggcacagcctctgtgcagccaactggctgggcttagccaagggcagaaaaaactgtgccatttgtaccaagatcacatgcagtatatcggggaaggtgctaagactggcatcaaagagtgccagtatcagtttagacacaggcgctggaattgttccactgtggataatactagcgtatttggtagagttatgcaaattggaagtcgcgagaccgccttcacatacgcagtgtccgcagctggggtggtcaatgcaatgtcccgggcatgccgagagggagaattgagtacatgtggctgcagtagggcagctcgcccgaaggatttgccacgggattggctgtggggagggtgcggagataacatagactacggctaccgcttcgcaaaggaatttgtcgatgcccgggagagggaaagaatccatgcaaaaggatcctacgaatctgcgagaattcttatgaatttgcacaacaacgaagcgggacgccgaacggtttacaatctcgcggacgtggcttgcaagtgtcatggggttagcggcagctgctccctgaaaacctgttggttacagctcgcagatttccggaaagttggtgacgccctgaaggagaagtacgacagtgccgccgccatgcggctaaactctagggggaaactggtccaggtgaacagcaggtttaattccccgaccactcaggatctggtgtatatcgacccgtcccctgattactgcgttcggaacgaaagcactgggagcctgggaacccaaggtagattatgcaacaagaccagcgaaggcatggacggttgtgaattgatgtgctgtgggcgcgggtacgaccagtttaaaacagtgcagacggaacgctgtcattgtaaattccactggtgttgttacgtgaagtgcaaaaagtgcacagagatcgtggaccagttcgtttgcaagtag

SEQ ID NO: 138082 - DNA, 390 bp, Artificial Sequence
  derived and/or modified sequence
atgaagaagtcgatcggtatactgagcccaggggttgctttaggcatggctgggtccgccatgagcagtaaattcttccttgtggccctggctatctttttctcctttgcgcaggttgttatcgaggccaactcctggtggagcctgggcatgaataatcccgtccagatgtcccaggatgtgggcggacacgggtggctgcgtgcacatgttctgcgtccttggttgcgaccagttcaggatagggctgatggcgccctgcctctccaggtccctttagtgttgctacgacaggtccaagaagtccacggagatcggggtccagtatgcgtccaggtcgtcggcgctactcaacacagcgctcctttgccaggccctgcctatctctag

SEQ ID NO: 138083 - DNA, 1143 bp, Artificial Sequence
  derived and/or modified sequence
atgaagaagagcatcggaattctcagcccaggcgtggcgctgggcatggcaggctccgccatgtccagcaaattttttctggtggcattggctatatttttcagtttcgctcaggtagtgattgaagctaactcatggtggtctcttggtatgaacaatcccgtgcagatgtccgaggtgtatatcatcggagctcagcccctgtgtagtcaactggcaggcctgtctcaaggccagaaaaaactctgccacctttatcaggatcacatgcagtacattggagagggcgcaaaaacaggtattaaagagtgccaataccagttccgtcacaggcgatggaactgctctacagtagataatacatctgtttttgggcgcgtgatgcagatcggcagccgcgaaacggcctttacgtacgcggtttccgctgccggcgtggtgaacgcgatgtcaagagcctgtcgagagggtgaattgtcaacgtgcgggtgtagccgcgctgcaagaccaaaggacctcccccgggactggctctggggcgggtgtggggacaacatcgattacgggtatagatttgcaaaagaattcgtggacgcacgcgaaagagagcgcattcatgctaaaggatcttatgaatccgctcgcatacttatgaatctgcacaacaatgaagcaggtcggagaaccgtgtacaatctggcagacgttgcatgcaaatgtcacggagtatccgggtcctgtagtctgaaaacatgttggctacaattagccgactttcgcaaagtgggggacgccctcaaggagaagtatgactccgcagctgccatgcggctgaatagccgtgggaagctcgttcaagtgaatagccgattcaacagcccaactacgcaggacctcgtgtatatcgatccatcgcctgactattgcgtgaggaatgaaagtactggatctctcggcacccaaggccggctgtgtaacaagacttctgaagggatggatggctgtgaactcatgtgctgcggtcgaggttacgaccaattcaaaaccgttcaaaccgaacggtgtcactgcaaatttcactggtgttgctatgttaaatgcaagaagtgcaccgagatagtcgatcaatttgtgtgcaagtag

SEQ ID NO: 138084 - DNA, 1143 bp, Artificial Sequence
  derived and/or modified sequence
atgaagaagagcatcggcatcctgagccctggggtggccctgggcatggccggcagcgccatgagcagcaagttcttcctggtggccctggccatcttcttctcctttgcccaggtggtgattgaggccaacagctggtggagcctgggcatgaacaaccctgtgcagatgtctgaggtgtacatcattggagcccagcccctgtgcagccagctggccggcctgagccagggccagaagaagctgtgccacctgtaccaggaccacatgcagtacatcggggagggcgccaagacaggcatcaaggagtgccagtaccagttccgccaccggcgctggaactgcagcacagtggacaacacctctgtgtttggccgggtgatgcagatcggcagccgggagacagccttcacctatgctgtgtctgctgctggggtggtgaatgccatgagccgggcctgccgggagggggagctgagcacctgtggctgcagcagagctgcccggcccaaggacctgccccgggactggctgtggggcggctgtggggacaacatcgactatggctacagatttgccaaggagtttgtggatgcccgggagcgggagcgcatccacgccaagggcagctatgaaagtgcccgcatcctgatgaacctgcacaacaatgaagctggaagaagaacagtgtacaacctggctgatgtggcctgcaagtgccacggcgtgtctggcagctgcagcctgaagacctgctggctgcagctggccgacttcaggaaggtgggagatgccctgaaggagaagtatgacagcgctgctgccatgaggctgaacagccggggcaagctggtgcaggtgaacagccgcttcaacagccccaccacccaggacctggtgtacatcgaccccagcccagactactgtgtgagaaatgaaagcacaggcagcctgggcacccagggccgcctgtgcaacaagaccagcgagggcatggatggctgtgagctgatgtgctgcggccggggctatgaccagttcaagacagtgcagacagagcgctgccactgcaagttccactggtgctgctacgtgaagtgcaagaagtgcacagaaattgtggaccagtttgtgtgcaagtag

SEQ ID NO: 138085 - DNA, 390 bp, Artificial Sequence
  derived and/or modified sequence
atgaagaagagcatcggcatcctgagccctggggtggccctgggcatggccggcagcgccatgagcagcaagttcttcctggtggccctggccatcttcttctcctttgcccaggtggtgattgaggccaacagctggtggagcctgggcatgaacaaccctgtgcagatgagccaggatgtgggcggccacggctggctgcgggcccacgtgctgcggccctggctgcggcctgtgcaggacagagcagatggagccctgcccctgcaggtgcccctggtgctgctgcggcaggtgcaggaggtgcatggagaccggggccctgtgtgtgtgcaggtggtgggcgccacccagcacagcgcccccctgcccggccctgcctacctgtag

SEQ ID NO: 138086 - DNA, 1143 bp, Artificial Sequence
  derived and/or modified sequence
atgaagaagagcatcggcatcctgagccccggcgtggccctgggcatggcagggtcagccatgagcagtaaattctttctcgtggccctcgccattttcttttctttcgcccaagtggtcattgaagcgaactcatggtggtcgctcggcatgaataacccggtgcagatgagcgaggtctatattattggtgcacagccgctgtgctctcagctagccgggttatcgcaaggccagaaaaaactgtgccacctttaccaagaccacatgcagtacattggagaaggtgcaaaaacaggcattaaggagtgtcagtatcagtttcggcatcggcgttggaattgctcaaccgtggacaacaccagtgtgtttggtcgggttatgcagataggctccagagagaccgcttttacctacgccgtgagcgcagcaggcgtcgtgaacgcaatgagtcgcgcctgccgggaaggcgagctgagcacatgtgggtgctctcgcgcagcaagacctaaggatttaccgcgggactggctgtggggtggctgtggagataacatcgattatggatatcgcttcgcaaaagaatttgtagatgcacgggagcgcgaacgcattcatgccaagggctcgtatgagtccgctaggattcttatgaacctgcataataatgaggccggcaggcgcacagtttataatctggcggatgttgcctgtaaatgccacggcgtgtccggaagctgcagcctgaagacgtgttggctgcaactggcagatttccggaaggtgggagacgccctcaaggagaaatacgattcggccgctgcaatgcgcctgaacagtagaggaaaacttgtccaggtcaatagtcggttcaactctccgactacacaggacttagtttatatagacccttcccctgattactgtgtcagaaacgagagcaccggcagcctgggcacgcaagggcgcctctgtaacaagaccagcgaggggatggacggatgtgagctgatgtgctgcgggcggggttacgatcagtttaaaaccgtgcagacagaacgatgccactgtaagtttcattggtgttgctatgttaaatgcaaaaagtgcaccgagatcgtggatcagtttgtatgcaagtag

SEQ ID NO: 138087 - DNA, 390 bp, Artificial Sequence
  derived and/or modified sequence
atgaagaagagcatcggcatcctgagccccggcgtggccctgggcatggcaggctccgccatgtcttccaagttcttcctggttgccctcgccatctttttctcattcgcccaagttgtaattgaggcaaactcctggtggagcttagggatgaacaatcctgttcagatgtcacaggatgtgggaggtcatggatggttgcgggcccatgtacttagaccctggctgcggccggtacaggaccgtgcagacggggccctaccactgcaggtgcctctcgtgctactgcggcaggtgcaggaggtacacggagaccgcggacccgtgtgtgtgcaggtagttggggctacccaacatagcgcccccctgcccggccccgcgtacctgtag

SEQ ID NO: 138088 - DNA, 1143 bp, Artificial Sequence
  derived and/or modified sequence
atgaagaagagcatcggcatcctgagccccggcgtggccctgggcatggccggtagcgccatgtcatcgaagttctttctggtggctttggcgatctttttctcttttgctcaggtggtgatcgaagctaattcttggtggtcactgggcatgaataaccccgtccaaatgagtgaagtgtacatcataggcgcccagcctctatgctcccagctggccgggctcagccagggccagaagaaactgtgtcacctgtatcaggaccacatgcagtacattggcgaaggagccaaaactggtataaaggaatgtcagtaccagttcaggcatcgccggtggaactgtagcaccgtggacaataccagtgtgttcggacgcgttatgcagattgggagtcgggaaacggcgttcacttatgccgtcagtgccgctggtgtcgttaatgcgatgtctcgagcctgtcgggagggggagctaagcacatgcggctgcagtagagcagcaagacccaaagatttgccccgagattggctctggggcggatgtggcgacaacatagactatggctacagattcgccaaagaattcgtcgacgcaagagagcgtgaacgcatccatgcaaagggctcttacgagtccgcccgcatactcatgaatcttcacaacaacgaggcgggacgtcgcacagtgtataacctggctgacgtggcctgtaagtgtcatggcgtctctggtagttgcagcttaaaaacatgctggctgcaactcgccgatttccgcaaggtgggtgatgccttaaaggagaaatacgactccgccgcggctatgcggctgaattcacgcggcaagctggtccaggtgaatagtagattcaacagcccaactacacaggacctcgtgtatattgacccaagtccagactactgcgtgcggaatgagagcaccgggagcctcggcactcaagggcggctctgcaataaaacgtccgagggtatggatggatgtgaactaatgtgttgcgggcgagggtatgatcagttcaagacagtgcagaccgagcgctgtcactgcaagttccattggtgttgctatgttaagtgcaagaagtgtacagagattgtcgatcagttcgtctgcaagtag

SEQ ID NO: 138089 - DNA, 1143 bp, Artificial Sequence
  derived and/or modified sequence
atgaagaaatcaatcggaatcctgtccccaggcgtcgctctgggaatggcaggttcggctatgagcagcaaatttttcctggtggccctggccatattctttagtttcgcccaagtcgtgattgaggctaattcatggtggtccctggggatgaacaatcctgttcagatgtccgaagtttatattattggtgctcagcccctgtgtagtcagttggcaggcctctcccagggtcagaaaaagctgtgccacctttaccaggatcatatgcagtacattggcgaaggggcaaagaccggaattaaggagtgtcagtatcagtttcgacatagacggtggaattgctccacggtggacaatacctccgtgttcgggcgagtgatgcagattggaagcagggagaccgcgtttacatatgctgtctccgctgccggagttgtcaatgccatgtcccgcgcatgccgcgagggagaactgtctacttgtggctgctcacgggcagctagaccaaaggacttgcctagagattggctctggggcggttgtggcgataatattgattatggatatcgcttcgccaaagagttcgttgatgccagagagcgagaaaggattcacgcgaaaggctcttacgagtctgccagaatcctgatgaacttgcacaacaacgaagccggaaggagaaccgtgtacaatttagctgatgtggcttgcaaatgccacggagtcagcgggtcttgttctctgaaaacttgctggctacaactcgccgatttccggaaggtcggagatgccctgaaagagaagtatgactctgccgctgccatgcggctgaattctaggggcaagcttgtacaggttaactcccgctttaattcccccacgacccaggatctcgtatatatcgatccgtctcccgactattgcgtgaggaatgagtctaccgggtccctggggacccagggcagactgtgcaataagaccagtgagggcatggacggctgcgagctcatgtgctgcggaaggggctatgatcagttcaaaaccgttcagacagagcgctgtcactgcaaattccactggtgctgttatgtgaagtgtaagaaatgcactgagattgtggatcagttcgtctgcaaatag

SEQ ID NO: 138090 - DNA, 390 bp, Artificial Sequence
  derived and/or modified sequence
atgaagaaatccatcgggatcctgtcccctggggtcgcattggggatggctgggagcgccatgagcagcaagttctttctggtggcattagcgatcttcttcagcttcgcccaagtggttatcgaagctaattcatggtggagtctgggaatgaacaacccagtccagatgtcccaggacgtgggtggtcacgggtggctgcgagctcacgttttgaggccctggttacgcccagtacaggatcgggctgacggcgctctcccactgcaggtgccacttgttctgctacgccaggtccaagaagtccacggagatcggggtccggtgtgtgtgcaggtggtaggagctacccagcactccgccccacttcctgggccagcttatctgtag

SEQ ID NO: 138091 - DNA, 1143 bp, Artificial Sequence
  derived and/or modified sequence
atgaagaagagcatcggtattttgagtccaggagtggcattgggaatggccggttcggcaatgtcaagcaaattcttcctggtggctcttgcgattttcttcagcttcgcacaggtggtaattgaggcgaattcttggtggtctctgggcatgaataatcctgtccaaatgtctgaggtgtatattatcggagcccagccattatgtagtcaattagcgggtctatcccagggccagaagaaactctgccacctctaccaggatcatatgcagtacattggggaaggggctaaaacgggcatcaaagaatgtcagtaccagtttaggcatcgcagatggaactgtagcacggtggacaacacctctgtgttcggccgagttatgcagattggcagcagagagacagcattcacctacgccgtatccgctgcaggagtcgttaatgccatgagccgcgcatgccgggaaggcgagctctccacttgtggatgcagcagagcggcacgtcctaaggatctacctcgtgattggttgtggggtggatgtggtgacaatattgattacgggtaccgttttgccaaagaattcgtggatgctcgtgagagagagcgcattcacgccaaagggagttatgagagcgctcgtatacttatgaatctccacaataatgaagccggtaggaggaccgtgtataacttagccgatgttgcatgtaaatgtcatggggtcagcggcagctgcagccttaagacatgttggctgcagctggctgattttagaaaagtaggagacgcacttaaagaaaagtacgattctgcagcagctatgcgcctcaactcacggggtaagctggtgcaagttaattctagatttaattcgccaacgactcaggacttggtctacatcgatcctagccctgattactgtgtgcgcaatgaaagcaccggatctcttggaacacagggccgactgtgcaacaaaacgtccgagggaatggacggttgcgaactgatgtgctgcgggagaggctatgatcagttcaaaaccgtgcagactgagagatgccactgtaagttccattggtgttgctacgttaagtgtaaaaagtgtaccgagatcgtggaccagttcgtgtgtaagtag

SEQ ID NO: 138092 - DNA, 5837 bp, Artificial Sequence
  derived and/or modified sequence
agttgcctgcgcgccctcgccggaccggcggctccctagttgcgccccgaccaggccctgcccttgctgccggctcgcgcgcgtccgcgccccctccattcctgggcgcatcccagctctgccccaactcgggagtccaggcccgggcgccagtgcccgcttcagctccggttcactgcgcccgccggacgcgcgccggaggactccgcagccctgctcctgaccgtccccccaggcttaacccggtcgctccgctcggattcctcggctgcgctcgctcgggtggcgacttcctccccgcgccccctccccctcgccatgaagaagtccattggaatattaagcccaggagttgctttggggatggctggaagtgcaatgtcttccaagttcttcctagtggctttggccatatttttctccttcgcccaggttgtaattgaagccaattcttggtggtcgctaggtatgaataaccctgttcagatgtcagaagtatatattataggagcacagcctctctgcagccaactggcaggactttctcaaggacagaagaaactgtgccacttgtatcaggaccacatgcagtacatcggagaaggcgcgaagacaggcatcaaagaatgccagtatcaattccgacatcgaaggtggaactgcagcactgtggataacacctctgtttttggcagggtgatgcagataggcagccgcgagacggccttcacatacgcggtgagcgcagcaggggtggtgaacgccatgagccgggcgtgccgcgagggcgagctgtccacctgcggctgcagccgcgccgcgcgccccaaggacctgccgcgggactggctctggggcggctgcggcgacaacatcgactatggctaccgctttgccaaggagttcgtggacgcccgcgagcgggagcgcatccacgccaagggctcctacgagagtgctcgcatcctcatgaacctgcacaacaacgaggccggccgcaggacggtgtacaacctggctgatgtggcctgcaagtgccatggggtgtccggctcatgtagcctgaagacatgctggctgcagctggcagacttccgcaaggtgggtgatgccctgaaggagaagtacgacagcgcggcggccatgcggctcaacagccggggcaagttggtacaggtcaacagccgcttcaactcgcccaccacacaagacctggtctacatcgaccccagccctgactactgcgtgcgcaatgagagcaccggctcgctgggcacgcagggccgcctgtgcaacaagacgtcggagggcatggatggctgcgagctcatgtgctgcggccgtggctacgaccagttcaagaccgtgcagacggagcgctgccactgcaagttccactggtgctgctacgtcaagtgcaagaagtgcacggagatcgtggaccagtttgtgtgcaagtagtgggtgccacccagcactcagccccgctcccaggacccgcttatttatagaaagtacagtgattctggtttttggtttttagaaatattttttatttttccccaagaattgcaaccggaaccattttttttcctgttaccatctaagaactctgtggtttattattaatattataattattatttggcaataatgggggtgggaaccaagaaaaatatttattttgtggatctttgaaaaggtaatacaagacttcttttgatagtatagaatgaaggggaaataacacataccctaacttagctgtgtggacatggtacacatccagaaggtaaagaaatacattttctttttctcaaatatgccatcatatgggatgggtaggttccagttgaaagagggtggtagaaatctattcacaattcagcttctatgaccaaaatgagttgtaaattctctggtgcaagataaaaggtcttgggaaaacaaaacaaaacaaaacaaacctcccttccccagcagggctgctagcttgctttctgcattttcaaaatgataatttacaatggaaggacaagaatgtcatattctcaaggaaaaaaggtatatcacatgtctcattctcctcaaatattccatttgcagacagaccgtcatattctaatagctcatgaaatttgggcagcagggaggaaagtccccagaaattaaaaaatttaaaactcttatgtcaagatgttgatttgaagctgttataagaattaggattccagattgtaaaaagatccccaaatgattctggacactagatttttttgtttggggaggttggcttgaacataaatgaaaatatcctgttattttcttagggatacttggttagtaaattataatagtaaaaataatacatgaatcccattcacaggttctcagcccaagcaacaaggtaattgcgtgccattcagcactgcaccagagcagacaacctatttgaggaaaaacagtgaaatccaccttcctcttcacactgagccctctctgattcctccgtgttgtgatgtgatgctggccacgtttccaaacggcagctccactgggtcccctttggttgtaggacaggaaatgaaacattaggagctctgcttggaaaacagttcactacttagggatttttgtttcctaaaacttttattttgaggagcagtagttttctatgttttaatgacagaacttggctaatggaattcacagaggtgttgcagcgtatcactgttatgatcctgtgtttagattatccactcatgcttctcctattgtactgcaggtgtaccttaaaactgttcccagtgtacttgaacagttgcatttataaggggggaaatgtggtttaatggtgcctgatatctcaaagtcttttgtacataacatatatatatatatacatatatataaatataaatataaatatatctcattgcagccagtgatttagatttacagtttactctggggttatttctctgtctagagcattgttgtccttcactgcagtccagttgggattattccaaaagttttttgagtcttgagcttgggctgtggccctgctgtgatcataccttgagcacgacgaagcaaccttgtttctgaggaagcttgagttctgactcactgaaatgcgtgttgggttgaagatatcttttttcttttctgcctcacccctttgtctccaacctccatttctgttcactttgtggagagggcattacttgttcgttatagacatggacgttaagagatattcaaaactcagaagcatcagcaatgtttctcttttcttagttcattctgcagaatggaaacccatgcctattagaaatgacagtacttattaattgagtccctaaggaatattcagcccactacatagatagcttttttttttttttttttaataaggacacctctttccaaacagtgccatcaaatatgttcttatctcagacttacgttgttttaaaagtttggaaagatacacatctttcataccccccttaggcaggttggctttcatatcacctcagccaactgtggctcttaatttattgcataatgatattcacatcccctcagttgcagtgaattgtgagcaaaagatcttgaaagcaaaaagcactaattagtttaaaatgtcacttttttggtttttattatacaaaaaccatgaagtactttttttatttgctaaatcagattgttcctttttagtgactcatgtttatgaagagagttgagtttaacaatcctagcttttaaaagaaactatttaatgtaaaatattctacatgtcattcagatattatgtatatcttctagcctttattctgtacttttaatgtacatatttctgtcttgcgtgatttgtatatttcactggtttaaaaaacaaacatcgaaaggcttatgccaaatggaagatagaatataaaataaaacgttacttgtatattggtaagtggtttcaattgtccttcagataattcatgtggagatttttggagaaaccatgacggatagtttaggatgactacatgtcaaagtaataaaagagtggtgaattttaccaaaaccaagctatttggaagcttcaaaaggtttctatatgtaatggaacaaaaggggaattctcttttcctatatatgttccttacaaaaaaaaaaaaaaaagaaatcaagcagatggcttaaagctggttataggattgctcacattcttttagcattatgcatgtaacttaattgttttagagcgtgttgctgttgtaacatcccagagaagaatgaaaaggcacatgcttttatccgtgaccagatttttagtccaaaaaaatgtatttttttgtgtgtttaccactgcaactattgcacctctctatttgaatttactgtggaccatgtgtggtgtctctatgccctttgaaagcagtttttataaaaagaaagcccgggtctgcagagaatgaaaactggttggaaactaaaggttcattgtgttaagtgcaattaatacaagttattgtgcttttcaaaaatgtacacggaaatctggacagtgctccacagattgatacattagcctttgctttttctctttccggataaccttgtaacatattgaaaccttttaaggatgccaagaatgcattattccacaaaaaaacagcagaccaacatatagagtgtttaaaatagcatttctgggcaaattcaaactcttgtggttctaggactcacatctgtttcagtttttcctcagttgtatattgaccagtgttctttattgcaaaaacatatacccgatttagcagtgtcagcgtattttttcttctcatcctggagcgtattcaagatcttcccaatacaagaaaattaataaaaaatttatatataggcagcagcaaaagagccatgttcaaaatagtcattatgggctcaaatagaaagaagacttttaagttttaatccagtttatctgttgagttctgtgagctactgacctcctgagactggcactgtgtaagttttagttgcctaccctagctcttttctcgtacaattttgccaataccaagtttcaatttgtttttacaaaacattattcaagccactagaattatcaaatatgacgctatagcagagtaaatactctgaataagagaccggtactagctaactccaagagatcgttagcagcatcagtccacaaacacttagtggcccacaatatatagagagatagaaaaggtagttataacttgaagcatgtatttaatgcaaataggcacgaaggcacaggtctaaaatactacattgtcactgtaagctatacttttaaaatatttattttttttaaagtattttctagtcttttctctctctgtggaatggtgaaagagagatgccgtgttttgaaagtaagatgatgaaatgaatttttaattcaagaaacattcagaaacataggaattaaaacttagagaaatgatctaatttccctgttcacacaaactttacactttaatctgatgattggatattttattttagtgaaacatcatcttgttagctaactttaaaaaatggatgtagaatgattaaaggttggtatgatttttttttaatgtatcagtttgaacctagaatattgaattaaaatgctgtctcagtattttaaaagcaaaaaaggaatggaggaaaattgcatcttagaccatttttatatgcagtgtacaatttgctgggctagaaatgagataaagattatttatttttgttcatatcttgtacttttctattaaaatcattttatgaaatcc

SEQ ID NO: 138093 - DNA, 6042 bp, Artificial Sequence
  derived and/or modified sequence
agtctgcggccactgggcagaacggcaagggagagggggaagggcggagggacgcagcctgggggcgatttgccgggcggagacgctctttttcagacaccctcctcaggtcttttgcacaatcacgcccacatttggggttggaaagccctaattaccgccgtcgctgatggacgttggaaacggagcgcctctccgtggaacagttgcctgcgcgccctcgccggaccggcggctccctagttgcgccccgaccaggccctgcccttgctgccggctcgcgcgcgtccgcgccccctccattcctgggcgcatcccagctctgccccaactcgggagtccaggcccgggcgccagtgcccgcttcagctccggttcactgcgcccgccggacgcgcgccggaggactccgcagccctgctcctgaccgtccccccaggcttaacccggtcgctccgctcggattcctcggctgcgctcgctcgggtggcgacttcctccccgcgccccctccccctcgccatgaagaagtccattggaatattaagcccaggagttgctttggggatggctggaagtgcaatgtcttccaagttcttcctagtggctttggccatatttttctccttcgcccaggttgtaattgaagccaattcttggtggtcgctaggtatgaataaccctgttcagatgtcagaagtatatattataggagcacagcctctctgcagccaactggcaggactttctcaaggacagaagaaactgtgccacttgtatcaggaccacatgcagtacatcggagaaggcgcgaagacaggcatcaaagaatgccagtatcaattccgacatcgaaggtggaactgcagcactgtggataacacctctgtttttggcagggtgatgcagataggcagccgcgagacggccttcacatacgcggtgagcgcagcaggggtggtgaacgccatgagccgggcgtgccgcgagggcgagctgtccacctgcggctgcagccgcgccgcgcgccccaaggacctgccgcgggactggctctggggcggctgcggcgacaacatcgactatggctaccgctttgccaaggagttcgtggacgcccgcgagcgggagcgcatccacgccaagggctcctacgagagtgctcgcatcctcatgaacctgcacaacaacgaggccggccgcaggacggtgtacaacctggctgatgtggcctgcaagtgccatggggtgtccggctcatgtagcctgaagacatgctggctgcagctggcagacttccgcaaggtgggtgatgccctgaaggagaagtacgacagcgcggcggccatgcggctcaacagccggggcaagttggtacaggtcaacagccgcttcaactcgcccaccacacaagacctggtctacatcgaccccagccctgactactgcgtgcgcaatgagagcaccggctcgctgggcacgcagggccgcctgtgcaacaagacgtcggagggcatggatggctgcgagctcatgtgctgcggccgtggctacgaccagttcaagaccgtgcagacggagcgctgccactgcaagttccactggtgctgctacgtcaagtgcaagaagtgcacggagatcgtggaccagtttgtgtgcaagtagtgggtgccacccagcactcagccccgctcccaggacccgcttatttatagaaagtacagtgattctggtttttggtttttagaaatattttttatttttccccaagaattgcaaccggaaccattttttttcctgttaccatctaagaactctgtggtttattattaatattataattattatttggcaataatgggggtgggaaccaagaaaaatatttattttgtggatctttgaaaaggtaatacaagacttcttttgatagtatagaatgaaggggaaataacacataccctaacttagctgtgtggacatggtacacatccagaaggtaaagaaatacattttctttttctcaaatatgccatcatatgggatgggtaggttccagttgaaagagggtggtagaaatctattcacaattcagcttctatgaccaaaatgagttgtaaattctctggtgcaagataaaaggtcttgggaaaacaaaacaaaacaaaacaaacctcccttccccagcagggctgctagcttgctttctgcattttcaaaatgataatttacaatggaaggacaagaatgtcatattctcaaggaaaaaaggtatatcacatgtctcattctcctcaaatattccatttgcagacagaccgtcatattctaatagctcatgaaatttgggcagcagggaggaaagtccccagaaattaaaaaatttaaaactcttatgtcaagatgttgatttgaagctgttataagaattaggattccagattgtaaaaagatccccaaatgattctggacactagatttttttgtttggggaggttggcttgaacataaatgaaaatatcctgttattttcttagggatacttggttagtaaattataatagtaaaaataatacatgaatcccattcacaggttctcagcccaagcaacaaggtaattgcgtgccattcagcactgcaccagagcagacaacctatttgaggaaaaacagtgaaatccaccttcctcttcacactgagccctctctgattcctccgtgttgtgatgtgatgctggccacgtttccaaacggcagctccactgggtcccctttggttgtaggacaggaaatgaaacattaggagctctgcttggaaaacagttcactacttagggatttttgtttcctaaaacttttattttgaggagcagtagttttctatgttttaatgacagaacttggctaatggaattcacagaggtgttgcagcgtatcactgttatgatcctgtgtttagattatccactcatgcttctcctattgtactgcaggtgtaccttaaaactgttcccagtgtacttgaacagttgcatttataaggggggaaatgtggtttaatggtgcctgatatctcaaagtcttttgtacataacatatatatatatatacatatatataaatataaatataaatatatctcattgcagccagtgatttagatttacagtttactctggggttatttctctgtctagagcattgttgtccttcactgcagtccagttgggattattccaaaagttttttgagtcttgagcttgggctgtggccctgctgtgatcataccttgagcacgacgaagcaaccttgtttctgaggaagcttgagttctgactcactgaaatgcgtgttgggttgaagatatcttttttcttttctgcctcacccctttgtctccaacctccatttctgttcactttgtggagagggcattacttgttcgttatagacatggacgttaagagatattcaaaactcagaagcatcagcaatgtttctcttttcttagttcattctgcagaatggaaacccatgcctattagaaatgacagtacttattaattgagtccctaaggaatattcagcccactacatagatagcttttttttttttttttttaataaggacacctctttccaaacagtgccatcaaatatgttcttatctcagacttacgttgttttaaaagtttggaaagatacacatctttcataccccccttaggcaggttggctttcatatcacctcagccaactgtggctcttaatttattgcataatgatattcacatcccctcagttgcagtgaattgtgagcaaaagatcttgaaagcaaaaagcactaattagtttaaaatgtcacttttttggtttttattatacaaaaaccatgaagtactttttttatttgctaaatcagattgttcctttttagtgactcatgtttatgaagagagttgagtttaacaatcctagcttttaaaagaaactatttaatgtaaaatattctacatgtcattcagatattatgtatatcttctagcctttattctgtacttttaatgtacatatttctgtcttgcgtgatttgtatatttcactggtttaaaaaacaaacatcgaaaggcttatgccaaatggaagatagaatataaaataaaacgttacttgtatattggtaagtggtttcaattgtccttcagataattcatgtggagatttttggagaaaccatgacggatagtttaggatgactacatgtcaaagtaataaaagagtggtgaattttaccaaaaccaagctatttggaagcttcaaaaggtttctatatgtaatggaacaaaaggggaattctcttttcctatatatgttccttacaaaaaaaaaaaaaaaagaaatcaagcagatggcttaaagctggttataggattgctcacattcttttagcattatgcatgtaacttaattgttttagagcgtgttgctgttgtaacatcccagagaagaatgaaaaggcacatgcttttatccgtgaccagatttttagtccaaaaaaatgtatttttttgtgtgtttaccactgcaactattgcacctctctatttgaatttactgtggaccatgtgtggtgtctctatgccctttgaaagcagtttttataaaaagaaagcccgggtctgcagagaatgaaaactggttggaaactaaaggttcattgtgttaagtgcaattaatacaagttattgtgcttttcaaaaatgtacacggaaatctggacagtgctccacagattgatacattagcctttgctttttctctttccggataaccttgtaacatattgaaaccttttaaggatgccaagaatgcattattccacaaaaaaacagcagaccaacatatagagtgtttaaaatagcatttctgggcaaattcaaactcttgtggttctaggactcacatctgtttcagtttttcctcagttgtatattgaccagtgttctttattgcaaaaacatatacccgatttagcagtgtcagcgtattttttcttctcatcctggagcgtattcaagatcttcccaatacaagaaaattaataaaaaatttatatataggcagcagcaaaagagccatgttcaaaatagtcattatgggctcaaatagaaagaagacttttaagttttaatccagtttatctgttgagttctgtgagctactgacctcctgagactggcactgtgtaagttttagttgcctaccctagctcttttctcgtacaattttgccaataccaagtttcaatttgtttttacaaaacattattcaagccactagaattatcaaatatgacgctatagcagagtaaatactctgaataagagaccggtactagctaactccaagagatcgttagcagcatcagtccacaaacacttagtggcccacaatatatagagagatagaaaaggtagttataacttgaagcatgtatttaatgcaaataggcacgaaggcacaggtctaaaatactacattgtcactgtaagctatacttttaaaatatttattttttttaaagtattttctagtcttttctctctctgtggaatggtgaaagagagatgccgtgttttgaaagtaagatgatgaaatgaatttttaattcaagaaacattcagaaacataggaattaaaacttagagaaatgatctaatttccctgttcacacaaactttacactttaatctgatgattggatattttattttagtgaaacatcatcttgttagctaactttaaaaaatggatgtagaatgattaaaggttggtatgatttttttttaatgtatcagtttgaacctagaatattgaattaaaatgctgtctcagtattttaaaagcaaaaaaggaatggaggaaaattgcatcttagaccatttttatatgcagtgtacaatttgctgggctagaaatgagataaagattatttatttttgttcatatcttgtacttttctattaaaatcattttatgaaatcca

SEQ ID NO: 138094 - DNA, 959 bp, Artificial Sequence
  derived and/or modified sequence
ccagggctttgactcaacagaattgagacacgtttgtaatcgctggcgtgccccgcgcacaggatcccagcgaaatcagatttcctggtgaggttgcgtgggtggattaatttggaaaaagaaactgcctatatcttgccatcaaaaaactcacggaggagaagcgcagtcaatcaacagtaaacttaagagaccccggatgcttccgttgtttaaacttgtatgcttgaaaattatctgagaggcaataaacatctgctcctttcttccctctccagaagtccattggaatattaagcccaggagttgctttggggatggctggaagtgcaatgtcttccaagttcttcctagtggctttggccatatttttctccttcgcccaggttgtaattgaagccaattcttggtggtcgctaggtatgaataaccctgttcagatgtcagaagtatatattataggagcacagcctctctgcagccaactggcaggactttctcaaggacagaagaaactgtgccacttgtatcaggaccacatgcagtacatcggagaaggcgcgaagacaggcatcaaagaatgccagtatcaattccgacatcgaaggtggaactgcagcactgtggataacacctctgtttttggcagggtgatgcagataggcagccgcgagacggccttcacatacgcggtgagcgcagcaggggtggtgaacgccatgagccgggcgtgccgcgagggcgagctgtccacctgcggctgcagccgcgccgcgcgccccaaggacctgccgcgggactggctctggggcggctgcggcgacaacatcgactatggctaccgctttgccaaggagttcgtggacgcccgcgagcgggagcgcatccacgccaagggctcctacgagagtgctcgcatcctcatgaacctgcacaacaacgaggccggccgcagggtg

SEQ ID NO: 138095 - DNA, 1299 bp, Artificial Sequence
  derived and/or modified sequence
actcgcctccgtgctcctctcgcccatggaattaattctggctccacttgttgctcggcccagaagtccattggaatattaagcccaggagttgctttggggatggctggaagtgcaatgtcttccaagttcttcctagtggctttggccatatttttctccttcgcccaggttgtaattgaagccaattcttggtggtcgctaggtatgaataaccctgttcagatgtcagaagtatatattataggagcacagcctctctgcagccaactggcaggactttctcaaggacagaagaaactgtgccacttgtatcaggaccacatgcagtacatcggagaaggcgcgaagacaggcatcaaagaatgccagtatcaattccgacatcgaaggtggaactgcagcactgtggataacacctctgtttttggcagggtgatgcagataggcagccgcgagacggccttcacatacgcggtgagcgcagcaggggtggtgaacgccatgagccgggcgtgccgcgagggcgagctgtccacctgcggctgcagccgcgccgcgcgccccaaggacctgccgcgggactggctctggggcggctgcggcgacaacatcgactatggctaccgctttgccaaggagttcgtggacgcccgcgagcgggagcgcatccacgccaagggctcctacgagagtgctcgcatcctcatgaacctgcacaacaacgaggccggccgcaggacggtgtacaacctggctgatgtggcctgcaagtgccatggggtgtccggctcatgtagcctgaagacatgctggctgcagctggcagacttccgcaaggtgggtgatgccctgaaggagaagtacgacagcgcggcggccatgcggctcaacagccggggcaagttggtacaggtcaacagccgcttcaactcgcccaccacacaagacctggtctacatcgaccccagccctgactactgcgtgcgcaatgagagcaccggctcgctgggcacgcagggccgcctgtgcaacaagacgtcggagggcatggatggctgcgagctcatgtgctgcggccgtggctacgaccagttcaagaccgtgcagacggagcgctgccactgcaagttccactggtgctgctacgtcaagtgcaagaagtgcacggagatcgtggaccagtttgtgtgcaagtagtgggtgccacccagcactcagccccgctcccaggacccgcttatttatagaaagtacagtgattctggtttttggtttttagaaatattttttattttt

SEQ ID NO: 138096 - protein, 351 aa, Artificial Sequence
  derived and/or modified sequence
MFLSKPSVYICLFTCVLQLSHSWSVNNFLMTGPKAYLIYSSSVAAGAQSGIEECKYQFAWDRWNCPERALQLSSHGGLRSANRETAFVHAISSAGVMYTLTRNCSLGDFDNCGCDDSRNGQLGGQGWLWGGCSDNVGFGEAISKQFVDALETGQDARAAMNLHNNEAGRKAVKGTMKRTCKCHGVSGSCTTQTCWLQLPEFREVGAHLKEKYHAALKVDLLQGAGNSAAGRGAIADTFRSISTRELVHLEDSPDYCLENKTLGLLGTEGRECLRRGRALGRWERRSCRRLCGDCGLAVEERRAETVSSCNCKFHWCCAVRCEQCRRRVTKYFCSRAERPRGGAAHKPGRKP

SEQ ID NO: 138097 - DNA, 1056 bp, Artificial Sequence
  derived and/or modified sequence
atgttcctgagcaagcccagcgtgtacatctgcctgttcacctgcgtgctgcagctgagccacagctggagcgtgaacaacttcctgatgaccggccccaaggcctacctgatctacagcagcagcgtggccgccggcgcccagagcggcatcgaggagtgcaagtaccagttcgcctgggacagatggaactgccccgagagagccctgcagctgagcagccacggcggcctgagaagcgccaacagagagaccgccttcgtgcacgccatcagcagcgccggcgtgatgtacaccctgaccagaaactgcagcctgggcgacttcgacaactgcggctgcgacgacagcagaaacggccagctgggcggccagggctggctgtggggcggctgcagcgacaacgtgggcttcggcgaggccatcagcaagcagttcgtggacgccctggagaccggccaggacgccagagccgccatgaacctgcacaacaacgaggccggcagaaaggccgtgaagggcaccatgaagagaacctgcaagtgccacggcgtgagcggcagctgcaccacccagacctgctggctgcagctgcccgagttcagagaggtgggcgcccacctgaaggagaagtaccacgccgccctgaaggtggacctgctgcagggcgccggcaacagcgccgccggcagaggcgccatcgccgacaccttcagaagcatcagcaccagagagctggtgcacctggaggacagccccgactactgcctggagaacaagaccctgggcctgctgggcaccgagggcagagagtgcctgagaagaggcagagccctgggcagatgggagagaagaagctgcagaagactgtgcggcgactgcggcctggccgtggaggagagaagagccgagaccgtgagcagctgcaactgcaagttccactggtgctgcgccgtgagatgcgagcagtgcagaagaagagtgaccaagtacttctgcagcagagccgagagacccagaggcggcgccgcccacaagcccggcagaaagccctag

SEQ ID NO: 138098 - DNA, 1056 bp, Artificial Sequence
  derived and/or modified sequence
atgttcctgtctaaacccagcgtctacatctgtctttttacatgcgttctgcagctgtcccatagctggagtgttaacaacttcctgatgacggggcctaaagcttacttaatttatagcagttccgtcgcagcgggcgcccagtccggaattgaggaatgtaaatatcagtttgcgtgggatcggtggaattgtccggagcgagcactccaactgtcctcacatggaggtttacggagcgccaatcgagaaaccgccttcgtgcacgccatttcttctgctggcgtgatgtatacacttacccggaactgctcactcggcgacttcgataactgcggctgcgacgactccaggaacggacagctgggcggccagggatggctctggggaggctgttctgataatgtggggttcggcgaagctatttccaagcaatttgtagacgcactcgaaaccggacaagatgcccgagccgcaatgaacctgcacaacaatgaggctggacgaaaggcggtgaagggaacaatgaaacgtacctgtaagtgtcacggcgtttcaggatcctgcaccacccagacgtgctggctccagttgccggaatttcgcgaagtgggcgcccacctcaaagaaaaataccatgccgcgctcaaggtggacttgttgcagggagcaggcaattctgcggctggtaggggtgcaattgccgataccttccgatccatttctacccgtgagctcgtgcatctggaagacagtccagactactgtctggaaaataagacactcggactccttgggacagagggccgagaatgtctgcgcagggggagggcactgggtcgctgggagaggcgatcttgtagacgtctctgtggcgactgtggcctcgctgtggaagaaaggagggctgaaaccgtttctagctgtaactgtaaattccattggtgctgcgctgtgcggtgtgagcaatgtcgacgccgcgtgaccaaatacttctgtagtcgggctgagcgcccaagaggaggtgccgctcacaaaccaggtcgaaagccatag

SEQ ID NO: 138099 - DNA, 1056 bp, Artificial Sequence
  derived and/or modified sequence
atgttcctgagcaagcccagcgtgtacatctgcctcttcacctgtgtgctgcagctgagccacagctggagcgtgaacaacttcctgatgacaggccccaaggcctacctgatctacagcagctctgtggccgccggggcccagagcggcatcgaggagtgcaagtaccagtttgcctgggaccgctggaactgcccagagcgggccctgcagctgagcagccatggaggcctgcggagcgccaaccgggagacagcctttgtgcacgccatcagcagcgctggggtgatgtacaccctgaccaggaactgcagcctgggggactttgacaactgtggctgtgatgacagcagaaatggccagctgggcggccagggctggctgtggggcggctgcagcgacaacgtgggctttggagaggccatcagcaagcagtttgtggatgccctggagaccggccaggatgcccgggccgccatgaacctgcacaacaatgaagctggcaggaaggctgtgaagggcaccatgaagaggacctgcaagtgccacggcgtgtctggcagctgcaccacccagacctgctggctgcagctgcctgagttccgggaggtgggcgcccacctgaaggagaagtaccacgccgccctgaaggtggacctgctgcagggcgccggcaacagcgctgctggccgcggggccatcgctgacaccttccgcagcatcagcacccgggagctggtgcacctggaggacagcccagactactgcctggagaacaagaccctgggcctgctgggcacagagggcagagaatgtctgcggcggggccgggccctgggccgctgggagcggcgcagctgccggcggctgtgtggggactgtggcctggccgtggaggagaggagagctgagaccgtgagcagctgcaactgcaagttccactggtgctgtgctgtgcgctgtgagcagtgcagaagaagagtgaccaagtacttctgcagcagagctgagcggccccggggcggggccgcccacaagccaggcaggaagccctag

SEQ ID NO: 138100 - DNA, 1056 bp, Artificial Sequence
  derived and/or modified sequence
atgttcctgagcaagcccagcgtgtacatctgcctgttcacctgcgtgttacagctgtcgcactcgtggtccgttaataatttcctgatgaccggtccgaaggcctaccttatctacagctccagcgttgcggccggagctcagtctggaatcgaggagtgcaaataccaattcgcttgggacaggtggaactgccctgagagggctctgcagctctcaagccatggtggacttagatcagcaaaccgcgagaccgccttcgtacacgcaatcagctccgcaggagttatgtatactctgactcggaactgttctctgggtgattttgataactgcggatgcgatgactcacgcaacggtcagctgggtggacagggctggctgtggggcgggtgttctgacaacgtgggatttggagaagctattagcaagcagtttgtggatgcactcgaaacgggtcaggacgcccgagcggctatgaacctgcacaacaacgaggccgggcgcaaggccgtgaaaggcacaatgaagcggacctgcaagtgccacggcgtatccggcagctgcactacgcagacctgttggctacagctgcctgagttccgggaggtgggggcccacctcaaggaaaagtatcatgctgccctgaaggtggacttgctacagggcgccggaaatagcgcggcaggaaggggagctatcgccgacactttccgctccatcagcacgagagagctcgtgcacttggaggattcccccgattattgtctcgagaataaaactctggggctgctcggtaccgaagggcgagagtgcttgcgacgtgggcgtgccctgggtagatgggaaaggaggtcctgtaggagattatgcggtgattgcggccttgctgtcgaggagaggcgagctgaaacagtgagttcttgtaattgcaagttccactggtgttgtgcggtgcggtgtgaacagtgtcgccgacgcgtgacaaaatatttttgcagcagagccgagaggcctagagggggtgcagctcataaaccggggcgcaagccatag

SEQ ID NO: 138101 - DNA, 1056 bp, Artificial Sequence
  derived and/or modified sequence
atgtttctgtccaagccaagtgtgtatatatgtctgttcacttgcgtcctgcagttatctcacagctggtccgtgaataatttcctcatgacaggacccaaggcttatttgatttattcttccagcgtggccgctggcgcacagagtggcatcgaagagtgcaaatatcaatttgcatgggataggtggaattgtcccgaacgggcactccagctgtcttctcatggcggactaaggtcagctaacagagagaccgcttttgtacatgcaatctctagcgctggagttatgtacaccctgacccgcaattgttcactcggggacttcgacaactgtgggtgcgacgactcacgcaacggccagctgggagggcagggctggctctgggggggatgcagcgacaacgtgggcttcggggaggctattagcaagcaattcgtagatgcccttgaaacaggacaggacgcaagagcagctatgaatctccataataatgaagccggtcgaaaggccgtgaaaggaaccatgaagcgcacctgcaagtgtcatggggtgagcggatcatgcaccacccagacctgttggttacagctacccgaatttcgtgaggtgggtgcacatctcaaagagaaataccacgctgcattaaaagttgatttgctgcaaggtgcagggaatagcgcggctggtagaggcgctattgctgatactttccggtccatttctacccgggagctggtgcacctggaggattctccggactactgtctcgaaaataagacactgggcctcctggggacggaaggcagagaatgtctgaggagagggagggctctgggaagatgggagaggcggtcatgtcggagactgtgcggagactgtgggctggcggttgaggaacgccgagccgagactgttagttcctgtaattgtaaattccactggtgttgcgccgtgcggtgcgaacagtgccgcaggagggttacaaagtatttttgctccagggccgagcggccaagagggggtgcagcccacaagccagggcgtaagccatag

SEQ ID NO: 138102 - DNA, 2112 bp, Artificial Sequence
  derived and/or modified sequence
cgcttacacaccaaggaagttgggctttgagaattccatcccactggcactgaggagaatatttctccgtcttgcttacccatctcccagttttttggaattttctctagctgttactccagaggattatgtttctttcaaagccttctgtgtacatctgtcttttcacctgtgtcctccaactcagccacagctggtcggtgaacaatttcctgatgactggtccaaaggcttacctgatttactccagcagtgtggcagctggtgcccagagtggtattgaagaatgcaagtatcagtttgcctgggaccgctggaactgccctgagagagccctgcagctgtccagccatggtgggcttcgcagtgccaatcgggagacagcatttgtgcatgccatcagttctgctggagtcatgtacaccctgactagaaactgcagccttggagattttgataactgtggctgtgatgactcccgcaacgggcaactggggggacaaggctggctgtggggaggctgcagtgacaatgtgggcttcggagaggcgatttccaagcagtttgtcgatgccctggaaacaggacaggatgcacgggcagccatgaacctgcacaacaacgaggctggccgcaaggcggtgaagggcaccatgaaacgcacgtgcaagtgccacggcgtgtctggcagctgcaccacgcagacctgttggctgcagctgcccgagttccgcgaggtgggcgcgcacctgaaggagaagtaccacgcagcactcaaggtggacctgctgcagggtgctggcaacagcgcggccggccgcggcgccatcgccgacacctttcgctccatctctacccgggagctggtgcacctggaggactccccggactactgcctggagaacaaaacgctagggctgctgggcaccgaaggccgagagtgcctaaggcgcgggcgggccctgggtcgctgggaacgccgcagctgccgccggctctgcggggactgcgggctggcggtggaggagcgccgggccgagaccgtgtccagctgcaactgcaagttccactggtgctgcgcagtccgctgcgagcagtgccgccggagggtcaccaagtacttctgtagccgcgcagagcggccgcgggggggcgctgcgcacaaacccgggagaaaaccctaagggtttcctctgccccctccttttcccactggttcttggcttcctttagagaccccggtaattgtggaacctagggaatggggaacccgctctcccagacctagggatcctgagagggagagactgcaatttctccaaagcttgccactttccagcctgtttccccaattcctctgtgctctcctagagctctgtctgaatcctcgcagccacacctaggtctgagaactcaggctttgagttactgatcttccttggattaggagaacaggtgttcctcctcccctctcctagcagccctaatgtctgacctagcctatcaagccttaggcgctggaagaacccttctcagacacgcaggacccaggtaaagtcaaagctttgcccttttgcccactgtctgctaccagggctcacccactgctgcacctctcttctgcacagctcctcccctgctacctgctgagccagattccccaggaatcttgaatgctttctctcctcttctccctttcctttcccagaaaaactgaggaaactggccccggaaaagcatgtctttggggttggttcctagaggcagaggttgaagatggaagagggagctctggagtgctaacttgaacaccaagggtgctactcatccctatggtatcatatcatgaatggactttactagtggggcaatgactttcctagacaataacccgagggactccagatacataccccgaaggtctaggaaatacgttaagggcagattacagtcatttcctaccctttaaaggtaacttctcccttctcctgacctacttcctcctagcaaccaactttacctcttcttctccaaaggatctttgttcctctgagccaagactgaggtaaataaagccactttcctcttcagatcctggtctgcacctctaga

SEQ ID NO: 138103 - protein, 389 aa, Artificial Sequence
  derived and/or modified sequence
MLEEPRPRPPPSGLAGLLFLALCSRALSNEILGLKLPGEPPLTANTVCLTLSGLSKRQLGLCLRNPDVTASALQGLHIAVHECQHQLRDQRWNCSALEGGGRLPHHSAILKRGFRESAFSFSMLAAGVMHAVATACSLGKLVSCGCGWKGSGEQDRLRAKLLQLQALSRGKSFPHSLPSPGPGSSPSPGPQDTWEWGGCNHDMDFGEKFSRDFLDSREAPRDIQARMRIHNNRVGRQVVTENLKRKCKCHGTSGSCQFKTCWRAAPEFRAVGAALRERLGRAIFIDTHNRNSGAFQPRLRPRRLSGELVYFEKSPDFCERDPTMGSPGTRGRACNKTSRLLDGCGSLCCGRGHNVLRQTRVERCHCRFHWCCYVLCDECKVTEWVNVCK

SEQ ID NO: 138104 - DNA, 1170 bp, Artificial Sequence
  derived and/or modified sequence
atgctggaggagcccagacccagacccccccccagcggcctggccggcctgctgttcctggccctgtgcagcagagccctgagcaacgagatcctgggcctgaagctgcccggcgagccccccctgaccgccaacaccgtgtgcctgaccctgagcggcctgagcaagagacagctgggcctgtgcctgagaaaccccgacgtgaccgccagcgccctgcagggcctgcacatcgccgtgcacgagtgccagcaccagctgagagaccagagatggaactgcagcgccctggagggcggcggcagactgccccaccacagcgccatcctgaagagaggcttcagagagagcgccttcagcttcagcatgctggccgccggcgtgatgcacgccgtggccaccgcctgcagcctgggcaagctggtgagctgcggctgcggctggaagggcagcggcgagcaggacagactgagagccaagctgctgcagctgcaggccctgagcagaggcaagagcttcccccacagcctgcccagccccggccccggcagcagccccagccccggcccccaggacacctgggagtggggcggctgcaaccacgacatggacttcggcgagaagttcagcagagacttcctggacagcagagaggcccccagagacatccaggccagaatgagaatccacaacaacagagtgggcagacaggtggtgaccgagaacctgaagagaaagtgcaagtgccacggcaccagcggcagctgccagttcaagacctgctggagagccgcccccgagttcagagccgtgggcgccgccctgagagagagactgggcagagccatcttcatcgacacccacaacagaaacagcggcgccttccagcccagactgagacccagaagactgagcggcgagctggtgtacttcgagaagagccccgacttctgcgagagagaccccaccatgggcagccccggcaccagaggcagagcctgcaacaagaccagcagactgctggacggctgcggcagcctgtgctgcggcagaggccacaacgtgctgagacagaccagagtggagagatgccactgcagattccactggtgctgctacgtgctgtgcgacgagtgcaaggtgaccgagtgggtgaacgtgtgcaagtag

SEQ ID NO: 138105 - DNA, 1170 bp, Artificial Sequence
  derived and/or modified sequence
atgctggaagaacctcggccacgcccaccaccaagcggtctggctggactgctgtttcttgcgctctgttctcgagcacttagtaatgagatactcggtcttaagctgcctggtgaaccacccctcaccgctaatacagtgtgcctgaccctttccggcctgagcaagcggcagcttggcctctgcctgcgtaaccccgacgttactgcctctgccttgcagggactgcacattgccgtgcacgaatgccagcaccagctcagagatcaaagatggaactgcagcgccctggagggtgggggtaggctaccccatcactctgccattctgaaaagggggttcagggagagcgcattcagttttagcatgctcgctgccggcgtgatgcacgccgtcgccacggcttgttcgttgggcaagctggttagctgcggctgtggctggaagggaagcggagagcaggacaggttgagggccaaactactgcagctgcaggctctgtcacgaggaaagagtttcccgcattccttgccaagtccaggaccgggctcctccccaagtccgggtccgcaagatacttgggagtggggcggttgcaatcacgatatggatttcggcgagaagtttagccgagactttctggactctcgggaggccccccgcgatatccaggcacgcatgagaattcataacaatcgggtgggccggcaagtggtgaccgagaacctgaagcgcaagtgcaaatgtcacggcacctcgggcagttgccagtttaaaacgtgttggcgcgcggctcccgagttcagagccgtgggcgcagcacttcgtgagcgtctcggcagagcaattttcattgacacgcacaatcggaactctggcgcatttcagcctaggctccggcccaggcgtctgtccggagagctggtatactttgagaaatcccccgacttttgcgagcgggatccgactatgggcagccccggcactcgagggagggcctgcaataaaaccagtcgactcctggacggatgcggctcgctgtgttgtggacgcggacacaatgttttacgccagacaagagttgagcggtgccattgtcggtttcattggtgctgctacgtcctctgtgatgagtgcaaagtgacagagtgggtcaatgtctgcaaatag

SEQ ID NO: 138106 - DNA, 1170 bp, Artificial Sequence
  derived and/or modified sequence
atgctggaggagccccggccccggcccccacccagcggcctggccggcctgctcttcctggccctgtgcagccgggccctgagcaatgagatcctgggcctgaagctgcctggagagccccccctgacagccaacacagtgtgcctgaccctgagcggcctgagcaagaggcagctgggcctgtgcctgaggaacccagatgtgacagccagcgccctgcagggcctgcacatcgctgtgcatgagtgccagcaccagctgcgggaccagcgctggaactgcagcgccctggagggcggcggccgcctgccccaccacagcgccatcctgaagaggggcttccgggagagcgccttctccttctccatgctggccgccggcgtgatgcatgctgtggccacagcctgcagcctgggcaagctggtgtcctgtggctgcggctggaagggcagcggggagcaggaccggctgcgggccaagctgctgcagctgcaggccctgagccggggcaagagcttcccccacagcctgcccagccctggccctggcagcagccccagccctggcccccaggacacctgggagtggggcggctgcaaccacgacatggactttggagagaagttcagccgggacttcctggacagccgggaggccccccgggacatccaggccaggatgaggatccacaacaacagagtgggccggcaggtggtgacagagaacctgaagaggaagtgcaagtgccacggcaccagcggcagctgccagttcaagacctgctggagggctgcccctgagttccgggctgtgggcgccgccctgcgggagcggctgggccgggccatcttcatcgacacccacaacagaaacagcggggccttccagccccggctgcggccccggcggctgtctggagagctggtgtactttgagaagagcccagacttctgtgagcgggaccccaccatgggcagccctggcacccggggccgggcctgcaacaagaccagccggctgctggatggctgcggcagcctgtgctgcggccggggccacaacgtgctgcggcagaccagggtggagcgctgccactgccgcttccactggtgctgctacgtgctgtgtgatgagtgcaaggtgacagagtgggtgaatgtgtgcaagtag

SEQ ID NO: 138107 - DNA, 1170 bp, Artificial Sequence
  derived and/or modified sequence
atgctggaggagccccggccccggcccccccccagcggcctggccggactgctgtttctcgcgctctgctctcgggccttgtcaaatgaaattctgggcctgaagctgcctggtgaaccacctcttaccgccaatactgtttgcttaacacttagcggcctatctaaacggcaactgggtctgtgtctaagaaaccccgatgttacggcatctgctcttcaaggtctccacattgcagttcacgaatgccagcaccagcttcgagatcagcggtggaattgctctgctctggaaggagggggaaggctgccccatcattcagccattttaaaacgcggtttccgggagtctgcgttctcattctcaatgctagcagcaggcgtgatgcacgctgtggctacggcctgttcactcgggaagcttgtttcttgtggctgcgggtggaaagggtcaggtgagcaggacagactcagagccaagctgctccaacttcaagctctttcccgcggaaaatcgtttcctcattctcttcctagcccaggccccggctcttccccttctccagggccgcaggatacgtgggagtggggaggttgcaaccacgacatggacttcggcgagaaattcagcagggacttcctggatagtagagaggccccacgagatatccaagccaggatgagaatccacaataatcgggttgggagacaagttgtgacagaaaaccttaagcggaagtgcaaatgtcatggcacaagcgggtcctgccagtttaaaacgtgttggcgtgcagctcctgaatttcgtgctgtcggcgctgcacttcgcgagaggctcggccgcgcaatatttattgacactcataaccgcaatagcggcgctttccaaccacggttgagacccaggcggctcagcggggaactcgtctactttgagaaatcgcccgacttttgcgaacgggatccaactatgggaagccctgggacaagggggcgagcatgcaataagaccagccgacttttagacggatgtggctcgctgtgctgtggcagaggacacaacgttcttcgccagacacgggttgaaagatgccattgtagattccactggtgctgctacgtgctctgcgacgagtgtaaagtaacagaatgggtgaatgtgtgcaaatag

SEQ ID NO: 138108 - DNA, 1170 bp, Artificial Sequence
  derived and/or modified sequence
atgctggaagaacctcgaccacgcccacccccttcagggctcgcgggtttgctctttctagcactgtgttctcgggctctctccaatgagattttgggtctcaagcttccaggggaacctccccttaccgccaacactgtgtgcctgacactcagtggtctgtccaagcgccagctggggctttgcttaaggaatcccgatgtgacggcttccgccctgcagggactgcacattgccgtccacgaatgtcaacatcaactgagggatcagagatggaactgtagtgccctcgaaggcggaggtcgtctgcctcatcacagcgccattttaaagagaggcttcagagaatctgctttttccttttcgatgctggccgctggggtgatgcacgcggttgccacagcgtgcagcttgggcaaattggtgagctgtggctgcgggtggaaaggctctggagaacaagacaggctccgcgcaaagcttctacagttgcaagctctgagtagggggaaaagcttcccccattccctaccgtcaccgggacctggtagcagcccctcaccagggccacaggacacctgggagtggggtggatgtaatcacgacatggactttggagagaaattctcaagggactttcttgacagtagagaggcccctcgggatattcaagctaggatgcgcattcacaacaatcgagtgggcagacaggtcgtaaccgagaacttaaaaagaaaatgtaaatgtcacggcacctctggcagttgccagtttaagacgtgttggcgtgccgctcctgaatttagggctgtgggagcagcactcagagagcggctgggtcgtgctattttcatcgacacgcacaaccgaaacagcggggctttccaacccaggttgcgaccgagaaggctgtctggagagttagtctatttcgagaaaagtcccgacttctgtgaaagggaccctactatgggaagtcccggtactaggggcagggcatgtaacaaaacatccagactgctggatggatgcggttctttgtgctgtggaaggggccacaatgtgctgagacaaaccagggtggaacggtgtcactgtagatttcactggtgttgctacgtcctctgtgatgagtgcaaagttacggagtgggtcaatgtgtgtaagtag

SEQ ID NO: 138109 - DNA, 1170 bp, Artificial Sequence
  derived and/or modified sequence
atgcttgaggaaccacgtcctcgccctccaccttctggcctggcaggattgctcttcctggctctgtgttccagagccttgagtaacgagatccttggactgaaactgcccggagaaccacccctgacagccaataccgtgtgcctcacattgagcgggctttcaaaaagacaattgggactgtgtctgcgaaaccctgatgtgacagcgtccgcattacaagggctgcacatagccgtgcatgaatgccagcaccagctccgggatcagcgctggaattgtagcgccctagaggggggaggcaggctgccacaccattcagccattctaaaacggggatttagagaatctgcattttccttttcaatgctggccgctggagtgatgcatgctgttgccaccgcttgcagcttggggaaactggtgtcttgcgggtgcggttggaagggcagcggggagcaagacagactacgagccaagcttttacagctgcaggctctgtctaggggaaaaagctttccccatagcctgccaagtcctggacctggcagcagtccctctcctggcccacaggacacctgggagtggggcggctgtaatcatgatatggattttggagaaaagttttcccgagatttcctggatagccgagaagctcctcgtgacattcaagctcgaatgagaatacacaataacagggtcggccgacaggttgtgaccgaaaacctgaagcgtaagtgcaaatgccatggaacatctgggtcttgtcaattcaagacatgctggagagccgcaccagagttcagagccgtgggagccgccttacgagaacggctgggtagggcaatcttcatagacacccataacaggaatagtggagcctttcagccacgccttcgccccaggagactctccggggagctggtgtacttcgaaaagtccccagatttttgtgagcgagatccgacaatgggcagccctggaactagagggagggcctgcaacaaaacatcccgattgctcgacggatgcggatctctgtgctgtggcagaggtcacaatgtcctcaggcaaacacgtgtagagaggtgccactgcaggtttcactggtgttgttatgtgctctgtgacgagtgtaaggtcaccgaatgggtcaacgtttgcaagtag

SEQ ID NO: 138110 - DNA, 1170 bp, Artificial Sequence
  derived and/or modified sequence
atgctggaagaaccccggccccggccccccccgtcaggtttagctgggctcctgttcctcgccctgtgctctagagcattgtccaatgaaattctgggtcttaaactccctggcgaaccaccgcttacagccaataccgtgtgtttaaccctctccggactgagcaagcgacagctcgggctgtgtcttcgtaatccagatgtaaccgcttcagcacttcaggggttacatatcgccgtgcacgagtgtcaacaccaactgagagatcagagatggaactgtagcgccctggagggagggggcaggctgccacaccattcagcgattttaaagaggggatttcgcgaatctgcattcagtttctcaatgctcgcggctggggtgatgcatgctgttgctactgcttgctcccttggcaagttggtctcttgcggatgcggatggaaggggtcaggtgagcaggatcgcctgcgggcaaaattgttgcaactacaagcactgagccggggtaaaagctttcctcattctctacccagccccggaccaggaagttcaccaagtcctggccctcaggacacctgggaatggggtggatgtaaccacgacatggattttggggagaagttcagtagggattttttggattcaagagaagcaccacgcgatatccaagccaggatgagaatacataacaatagagtgggaagacaggtggtgaccgaaaatttaaagaggaagtgtaagtgccacgggaccagcggctcttgtcagtttaaaacctgttggcgagctgctcccgagtttcgggctgtcggtgctgctctgcgcgaaagactgggccgggccatctttattgatacacataatagaaatagcggcgcattccagccacgactacggcctagacggctctcaggtgagttggtctactttgaaaagtcccccgacttctgtgaacgcgatccaactatggggagtcctggcacacggggtagggcctgtaacaagacttcaaggcttcttgacggatgcggttctctgtgctgcggccgtgggcacaacgttctccgccagactcgtgtggaaagatgccattgtaggttccattggtgctgctatgtcctgtgtgatgagtgcaaggtgacagagtgggttaatgtctgcaagtag

SEQ ID NO: 138111 - DNA, 2274 bp, Artificial Sequence
  derived and/or modified sequence
ggaggggctgcagctccgtcagcccggcagagccaccctgagctcggtgagagcaaagccagagcccccagtcctttgctcgccggcttgctagctctctcgatcactccctcccttcctccctcccttcctcccggcggccgcggcggcgctggggaagcggtgaagaggagtggcccggccctggaagaatgcggctctgacaaggggacagaacccagcgcagtctccccacggtttaagcagcactagtgaagcccaggcaacccaaccgtgcctgtctcggaccccgcacccaaaccactggaggtcctgatcgatctgcccaccggagcctccgggcttcgacatgctggaggagccccggccgcggcctccgccctcgggcctcgcgggtctcctgttcctggcgttgtgcagtcgggctctaagcaatgagattctgggcctgaagttgcctggcgagccgccgctgacggccaacaccgtgtgcttgacgctgtccggcctgagcaagcggcagctaggcctgtgcctgcgcaaccccgacgtgacggcgtccgcgcttcagggtctgcacatcgcggtccacgagtgtcagcaccagctgcgcgaccagcgctggaactgctccgcgcttgagggcggcggccgcctgccgcaccacagcgccatcctcaagcgcggtttccgagaaagtgctttttccttctccatgctggctgctggggtcatgcacgcagtagccacggcctgcagcctgggcaagctggtgagctgtggctgtggctggaagggcagtggtgagcaggatcggctgagggccaaactgctgcagctgcaggcactgtcccgaggcaagagtttcccccactctctgcccagccctggccctggctcaagccccagccctggcccccaggacacatgggaatggggtggctgtaaccatgacatggactttggagagaagttctctcgggatttcttggattccagggaagctccccgggacatccaggcacgaatgcgaatccacaacaacagggtggggcgccaggtggtaactgaaaacctgaagcggaaatgcaagtgtcatggcacatcaggcagctgccagttcaagacatgctggagggcggccccagagttccgggcagtgggggcggcgttgagggagcggctgggccgggccatcttcattgatacccacaaccgcaattctggagccttccagccccgtctgcgtccccgtcgcctctcaggagagctggtctactttgagaagtctcctgacttctgtgagcgagaccccactatgggctccccagggacaaggggccgggcctgcaacaagaccagccgcctgttggatggctgtggcagcctgtgctgtggccgtgggcacaacgtgctccggcagacacgagttgagcgctgccattgccgcttccactggtgctgctatgtgctgtgtgatgagtgcaaggttacagagtgggtgaatgtgtgtaagtgagggtcagccttaccttggggctggggaagaggactgtgtgagaggggcgccttttcagccctttgctctgatttccttccaaggtcactcttggtccctggaagcttaaagtatctacctggaaacagctttaggggtggtgggggtcaggtggactctgggatgtgtagccttctccccaacaattggagggtcttgaggggaagctgccacccctcttctgctccttagacacctgaatggactaagatgaaatgcactgtattgctcctcccacttctcaactccagagcccctttaaccctgattcatactccttttggctggggagtccctatagtttcaccactcctctcccttgagggataaccccaggcactgtttggagccataagatctgtatctagaaagagatcacccactcctatgtactatccccaaactcctttactgcagcctgggctccctcttgtgggataatgggagacagtggtagagaggtttttcttgggaaagagacagagtgctgaggggcactctcccctgaatcctcagagagttgtctgtccaggcccttagggaagttgtctccttccattcagatgttaatggggaccctccaaaggaaggggttttcccatgactcttggagcctctttttccttcttcagcaggaagggtgggaagggataatttatcatactgagacttgttcttggttcctgtttgaaactaaaataaattaagttactgga

SEQ ID NO: 138112 - protein, 365 aa, Artificial Sequence
  derived and/or modified sequence
MLDGSPLARWLAAAFGLTLLLAALRPSAAYFGLTGSEPLTILPLTLEPEAAAQAHYKACDRLKLERKQRRMCRRDPGVAETLVEAVSMSALECQFQFRFERWNCTLEGRYRASLLKRGFKETAFLYAISSAGLTHALAKACSAGRMERCTCDEAPDLENREAWQWGGCGDNLKYSSKFVKEFLGRRSSKDLRARVDFHNNLVGVKVIKAGVETTCKCHGVSGSCTVRTCWRQLAPFHEVGKHLKHKYETALKVGSTTNEAAGEAGAISPPRGRASGAGGSDPLPRTPELVHLDDSPSFCLAGRFSPGTAGRRCHREKNCESICCGRGHNTQSRVVTRPCQCQVRWCCYVECRQCTQREEVYTCKG

SEQ ID NO: 138113 - DNA, 1098 bp, Artificial Sequence
  derived and/or modified sequence
atgctggatgggagccccttagcaagatggttggctgctgcgtttggcctcaccctgctgctggcagcccttagaccttcagccgcatattttggactcaccgggagtgaacctctgacaatcttgcctctaacacttgagcccgaagctgctgcccaagcacactacaaggcttgtgacaggctgaagcttgaaaggaagcagagacgcatgtgtcggagagacccaggggtggccgaaacccttgtggaggcagtctcaatgagtgcccttgaatgccagttccagttccgtttcgagaggtggaattgcacattggaaggcaggtatagagcatcacttctgaagaggggctttaaagagacagcattcctatacgcaattagcagtgcaggcttgacccatgcactggctaaagcatgctcagctgggagaatggagcgatgcacctgtgacgaggcccctgacctggagaatcgagaagcctggcaatggggagggtgcggcgacaacctcaaatactccagtaagtttgttaaagaatttctcgggaggagatcaagcaaggacctgcgagcgcgtgtcgattttcacaacaacctggtcggcgtgaaagtcatcaaagccggagttgagactacttgcaaatgccacggcgtgtcaggttcatgtaccgtgcgcacctgctggcgccagcttgcccctttccacgaggtggggaaacatctcaaacacaagtatgagactgctttaaaagttgggagtaccaccaacgaggctgcaggcgaagcaggtgccattagcccgcctcgcggaagggcctcgggcgctggcggatcagaccccctgcccaggaccccagagctagtccacctagatgactccccatccttctgcctcgcagggaggttttcaccgggaactgctgggaggagatgtcaccgcgaaaagaattgcgaaagcatttgttgcggcaggggccacaatactcagtcacgggtcgtgactcggccttgtcagtgccaggtgcgttggtgttgttatgtggagtgccggcagtgcacccaaagagaagaggtgtacacttgcaagggctag

SEQ ID NO: 138114 - DNA, 1098 bp, Artificial Sequence
  derived and/or modified sequence
atgttggacggatcacccttagcaaggtggctggccgctgcattcggcctgactctgctgctcgctgctcttcgccccagtgctgcttacttcggactgaccggatcagagcctctgaccatacttcctttaacgctcgaacccgaggccgcagcacaggcccactataaagcttgtgatcgcttgaaattggaaaggaaacagagacgcatgtgtcgtcgggaccccggggtggctgagacccttgtggaggccgtatccatgtcagcgctggaatgccagtttcaatttcgttttgagaggtggaattgcaccctggaggggcgatatagggcaagtctgttgaaaaggggatttaaagaaactgcgtttttatacgctatctcttctgccggcctcacacacgccctagctaaagcttgcagcgctggtcggatggaacgctgcacgtgtgatgaagcccctgacctggagaatcgggaagcttggcagtgggggggttgcggggataatcttaagtactcatcaaagttcgtaaaggaattccttgggcgacgctcctctaaagatctcagagcgcgagtggacttccacaacaatttggttggcgtgaaagtaattaaagccggcgtggaaactacttgcaaatgccacggggttagcggtagctgcactgtcaggacgtgttggcggcagctggcaccttttcatgaggttggcaagcatcttaagcataagtatgaaaccgcactgaaagttggcagcaccaccaacgaggccgcgggcgaagcaggtgcgattagtccccccagagggcgggcttcaggagccgggggcagcgatcccttaccaaggacacctgagctcgtacatttggacgacagtccctctttttgtctggcagggagattttcacctgggaccgccgggagaaggtgtcatagggagaagaattgcgagtcgatctgttgcggcagagggcacaatacacagtctagggtcgtaacgaggccgtgccagtgccaagtgcgttggtgctgctacgtagaatgtcgtcagtgcacacagcgggaggaagtgtacacgtgcaagggatag

SEQ ID NO: 138115 - DNA, 1098 bp, Artificial Sequence
  derived and/or modified sequence
atgctggatggcagccccctcgcacggtggctggccgctgcctttggactgacactgcttctggctgctttacgcccaagcgctgcctattttggtctgaccggctcggaaccgttgacaattttgcccttaactctcgagcccgaggctgctgctcaagctcattacaaggcatgtgacagactgaaactggagagaaagcagagaagaatgtgtagacgggatcccggagtggctgaaaccctggtcgaggccgtgagcatgtccgccctcgaatgccagtttcaatttaggttcgaacggtggaattgtacattagaggggcggtaccgtgcttcactcctgaaacgcggctttaaggaaacagcttttctgtatgcaatttcttcggccgggctcacccatgcgctggctaaggcctgttccgctggacggatggaaagatgcacatgtgacgaggcaccagacctagagaatcgagaggcctggcagtgggggggatgcggtgacaatctgaagtacagcagcaaatttgttaaggaatttcttgggagacgaagcagcaaggacctacgcgctagagttgattttcataacaatctcgttggtgtgaaagtaatcaaagctggtgtggaaactacgtgtaagtgtcatggcgtgtctgggtcctgtaccgtcagaacatgttggcggcagctcgctccattccacgaagtaggaaagcacctgaaacataaatacgaaaccgccctgaaagtcggttccaccaccaacgaggcagccggcgaggcaggcgccattagtcccccccgaggacgggcctccggtgctggaggcagcgacccattacctaggacacctgagcttgtgcatttagacgacagtcccagtttttgcctcgcaggccggtttagcccagggacggccgggcgacggtgccaccgggagaaaaactgtgaaagtatttgttgcggccggggacacaatactcaatcaagggtcgtgactcgcccatgtcagtgtcaagttcggtggtgttgttacgtagagtgtcgccagtgtacccagagggaggaagtctacacatgtaaaggatag

SEQ ID NO: 138116 - DNA, 3971 bp, Artificial Sequence
  derived and/or modified sequence
ggcgcggcaagatgctggatgggtccccgctggcgcgctggctggccgcggccttcgggctgacgctgctgctcgccgcgctgcgcccttcggccgcctacttcgggctgacgggcagcgagcccctgaccatcctcccgctgaccctggagccagaggcggctgcccaggcgcactacaaggcctgcgaccggctgaagctggagcggaagcagcggcgcatgtgccgccgggacccgggcgtggcagagacgctggtggaggccgtgagcatgagtgcgctcgagtgccagttccagttccgctttgagcgctggaactgcacgctggagggccgctaccgggccagcctgctcaagcgaggcttcaaggagactgccttcctctatgccatctcctcggctggcctgacgcacgcactggccaaggcgtgcagcgcgggccgcatggagcgctgtacctgcgatgaggcacccgacctggagaaccgtgaggcctggcagtgggggggctgcggagacaaccttaagtacagcagcaagttcgtcaaggaattcctgggcagacggtcaagcaaggatctgcgagcccgtgtggacttccacaacaacctcgtgggtgtgaaggtgatcaaggctggggtggagaccacctgcaagtgccacggcgtgtcaggctcatgcacggtgcggacctgctggcggcagttggcgcctttccatgaggtgggcaagcatctgaagcacaagtatgagacggcactcaaggtgggcagcaccaccaatgaagctgccggcgaggcaggtgccatctccccaccacggggccgtgcctcgggggcaggtggcagcgacccgctgccccgcactccagagctggtgcacctggatgactcgcctagcttctgcctggctggccgcttctccccgggcaccgctggccgtaggtgccaccgtgagaagaactgcgagagcatctgctgtggccgcggccataacacacagagccgggtggtgacaaggccctgccagtgccaggtgcgttggtgctgctatgtggagtgcaggcagtgcacgcagcgtgaggaggtctacacctgcaagggctgagttcccaggccctgccagccctgctgcacagggtgcaggcattgcacacggtgtgaagggtctacacctgcacaggctgagttcctgggctcgaccagcccagctgcgtggggtacaggcattgcacacagtgtgaatgggtctacacctgcatgggctgagtccctgggctcagacctagcagcgtggggtgagtccctgggctcagtcctagctgcatggggtgcaggcattgcacagagcatgaatgggcctacacctgccaaggctgaatccctgggcccagtcagccctgctgcacatggcacaggcattgcacacggtgtgaggagtgtacacctgcaagggctgaggccctgggcccagtcagccctgctgctcagagtgcaggcattgcacatggtgtgagaaggtctacacctgcaagggacgagtccccgggcctggccaaccctgctgtgcagggtgagggccatgcatgcagtatgaggggtctacacctgcaaggactgagaggcttttctagcacgtcggggcgtacagctggagcagggtgccgggggtcctctgggttggctgtccaagccctgtatctccccctctccaggacccagaggcgggggttggctctggtctggcgtatgcaacctctctgcttgtgccctgggcctcagcttcctccctctgacccgagagcattgcaccaatgctttctgagctttctcccatccctaacacaccagtccctgggaagcggctccccatgccagtccattggctttccctccccacctcctctgaggcatgggtggcaggtgcaccttggtgaccatgcggcctccgtgtgggccacccgttggggactggcctggcccaggctgccccaacaccagcactgtcttcagagactcaaaccactagaagaggacgcagcctgttctgcactcccagggcccggccgtgcgggtgcccaggctcggggggacactgccgacctctgacgttgagcacttctctttggagtaaatatcagtgacttttaaattattatgattatttaactaatataataattattattttctccatccctgccacctccccggctgcagctccccgctctcggccaagccccagtctgggagggccccgccttccgtccctgacatattccctcctaaccctgcctctgatctgcttagttgtttgaaaccactaaatcgagatagatgtgtgtagttaaggaaatacagtgagctgcgtctggccacagcccttggggcttctggaagccagctcccccagccccatgccagccagccactgccacgtggtgggccagccggcggcccctgccctgcaccctgtgggcagacgcccggcctccaggcagctcagtgcagattctcgagctgggggtggtggagaggggcgggcatggtgagggggcagggcagccctttgattggttcatgtcatgtcatgaggaagctgcttgctttgtgtcactgggggacagattgggacagatgccggtggaggcagtcttgggctcgcatctggccatggaacgccatgctttatggccctgctgttgtgtgtgctggggacagggtgacctgcactgacctggcttggtttgagggtgtagtgtgtgtgtgtgttgtgagagtgtgtgtgctggcgtggtcagtgtgcatacgtgtgcgtatgttgtgagtgttgtgagtgcgtgtgtgctggcgtggtcaatgtgtgtaagcgtgtgttgtataaatgcatgctggcatggtctgtgtgtgtgtgtgtgtgtgtgtgtgtgtgtgtgtgtatactggcatggtcagcttggctgtgctgtgctgtcagtggcatggcggtgccttaggttcccagagcctctcgccctgggctccgtcttgtgggtgtcctgatggctgtgggctgggttctgggcgggttgctggtatggatacaggaactactgagtgaataggtgtctcagagccctaagggtctccagaaagccggggtgtctgtgtttttaaaagaaaacctatttatgttgctgtgggtctctgccgtccctgtgttatagtacataagaacctttattctcctgtggttcagagagcaccccgacatgtgcctgcagctgcatccccgtaccacagtgtgggtgcaagacgctgggtttgtcctttgtctggtgaagcctggctagaaggggtgggggtggtagcccctgccctctgcagtgtccgcatccactggtccctgagcagcatagctggccacaccctcatgacatgacaagactgtcactcagtcactattgggtctatgaagggcgtcaagtcagaggaaggtttttatttttaatcaaataccacatttagctctatgtcataaatattcagaaaactatttttttaaacaaggcagaccaaaaatgtctgctagctagttggtttctatacaaatacatattcgaatgtcttgctggatgaagaggccgctcagccggagcctcctgtttcatgcgcttctcttctgaggggcagtagaggagaaagggctgttgggaggggttcagcccgctccttggccaggggatcccagccaccttctctgcaccaggccctgccttgagggacctggacccccaggtggcttctggccaggtgtgggtgggtgggaggggccctgtctgtgctccgagtctccgtgcgtgcaatgatttctctacctcatctgtgtggcccgtcccagagggactgtggagaatgtatttatttaacagctttgtgtcacagaaccagaaacaaatggaaacattaaataaatgtattttaaattata

SEQ ID NO: 138117 - DNA, 1098 bp, Artificial Sequence
  derived and/or modified sequence
atgctggacggcagccccctggccagatggctggccgccgccttcggcctgaccctgctgctggccgccctgagacccagcgccgcctacttcggcctgaccggcagcgagcccctgaccatcctgcccctgaccctggagcccgaggccgccgcccaggcccactacaaggcctgcgacagactgaagctggagagaaagcagagaagaatgtgcagaagagaccccggcgtggccgagaccctggtggaggccgtgagcatgagcgccctggagtgccagttccagttcagattcgagagatggaactgcaccctggagggcagatacagagccagcctgctgaagagaggcttcaaggagaccgccttcctgtacgccatcagcagcgccggcctgacccacgccctggccaaggcctgcagcgccggcagaatggagagatgcacctgcgacgaggcccccgacctggagaacagagaggcctggcagtggggcggctgcggcgacaacctgaagtacagcagcaagttcgtgaaggagttcctgggcagaagaagcagcaaggacctgagagccagagtggacttccacaacaacctggtgggcgtgaaggtgatcaaggccggcgtggagaccacctgcaagtgccacggcgtgagcggcagctgcaccgtgagaacctgctggagacagctggcccccttccacgaggtgggcaagcacctgaagcacaagtacgagaccgccctgaaggtgggcagcaccaccaacgaggccgccggcgaggccggcgccatcagcccccccagaggcagagccagcggcgccggcggcagcgaccccctgcccagaacccccgagctggtgcacctggacgacagccccagcttctgcctggccggcagattcagccccggcaccgccggcagaagatgccacagagagaagaactgcgagagcatctgctgcggcagaggccacaacacccagagcagagtggtgaccagaccctgccagtgccaggtgagatggtgctgctacgtggagtgcagacagtgcacccagagagaggaggtgtacacctgcaagggctag

SEQ ID NO: 138118 - DNA, 1098 bp, Artificial Sequence
  derived and/or modified sequence
atgctggatggttcacctctagcacggtggttggcagccgcgtttggcttaacgctgctgctggcagcgcttcggccttctgcggcctacttcggactgactggaagcgagcccctcaccattttgccactgaccctggagcctgaggcagccgctcaggcacactacaaggcttgcgatcgcctcaaattggagcgtaagcagagaaggatgtgccgcagagaccccggtgtggcggagactctagtggaggccgtgtccatgtctgcattggagtgccagttccagttccgcttcgaacggtggaattgcactctcgagggcaggtatagggcctcactgttgaagcgcggattcaaagagactgccttcctctacgcgatcagcagcgcggggctgactcacgcgctggctaaggcctgttcagcaggccggatggagagatgtacctgtgacgaagcccctgatctagaaaaccgggaggcatggcagtggggcggttgtggagacaatctgaaatactcatcaaagtttgtgaaagagtttttgggaaggagaagcagcaaggatctccgggcccgggtcgatttccataacaacctggtgggcgtgaaagtcattaaggcgggtgtcgaaacaacatgcaagtgccacggagtgagtgggagctgtacggtccgcacctgttggcgtcagcttgcaccctttcatgaggtgggaaagcatctgaagcacaagtacgagaccgccctcaaggtgggatcaactaccaacgaagctgcaggggaggctggcgccatttcacctccacgcggcagagccagcggcgccggcggcagcgatccacttccaagaaccccggagctcgtccatttggatgattcaccaagcttttgcctcgccggcaggttctctcccggaaccgcagggagacgctgtcacagagagaagaattgcgaatccatttgttgtggacgaggacacaacactcagagtagagtagttacccgcccctgtcagtgccaggtgaggtggtgttgttacgtcgagtgcaggcaatgcacgcagagggaggaggtgtacacgtgcaaaggatag

SEQ ID NO: 138119 - DNA, 1098 bp, Artificial Sequence
  derived and/or modified sequence
atgctggatggcagccccctggcccgctggctggccgccgccttcggcctgaccctgctgctggccgccctgcggcccagcgctgcctacttcggcctgaccggcagcgagcccctgaccatcctgcccctgaccctggagcctgaggccgccgcccaggcccactacaaggcctgtgaccggctgaagctggagaggaagcagaggaggatgtgcagaagagaccccggggtggccgagaccctggtggaggccgtgtccatgtctgccctggagtgccagttccagttccgctttgagcgctggaactgcaccctggagggccgctaccgggccagcctgctgaagaggggcttcaaggagacagccttcctgtatgccatcagcagcgctggcctgacccacgccctggccaaggcctgcagcgctggccgcatggagcgctgcacctgtgatgaggccccagacctggagaaccgggaggcctggcagtggggcggctgtggggacaacctgaagtacagcagcaagtttgtgaaggagttcctgggcagaagaagcagcaaggacctgcgggcccgggtggacttccacaacaacctggtgggcgtgaaggtgatcaaggccggcgtggagaccacctgcaagtgccacggcgtgtctggcagctgcaccgtgaggacctgctggaggcagctggcccccttccacgaggtgggcaagcacctgaagcacaagtatgaaacagccctgaaggtgggcagcaccaccaatgaggccgccggggaggccggggccatcagccccccccggggccgggccagcggggccggcggcagtgaccccctgcccaggaccccagagctggtgcacctggatgacagccccagcttctgcctggccggccgcttcagccctggaacagctggaagacgctgccaccgggagaagaactgtgagagcatctgctgcggccggggccacaacacccagagccgggtggtgacccggccctgccagtgccaggtgcgctggtgctgctacgtggagtgccggcagtgcacccagcgggaggaggtgtacacctgcaagggctag

SEQ ID NO: 138120 - DNA, 1098 bp, Artificial Sequence
  derived and/or modified sequence
atgctggacggcagccccctggcccggtggctggccgccgccttcgggctgacactcctgctcgcggctttacgcccctccgccgcctattttggcctcaccggctcagaaccattaacgattttgcccctcaccttagaacctgaggccgcagcccaggctcattataaggcctgtgataggttaaagctggagaggaagcaaaggcgcatgtgccgtcgggacccaggagtcgctgaaactttagtggaggctgtttctatgtctgcattagagtgccagttccagtttcggtttgagcgctggaattgcactttggagggccgctaccgagcatcactgctgaagaggggtttcaaggaaacagccttcctttatgcaataagcagcgctggtctgacccatgcgcttgccaaggcctgcagtgccggccgtatggaaaggtgcacgtgtgatgaagcccccgatctggagaatcgcgaagcgtggcaatggggaggttgcggtgataacttaaaatactcctccaagttcgtcaaggagtttctcgggcgccgtagttcaaaagatcttagggccagggtcgactttcataataaccttgttggtgtcaaggttattaaagctggggtcgaaacaacatgtaagtgccacggcgtctcggggtcttgtactgtgcgtacatgctggcggcagctggctcctttccacgaggtggggaaacatcttaagcacaaatatgaaacagctctaaaagttggttctaccactaatgaagcagcgggagaggccggggccatttcccctcctcgaggaagagcatctggtgcaggtggatccgaccccctccctcggacaccggaactcgtgcacctggatgactcaccctccttctgtttggctgggcgcttttctccaggtacagccgggcggcgatgtcatcgtgagaaaaattgcgagtccatatgctgtggcaggggtcataacacccagagtagggtggtaacacgcccctgccagtgccaggtccgttggtgttgctacgtggagtgcagacagtgtacgcaaagggaggaagtgtacacctgtaaggggtag

SEQ ID NO: 138121 - RNA, 1098 nt, Artificial Sequence
  derived and/or modified sequence
auguuggacggaucacccuuagcaagguggcuggccgcugcauucggccugacucugcugcucgcugcucuucgccccagugcugcuuacuucggacugaccggaucagagccucugaccauacuuccuuuaacgcucgaacccgaggccgcagcacaggcccacuauaaagcuugugaucgcuugaaauuggaaaggaaacagagacgcaugugucgucgggaccccgggguggcugagacccuuguggaggccguauccaugucagcgcuggaaugccaguuucaauuucguuuugagagguggaauugcacccuggaggggcgauauagggcaagucuguugaaaaggggauuuaaagaaacugcguuuuuauacgcuaucucuucugccggccucacacacgcccuagcuaaagcuugcagcgcuggucggauggaacgcugcacgugugaugaagccccugaccuggagaaucgggaagcuuggcaguggggggguugcggggauaaucuuaaguacucaucaaaguucguaaaggaauuccuugggcgacgcuccucuaaagaucucagagcgcgaguggacuuccacaacaauuugguuggcgugaaaguaauuaaagccggcguggaaacuacuugcaaaugccacgggguuagcgguagcugcacugucaggacguguuggcggcagcuggcaccuuuucaugagguuggcaagcaucuuaagcauaaguaugaaaccgcacugaaaguuggcagcaccaccaacgaggccgcgggcgaagcaggugcgauuaguccccccagagggcgggcuucaggagccgggggcagcgaucccuuaccaaggacaccugagcucguacauuuggacgacagucccucuuuuugucuggcagggagauuuucaccugggaccgccgggagaaggugucauagggagaagaauugcgagucgaucuguugcggcagagggcacaauacacagucuagggucguaacgaggccgugccagugccaagugcguuggugcugcuacguagaaugucgucagugcacacagcgggaggaaguguacacgugcaagggauag

SEQ ID NO: 138122 - RNA, 1098 nt, Artificial Sequence
  derived and/or modified sequence
augcuggauggcagcccccucgcacgguggcuggccgcugccuuuggacugacacugcuucuggcugcuuuacgcccaagcgcugccuauuuuggucugaccggcucggaaccguugacaauuuugcccuuaacucucgagcccgaggcugcugcucaagcucauuacaaggcaugugacagacugaaacuggagagaaagcagagaagaauguguagacgggaucccggaguggcugaaacccuggucgaggccgugagcauguccgcccucgaaugccaguuucaauuuagguucgaacgguggaauuguacauuagaggggcgguaccgugcuucacuccugaaacgcggcuuuaaggaaacagcuuuucuguaugcaauuucuucggccgggcucacccaugcgcuggcuaaggccuguuccgcuggacggauggaaagaugcacaugugacgaggcaccagaccuagagaaucgagaggccuggcagugggggggaugcggugacaaucugaaguacagcagcaaauuuguuaaggaauuucuugggagacgaagcagcaaggaccuacgcgcuagaguugauuuucauaacaaucucguuggugugaaaguaaucaaagcugguguggaaacuacguguaagugucauggcgugucuggguccuguaccgucagaacauguuggcggcagcucgcuccauuccacgaaguaggaaagcaccugaaacauaaauacgaaaccgcccugaaagucgguuccaccaccaacgaggcagccggcgaggcaggcgccauuagucccccccgaggacgggccuccggugcuggaggcagcgacccauuaccuaggacaccugagcuugugcauuuagacgacagucccaguuuuugccucgcaggccgguuuagcccagggacggccgggcgacggugccaccgggagaaaaacugugaaaguauuuguugcggccggggacacaauacucaaucaagggucgugacucgcccaugucagugucaaguucggugguguuguuacguagagugucgccaguguacccagagggaggaagucuacacauguaaaggauag

SEQ ID NO: 138123 - protein, 357 aa, Artificial Sequence
  derived and/or modified sequence
MRPPPALALAGLCLLALPAAAASYFGLTGREVLTPFPGLGTAAAPAQGGAHLKQCDLLKLSRRQKQLCRREPGLAETLRDAAHLGLLECQFQFRHERWNCSLEGRMGLLKRGFKETAFLYAVSSAALTHTLARACSAGRMERCTCDDSPGLESRQAWQWGVCGDNLKYSTKFLSNFLGSKRGNKDLRARADAHNTHVGIKAVKSGLRTTCKCHGVSGSCAVRTCWKQLSPFRETGQVLKLRYDSAVKVSSATNEALGRLELWAPARQGSLTKGLAPRSGDLVYMEDSPSFCRPSKYSPGTAGRVCSREASCSSLCCGRGYDTQSRLVAFSCHCQVQWCCYVECQQCVQEELVYTCKH

SEQ ID NO: 138124 - DNA, 1074 bp, Artificial Sequence
  derived and/or modified sequence
atgagaccaccgccagctctcgccttggcaggcctgtgcctgcttgccttgccagccgctgccgcttcgtacttcgggctgactggaagggaggttttgactccatttcctggattaggaacggcagccgcacccgcacagggtggcgctcacctgaagcagtgcgacctgctcaagttgtcccgacgccagaagcagttgtgtaggagagagccgggactggcagagacccttcgtgacgctgcccacctcgggctcctggagtgtcagttccaattcaggcatgagaggtggaattgctcactcgaagggagaatgggactgctcaagcggggtttcaaggaaaccgcatttttatacgcagtatctagtgccgcacttactcacaccttggccagggcctgttccgccggacggatggagaggtgcacctgcgatgacagtccgggtctggagagccggcaggcgtggcaatggggcgtctgcggggacaacctgaagtacagtacgaaatttctttctaacttcctgggcagtaagaggggtaataaggatcttcgggctagggctgatgctcataacactcacgtaggcattaaggccgtaaaaagcggactgcggaccacttgcaaatgtcacggagtgtcgggatcttgcgcggttcgaacgtgctggaaacagctgtccccgtttagggagactgggcaggttctcaaactcagatacgatagcgcggtgaaagtctcctcagccaccaacgaagccctgggtcgcctggaactttgggcgccagcccgacagggcagcctgacaaaaggattagccccacggtctggcgacctggtctacatggaagacagtccatccttttgtcggccttctaagtattcgccaggtactgcaggacgtgtatgctctcgcgaagcctcttgcagctccttatgctgcggacgtggttacgacactcaaagcaggctcgtcgccttttcctgccactgtcaggtgcaatggtgctgttacgtcgaatgtcagcaatgtgtgcaagaggaattagtttacacctgcaagcattag

SEQ ID NO: 138125 - DNA, 1074 bp, Artificial Sequence
  derived and/or modified sequence
atgcgcccaccccctgccctcgctctggcgggcttgtgtctcctggctctccctgccgctgccgcctcatatttcggactgactggaagagaggtgttgaccccattccccggtctcgggaccgcagccgcccctgctcaaggcggggctcatctcaaacaatgtgatctgctaaaattaagccggcgtcaaaaacagctctgcaggcgggagcctggcctggctgagaccctgagagatgcagcacacctgggattactggagtgccagtttcaattccgccatgaaagatggaattgctcattagagggacgcatgggtctgcttaagaggggatttaaggaaactgctttcttatacgcagtaagtagcgcagcgctcacccatacgctcgcacgggcgtgtagcgccggacggatggagagatgcacgtgcgatgattcacctggtctggagagtaggcaagcttggcagtggggggtgtgcggcgacaacctcaaatactctacaaagtttctgagcaatttccttggcagtaagcgagggaataaagatcttcgtgcccgcgccgacgcacacaacacacacgtcgggattaaggcggtaaaatctgggttgaggactacctgcaagtgccacggtgtttcaggttcatgcgccgtaaggacgtgttggaagcaactgtcgccctttcgtgaaaccgggcaggttttaaaattgcggtacgatagcgcggttaaggtaagcagcgcaaccaatgaagctctgggtaggttggagttgtgggctccagcaagacagggctctttgaccaagggcctagccccgcgttctggtgacctggtatacatggaagatagtccatcattctgtcggccatctaaatattctcctggaaccgccggaagggtgtgctcccgcgaggccagttgttcttccctctgttgcggcaggggctatgacacccagagtcggctcgtggctttttcctgccactgtcaggtacagtggtgctgctacgtggagtgtcagcaatgcgtccaagaggagttggtgtacacatgtaaacactag

SEQ ID NO: 138126 - DNA, 1074 bp, Artificial Sequence
  derived and/or modified sequence
atgagacctccccctgccctggctctggcgggtttatgcctactggccctgcccgcagctgctgcctcctatttcggactgacaggacgcgaggtattgacccccttccctggtctcggtactgccgctgcaccagcccagggcggagcgcatctgaaacagtgtgacctccttaaactcagtcggcgtcagaaacaactctgtaggagggagccaggactggccgaaaccctgcgggatgcagctcacctcggcctacttgagtgccaattccagttcagacatgaacggtggaactgcagtctagaagggaggatgggactcctaaaaagaggattcaaggagacagcttttctgtatgccgtatcatcagctgcgctaacccacacccttgctcgggcttgcagcgctggaaggatggaacgctgcacatgcgatgactcaccaggcctagagagcagacaggcgtggcaatggggggtgtgcggggataacctgaagtattccacaaaatttctgagcaatttcctgggttcaaagcggggtaacaaagacttacgcgcccgcgccgacgcccataatacacatgtggggattaaggccgttaagtcaggactgaggacgacatgcaaatgccacggcgtgtcaggcagctgtgcggtgcgcacctgttggaagcagctttcgccattcagggaaacaggacaggtcctcaagttacgttacgactcggccgtcaaagtctcaagcgctaccaatgaggccttaggcagacttgaactctgggccccagctcgacagggctcgttaacgaaaggcttggcccctcgcagtggcgacctagtgtacatggaggactcacccagcttctgtagaccaagtaaatactcaccaggcactgcgggtcgggtctgttctagagaagccagttgttcttctctgtgttgtggacgtgggtatgatacacaaagtcggctggtcgctttttcatgtcactgccaagtgcagtggtgctgttatgtggaatgtcaacaatgtgtacaagaggaattggtgtacacatgcaagcattag

SEQ ID NO: 138127 - DNA, 1464 bp, Artificial Sequence
  derived and/or modified sequence
gcgaggagatgctagagggcgcagcgccgccagcaccatgcgccccccgcccgcgctggccctggccgggctctgcctgctggcgctgcccgccgccgccgcctcctacttcggcctgaccgggcgggaagtcctgacgcccttcccaggattgggcactgcggcagccccggcacagggcggggcccacctgaagcagtgtgacctgctgaagctgtcccggcggcagaagcagctctgccggagggagcccggcctggctgagaccctgagggatgctgcgcacctcggcctgcttgagtgccagtttcagttccggcatgagcgctggaactgtagcctggagggcaggatgggcctgctcaagagaggcttcaaagagacagctttcctgtacgcggtgtcctctgccgccctcacccacaccctggcccgggcctgcagcgctgggcgcatggagcgctgcacctgtgatgactctccggggctggagagccggcaggcctggcagtggggcgtgtgcggtgacaacctcaagtacagcaccaagtttctgagcaacttcctggggtccaagagaggaaacaaggacctgcgggcacgggcagacgcccacaatacccacgtgggcatcaaggctgtgaagagtggcctcaggaccacgtgtaagtgccatggcgtatcaggctcctgtgccgtgcgcacctgctggaagcagctctccccgttccgtgagacgggccaggtgctgaaactgcgctatgactcggctgtcaaggtgtccagtgccaccaatgaggccttgggccgcctagagctgtgggcccctgccaggcagggcagcctcaccaaaggcctggccccaaggtctggggacctggtgtacatggaggactcacccagcttctgccggcccagcaagtactcacctggcacagcaggtagggtgtgctcccgggaggccagctgcagcagcctgtgctgcgggcggggctatgacacccagagccgcctggtggccttctcctgccactgccaggtgcagtggtgctgctacgtggagtgccagcaatgtgtgcaggaggagcttgtgtacacctgcaagcactaggcctactgcccagcaagccagtctggcactgccaggacctcctgtggcacccttcaagctgcccagccggccctctgggcagactgtcatcacatgcatgcataaaccggcatgtgtgccaatgcacacgagtgtgccactcaccaccattccttggccagccttttgcctccctcgatactcaacaaagagaagcaaagcctcctcccttaacccaagcatccccaaccttgttgaggacttggagaggagggcagagtgagaaagacatggagggaaataagggagaccaagagcacagcaggactgaaattttggacgggagagaggggctattccatcttgcttcctgg

SEQ ID NO: 138128 - DNA, 1074 bp, Artificial Sequence
  derived and/or modified sequence
atgagacccccccccgccctggccctggccggcctgtgcctgctggccctgcccgccgccgccgccagctacttcggcctgaccggcagagaggtgctgacccccttccccggcctgggcaccgccgccgcccccgcccagggcggcgcccacctgaagcagtgcgacctgctgaagctgagcagaagacagaagcagctgtgcagaagagagcccggcctggccgagaccctgagagacgccgcccacctgggcctgctggagtgccagttccagttcagacacgagagatggaactgcagcctggagggcagaatgggcctgctgaagagaggcttcaaggagaccgccttcctgtacgccgtgagcagcgccgccctgacccacaccctggccagagcctgcagcgccggcagaatggagagatgcacctgcgacgacagccccggcctggagagcagacaggcctggcagtggggcgtgtgcggcgacaacctgaagtacagcaccaagttcctgagcaacttcctgggcagcaagagaggcaacaaggacctgagagccagagccgacgcccacaacacccacgtgggcatcaaggccgtgaagagcggcctgagaaccacctgcaagtgccacggcgtgagcggcagctgcgccgtgagaacctgctggaagcagctgagccccttcagagagaccggccaggtgctgaagctgagatacgacagcgccgtgaaggtgagcagcgccaccaacgaggccctgggcagactggagctgtgggcccccgccagacagggcagcctgaccaagggcctggcccccagaagcggcgacctggtgtacatggaggacagccccagcttctgcagacccagcaagtacagccccggcaccgccggcagagtgtgcagcagagaggccagctgcagcagcctgtgctgcggcagaggctacgacacccagagcagactggtggccttcagctgccactgccaggtgcagtggtgctgctacgtggagtgccagcagtgcgtgcaggaggagctggtgtacacctgcaagcactag

SEQ ID NO: 138129 - DNA, 1074 bp, Artificial Sequence
  derived and/or modified sequence
atgcgccctcctcctgccttggctcttgccgggctctgcctgctcgcactgcccgctgccgcagctagttacttcgggctcaccgggcgcgaagttctgactccctttccaggcctcgggacagcagcagcaccagctcagggaggcgctcacctcaagcaatgtgatttactaaaactctctcggaggcaaaaacagttgtgcagaagagagcccggtcttgccgagactctgagggatgccgctcatctgggattacttgaatgccagttccagtttcgccacgagaggtggaactgcagtctggagggaagaatgggcctgctgaaaaggggattcaaggaaactgcattcttgtacgcagttagctccgccgccctgacacatactctggctcgagcatgtagcgccgggaggatggaaagatgcacttgtgacgactctcctggattggaatcgaggcaggcatggcaatggggcgtctgtggcgacaacctgaaatacagcaccaagtttctaagtaactttctcggatccaaaaggggcaataaggaccttcgcgcaagagcggatgcccacaacactcatgtaggaataaaagcagtcaagtcagggctgcggacaacctgtaagtgccatggggtcagcggctcctgtgccgtgcgtacatgctggaagcagctgtccccttttagagagactgggcaggtactaaaattgcggtatgatagcgctgtgaaagtttcatccgccaccaatgaagcacttggccggttagagctctgggcccccgcccggcaagggtccttaaccaagggattggctcctaggtccggcgacctggtttatatggaagacagcccatccttttgccgccccagtaaatacagtccagggacggcgggacgagtctgctctagggaagccagttgctcctccctgtgctgcggtcgagggtacgatacacagtctcgattggtagcatttagctgtcactgtcaggttcagtggtgctgctacgtagaatgccagcagtgcgtccaagaagaactcgtgtacacatgtaagcattag

SEQ ID NO: 138130 - DNA, 1074 bp, Artificial Sequence
  derived and/or modified sequence
atgaggcctcctccagccctggccctggccggcctgtgcctgctggccctgcctgctgctgctgccagctacttcggcctgaccggccgggaggtgctgacccccttccctggcctgggcacagctgctgccccagcccagggcggggcccacctgaagcagtgtgacctgctgaagctgagccggcggcagaagcagctgtgcagaagagagcccggcctggccgagaccctgagagatgctgcccacctgggcctgctggagtgccagttccagttcagacatgagcgctggaactgcagcctggagggccgcatgggcctgctgaagaggggcttcaaggagacagccttcctgtatgctgtgagcagcgctgccctgacccacaccctggcccgggcctgcagcgctggccgcatggagcgctgcacctgtgatgacagccctggcctggagagccggcaggcctggcagtggggcgtgtgtggggacaacctgaagtacagcaccaagttcctgagcaacttcctgggcagcaagaggggcaacaaggacctgcgggcccgggcagatgcccacaacacccacgtgggcatcaaggctgtgaagagcggcctgcggaccacctgcaagtgccacggcgtgtctggcagctgtgctgtgaggacctgctggaagcagctgagccccttccgggagaccggccaggtgctgaagctgcgctatgacagcgctgtgaaggtgagcagcgccaccaatgaggccctgggccgcctggagctgtgggccccagcccggcagggcagcctgaccaagggcctggcccccaggtctggggacctggtgtacatggaggacagccccagcttctgccggcccagcaagtacagccctggaacagctggccgggtgtgcagccgggaggccagctgcagcagcctgtgctgcggccggggctatgacacccagagccggctggtggccttcagctgccactgccaggtgcagtggtgctgctacgtggagtgccagcagtgtgtgcaggaggagctggtgtacacctgcaagcactag

SEQ ID NO: 138131 - DNA, 1074 bp, Artificial Sequence
  derived and/or modified sequence
atgcggcccccccccgccctggccctggccggcctgtgcctgctggccttgccagctgctgcggcttcttattttgggctgaccggaagagaggttctcaccccctttccaggcctgggaaccgcggctgccccagcccaaggtggggcccacctcaaacagtgtgaccttctgaagctttctcgaaggcagaaacagctgtgtcgccgcgaaccaggcctggcggagactctgcgggacgcggcccatctgggactgctcgagtgccaattccagtttcggcatgagagatggaattgctcactagaaggccgaatgggacttcttaagcgtggctttaaggagactgcctttctttatgccgtcagcagcgctgctttgacccacactctggctagggcttgcagcgcagggagaatggaaagatgcacctgtgacgacagtcctggcctagagtccaggcaggcctggcagtggggcgtgtgcggtgacaatctgaagtatagcaccaaattcctgtcaaatttcctgggtagtaaaagagggaacaaagacctgagagcccgcgccgacgcccataacacccacgtcggcataaaggctgtgaagtctggtctacggaccacatgtaaatgtcacggagtgagtgggagctgtgccgtgcgtacatgctggaaacagcttagtcctttccgcgagactggtcaggttctcaaattgcggtatgattcagcagtcaaggtctctagcgctacaaacgaagctctgggccggctcgagttgtgggcccctgcccgccagggctccctaaccaagggtttagcccctcgtagcggcgatctggtgtatatggaggattcaccgtctttctgcagaccttctaagtactctcctggcactgcaggacgcgtctgctcaagagaagcttcatgctctagtctctgctgcggaagggggtacgatacacaaagcagactggtcgccttcagctgccattgccaggtgcaatggtgctgttatgtcgagtgtcagcagtgtgtacaggaagagctggtctatacttgcaaacactag

SEQ ID NO: 138132 - RNA, 1074 nt, Artificial Sequence
  derived and/or modified sequence
augcgcccacccccugcccucgcucuggcgggcuugugucuccuggcucucccugccgcugccgccucauauuucggacugacuggaagagagguguugaccccauuccccggucucgggaccgcagccgccccugcucaaggcggggcucaucucaaacaaugugaucugcuaaaauuaagccggcgucaaaaacagcucugcaggcgggagccuggccuggcugagacccugagagaugcagcacaccugggauuacuggagugccaguuucaauuccgccaugaaagauggaauugcucauuagagggacgcaugggucugcuuaagaggggauuuaaggaaacugcuuucuuauacgcaguaaguagcgcagcgcucacccauacgcucgcacgggcguguagcgccggacggauggagagaugcacgugcgaugauucaccuggucuggagaguaggcaagcuuggcaguggggggugugcggcgacaaccucaaauacucuacaaaguuucugagcaauuuccuuggcaguaagcgagggaauaaagaucuucgugcccgcgccgacgcacacaacacacacgucgggauuaaggcgguaaaaucuggguugaggacuaccugcaagugccacgguguuucagguucaugcgccguaaggacguguuggaagcaacugucgcccuuucgugaaaccgggcagguuuuaaaauugcgguacgauagcgcgguuaagguaagcagcgcaaccaaugaagcucuggguagguuggaguugugggcuccagcaagacagggcucuuugaccaagggccuagccccgcguucuggugaccugguauacauggaagauaguccaucauucugucggccaucuaaauauucuccuggaaccgccggaagggugugcucccgcgaggccaguuguucuucccucuguugcggcaggggcuaugacacccagagucggcucguggcuuuuuccugccacugucagguacaguggugcugcuacguggagugucagcaaugcguccaagaggaguugguguacacauguaaacacuag

SEQ ID NO: 138133 - RNA, 1074 nt, Artificial Sequence
  derived and/or modified sequence
augagaccucccccugcccuggcucuggcggguuuaugccuacuggcccugcccgcagcugcugccuccuauuucggacugacaggacgcgagguauugacccccuucccuggucucgguacugccgcugcaccagcccagggcggagcgcaucugaaacagugugaccuccuuaaacucagucggcgucagaaacaacucuguaggagggagccaggacuggccgaaacccugcgggaugcagcucaccucggccuacuugagugccaauuccaguucagacaugaacgguggaacugcagucuagaagggaggaugggacuccuaaaaagaggauucaaggagacagcuuuucuguaugccguaucaucagcugcgcuaacccacacccuugcucgggcuugcagcgcuggaaggauggaacgcugcacaugcgaugacucaccaggccuagagagcagacaggcguggcaauggggggugugcggggauaaccugaaguauuccacaaaauuucugagcaauuuccuggguucaaagcgggguaacaaagacuuacgcgcccgcgccgacgcccauaauacacauguggggauuaaggccguuaagucaggacugaggacgacaugcaaaugccacggcgugucaggcagcugugcggugcgcaccuguuggaagcagcuuucgccauucagggaaacaggacagguccucaaguuacguuacgacucggccgucaaagucucaagcgcuaccaaugaggccuuaggcagacuugaacucugggccccagcucgacagggcucguuaacgaaaggcuuggccccucgcaguggcgaccuaguguacauggaggacucacccagcuucuguagaccaaguaaauacucaccaggcacugcgggucgggucuguucuagagaagccaguuguucuucucuguguuguggacguggguaugauacacaaagucggcuggucgcuuuuucaugucacugccaagugcaguggugcuguuauguggaaugucaacaauguguacaagaggaauugguguacacaugcaagcauuag

SEQ ID NO: 138134 - protein, 183 aa, Artificial Sequence
  derived and/or modified sequence
MARAHWGCCPWLVLLCACAWGHTKPVDLGGQDVRNCSTNPPYLPVTVVNTTMSLTALRQQMQTQNLSAYIIPGTDAHMNEYIGQHDERRAWITGFTGSAGTAVVTMKKAAVWTDSRYWTQAERQMDCNWELHKEVGTTPIVTWLLTEIPAGGRVGFDPFLLSIGMLFLQSLNLSMLTRVTQLP

SEQ ID NO: 138135 - protein, 674 aa, Artificial Sequence
  derived and/or modified sequence
MARAHWGCCPWLVLLCACAWGHTKPVDLGGQDVRNCSTNPPYLPVTVVNTTMSLTALRQQMQTQNLSAYIIPGTDAHMNEYIGQHDERRAWITGFTGSAGTAVVTMKKAAVWTDSRYWTQAERQMDCNWELHKEVGTTPIVTWLLTEIPAGGRVGFDPFLLSIDTWESYDLALQGSNRQLVSITTNLVDLVWGSERPPVPNQPIYALQEAFTGSTWQEKVSGVRSQMQKHQKVPTAVLLSALEETAWLFNLRASDIPYNPFFYSYTLLTDSSIRLFANKSRFSSETLSYLNSSCTGPMCVQIEDYSQVRDSIQAYSLGDVRIWIGTSYTMYGIYEMIPKEKLVTDTYSPVMMTKAVKNSKEQALLKASHVRDAVAVIRYLVWLEKNVPKGTVDEFSGAEIVDKFRGEEQFSSGPSFETISASGLNAALAHYSPTKELNRKLSSDEMYLLDSGGQYWDGTTDITRTVHWGTPSAFQKEAYTRVLIGNIDLSRLIFPAATSGRMVEAFARRALWDAGLNYGHGTGHGIGNFLCVHEWPVGFQSNNIAMAKGMFTSIEPGYYKDGEFGIRLEDVALVVEAKTKYPGSYLTFEVVSFVPYDRNLIDVSLLSPEHLQYLNRYYQTIREKVGPELQRRQLLEEFEWLQQHTEPLAARAPDTASWASVLVVSTLAILGWSV

SEQ ID NO: 138136 - DNA, 552 bp, Artificial Sequence
  derived and/or modified sequence
atggccagagcccactggggctgctgcccctggctggtgctgctgtgcgcctgcgcctggggccacaccaagcccgtggacctgggcggccaggacgtgagaaactgcagcaccaaccccccctacctgcccgtgaccgtggtgaacaccaccatgagcctgaccgccctgagacagcagatgcagacccagaacctgagcgcctacatcatccccggcaccgacgcccacatgaacgagtacatcggccagcacgacgagagaagagcctggatcaccggcttcaccggcagcgccggcaccgccgtggtgaccatgaagaaggccgccgtgtggaccgacagcagatactggacccaggccgagagacagatggactgcaactgggagctgcacaaggaggtgggcaccacccccatcgtgacctggctgctgaccgagatccccgccggcggcagagtgggcttcgaccccttcctgctgagcatcggcatgctgttcctgcagagcctgaacctgagcatgctgaccagagtgacccagctgccctag

SEQ ID NO: 138137 - DNA, 2025 bp, Artificial Sequence
  derived and/or modified sequence
atggccagagcccactggggctgctgcccctggctggtgctgctgtgcgcctgcgcctggggccacaccaagcccgtggacctgggcggccaggacgtgagaaactgcagcaccaaccccccctacctgcccgtgaccgtggtgaacaccaccatgagcctgaccgccctgagacagcagatgcagacccagaacctgagcgcctacatcatccccggcaccgacgcccacatgaacgagtacatcggccagcacgacgagagaagagcctggatcaccggcttcaccggcagcgccggcaccgccgtggtgaccatgaagaaggccgccgtgtggaccgacagcagatactggacccaggccgagagacagatggactgcaactgggagctgcacaaggaggtgggcaccacccccatcgtgacctggctgctgaccgagatccccgccggcggcagagtgggcttcgaccccttcctgctgagcatcgacacctgggagagctacgacctggccctgcagggcagcaacagacagctggtgagcatcaccaccaacctggtggacctggtgtggggcagcgagagaccccccgtgcccaaccagcccatctacgccctgcaggaggccttcaccggcagcacctggcaggagaaggtgagcggcgtgagaagccagatgcagaagcaccagaaggtgcccaccgccgtgctgctgagcgccctggaggagaccgcctggctgttcaacctgagagccagcgacatcccctacaaccccttcttctacagctacaccctgctgaccgacagcagcatcagactgttcgccaacaagagcagattcagcagcgagaccctgagctacctgaacagcagctgcaccggccccatgtgcgtgcagatcgaggactacagccaggtgagagacagcatccaggcctacagcctgggcgacgtgagaatctggatcggcaccagctacaccatgtacggcatctacgagatgatccccaaggagaagctggtgaccgacacctacagccccgtgatgatgaccaaggccgtgaagaacagcaaggagcaggccctgctgaaggccagccacgtgagagacgccgtggccgtgatcagatacctggtgtggctggagaagaacgtgcccaagggcaccgtggacgagttcagcggcgccgagatcgtggacaagttcagaggcgaggagcagttcagcagcggccccagcttcgagaccatcagcgccagcggcctgaacgccgccctggcccactacagccccaccaaggagctgaacagaaagctgagcagcgacgagatgtacctgctggacagcggcggccagtactgggacggcaccaccgacatcaccagaaccgtgcactggggcacccccagcgccttccagaaggaggcctacaccagagtgctgatcggcaacatcgacctgagcagactgatcttccccgccgccaccagcggcagaatggtggaggccttcgccagaagagccctgtgggacgccggcctgaactacggccacggcaccggccacggcatcggcaacttcctgtgcgtgcacgagtggcccgtgggcttccagagcaacaacatcgccatggccaagggcatgttcaccagcatcgagcccggctactacaaggacggcgagttcggcatcagactggaggacgtggccctggtggtggaggccaagaccaagtaccccggcagctacctgaccttcgaggtggtgagcttcgtgccctacgacagaaacctgatcgacgtgagcctgctgagccccgagcacctgcagtacctgaacagatactaccagaccatcagagagaaggtgggccccgagctgcagagaagacagctgctggaggagttcgagtggctgcagcagcacaccgagcccctggccgccagagcccccgacaccgccagctgggccagcgtgctggtggtgagcaccctggccatcctgggctggagcgtgtag

SEQ ID NO: 138138 - DNA, 552 bp, Artificial Sequence
  derived and/or modified sequence
atggccagggctcattggggctgttgtccctggctggtactgctttgtgcctgcgcctgggggcacaccaaacctgttgatcttggcgggcaggacgtcaggaactgctcaaccaatccgccctacttaccagtgaccgtcgtcaacacaactatgagcttgacggctcttcggcaacagatgcagacccaaaacctgagcgcctatatcatcccagggacagacgcgcacatgaatgagtatattgggcagcacgacgagcggcgtgcatggatcactgggttcaccgggagtgctggcaccgctgtcgtcaccatgaagaaggcagccgtctggaccgactcgaggtactggacccaagcagagcgccagatggattgcaactgggaactacacaaggaggtcggcaccactccaatagttacctggctgttgacggaaatcccggctggcggcagggtgggatttgatcctttcctcctcagcataggaatgctgtttctccaatcactgaatctgtctatgctgacacgcgtcacccagctgccatag

SEQ ID NO: 138139 - DNA, 2025 bp, Artificial Sequence
  derived and/or modified sequence
atggcacgtgcccattggggctgttgtccttggttggtccttctgtgcgcctgtgcatggggtcacaccaaacccgttgatctgggcgggcaggacgtccggaattgtagcaccaacccaccttacttgcccgtgactgtggtaaacactacaatgagcctgactgcgctgcgtcagcagatgcagacacagaatctgtcagcctacattattcccggaaccgacgcgcacatgaacgagtatatcggccaacacgacgagcggagggcctggataacaggttttacgggctctgctgggaccgccgttgtcacaatgaaaaaagcagcagtgtggacagattcccggtattggacccaggctgagcgacaaatggactgcaactgggaattgcataaggaggtgggaactacaccaatcgtgacgtggcttctgacagagatcccagccgggggaagagttggcttcgaccctttcctgctgtcgatcgacacatgggaatcatacgacctggccctccagggatcgaacaggcagctagtatcgatcaccaccaacttggtggacctggtgtggggcagcgagagacctcctgtccccaaccagcctatttatgcgctgcaggaggcattcaccggatctacatggcaggaaaaggtgagcggagtgcggtctcagatgcagaagcatcagaaggttcctacggctgtgctgctgtcagctctggaggagactgcatggctgttcaacctgcgcgccagtgatatcccctacaatccatttttctattcttatacactgctcaccgactcctctattcgtcttttcgccaacaaatccagattctccagcgaaacactttcctatctcaactcaagctgtactggccccatgtgcgtgcaaattgaggattattctcaggttcgagactcgatacaggcctacagcctaggcgatgtgcggatttggatcggaactagctacaccatgtacggtatctatgagatgatccctaaggaaaaactggtgactgatacttactcacctgtgatgatgaccaaggccgtgaagaactccaaggaacaagcgttgctgaaagctagccacgtccgagacgctgtcgctgttatacggtatctggtgtggctggagaagaacgtcccaaaaggaaccgttgacgaattttcaggagccgagattgtggataagtttcggggcgaggagcagtttagtagcggaccttcctttgagaccattagtgcctctgggctgaacgccgccctggcccattattcccccactaaagaattgaaccggaagctttcgtccgacgaaatgtaccttctagattccggaggtcaatactgggacgggaccacagatatcacaagaaccgtacattgggggaccccctctgcgtttcaaaaggaggcttatacccgagttttaatcggcaatattgatctgtcccgcctgatattccccgccgcgacatccggaaggatggttgaagcttttgctagaagggcgctttgggacgctggtttgaattacgggcacggaactggccatgggatagggaatttcctgtgcgtccatgagtggccagtcggctttcaaagcaataacatcgcaatggccaaagggatgtttacatcaatcgagcccggctattacaaagacggagagttcggtatccgccttgaagacgtagcactggtggtggaggctaaaacaaagtacccaggttcgtacctgacgttcgaggtggtgtccttcgtcccctacgacagaaatctgatcgatgtgtctctgctctctccagagcacctgcagtacctcaacagatattaccagactatccgggagaaggtgggcccagaacttcaaaggaggcagctgttggaggagttcgaatggttgcaacagcacaccgagccactggctgcccgggctcctgatactgcctcatgggcatctgtgcttgtggtcagcactcttgccatcctgggctggtctgtatag

SEQ ID NO: 138140 - DNA, 552 bp, Artificial Sequence
  derived and/or modified sequence
atggcccgggcccactggggctgctgcccctggctggtgctgctgtgtgcctgtgcctggggccacaccaagcctgtggacctgggcggccaggatgtgaggaactgcagcaccaaccccccctacctgcctgtgacagtggtgaacaccaccatgagcctgacagccctgcggcagcagatgcagacccagaacctgagcgcctacatcatccctggaacagatgcccacatgaatgagtacatcggccagcatgatgagcggcgggcctggatcaccggcttcaccggcagcgctggaacagctgtggtgaccatgaagaaggctgctgtgtggacagacagccgctactggacccaggccgagcggcagatggactgcaactgggagctgcacaaggaggtgggcaccacccccatcgtgacctggctgctgacagagatcccagctgggggccgggtgggctttgaccccttcctgctgagcatcggcatgctgttcctgcagagcctgaacctgtccatgctgaccagggtgacccagctgccctag

SEQ ID NO: 138141 - DNA, 2025 bp, Artificial Sequence
  derived and/or modified sequence
atggcccgggcccactggggctgctgcccctggctggtgctgctgtgtgcctgtgcctggggccacaccaagcctgtggacctgggcggccaggatgtgaggaactgcagcaccaaccccccctacctgcctgtgacagtggtgaacaccaccatgagcctgacagccctgcggcagcagatgcagacccagaacctgagcgcctacatcatccctggaacagatgcccacatgaatgagtacatcggccagcatgatgagcggcgggcctggatcaccggcttcaccggcagcgctggaacagctgtggtgaccatgaagaaggctgctgtgtggacagacagccgctactggacccaggccgagcggcagatggactgcaactgggagctgcacaaggaggtgggcaccacccccatcgtgacctggctgctgacagagatcccagctgggggccgggtgggctttgaccccttcctgctgagcattgacacctgggagagctatgacctggccctgcagggcagcaaccggcagctggtgtccatcaccaccaacctggtggacctggtgtggggcagcgagaggcctcctgtgcccaaccagcccatctatgccctgcaggaggccttcaccggcagcacctggcaggagaaggtgtctggagtgcgcagccagatgcagaagcaccagaaggtgcccacagctgtgctgctgagcgccctggaggagacagcctggctgttcaacctgcgggccagtgacatcccctacaaccccttcttctacagctacaccctgctgacagacagcagcatccggctgtttgccaacaagagccgcttcagcagcgagaccctgagctacctgaacagcagctgcaccggccccatgtgtgtgcagatcgaggactacagccaggtgcgggacagcatccaggcctacagcctgggagatgtgcgcatctggattggcaccagctacaccatgtatggcatctatgagatgatccccaaggagaagctggtgacagacacctacagccctgtgatgatgaccaaggctgtgaagaacagcaaggagcaggccctgctgaaggccagccacgtgagagatgctgtggccgtcatccgctacctggtgtggctggagaagaatgtgcccaagggcaccgtggatgagttcagcggggctgagatcgtggacaagttccggggggaggagcagttcagcagcggccccagctttgagaccatcagcgccagcggcctgaatgctgccctggcccactacagccccaccaaggagctgaacaggaagctgagcagtgatgagatgtacctgctggacagcggcggccagtactgggatggcaccacagacatcaccaggacagtgcactggggcacccccagcgccttccagaaggaggcctacaccagggtgctgattggcaacatcgacctgagccgcctcatcttccctgctgccaccagcggccgcatggtggaggcctttgcccggcgggccctgtgggatgctggcctgaactacggccacggcaccggccacggcatcggcaacttcctgtgtgtgcatgagtggcctgtgggcttccagagcaacaacatcgccatggccaagggcatgttcaccagcattgagcccggctactacaaggatggagaatttggcatccggctggaggatgtggccctggtggtggaggccaagaccaagtacccaggcagctacctgacctttgaggtggtgtcctttgtgccctatgacaggaacctgattgatgtgtccctgctgagccctgagcacctgcagtacctgaaccgctactaccagaccatccgggagaaggtgggccctgagctgcagaggcggcagctgctggaggagtttgagtggctgcagcagcacacagagcccctggccgcccgggccccagacacagcctcctgggcctctgtgctggtggtgtccaccctggccatcctgggctggagcgtgtag

SEQ ID NO: 138142 - DNA, 552 bp, Artificial Sequence
  derived and/or modified sequence
atggcccgggcccactggggctgctgcccctggctggtgctgctgtgtgcctgcgcctggggccatacaaagcctgtcgacctcggtggacaagatgtaagaaattgttcaacaaaccccccctatcttcccgtaacagtggttaacactacaatgagcttgacggcactacgccagcaaatgcagacacagaatctgtccgcatacataattcctggcacagatgcacacatgaatgaatatataggtcagcatgacgagcggagggcgtggatcacaggcttcacgggctcagccgggaccgccgtagttaccatgaagaaagccgccgtgtggacggactctagatactggacacaggcagagaggcagatggattgcaattgggagttgcataaagaggtggggacaacgcctatcgttacctggttgctaaccgagatccctgccggtggaagagtggggtttgaccccttcctgctcagcatcgggatgctgtttctgcagagtctgaacctgagcatgctgacaagggttactcagctcccatag

SEQ ID NO: 138143 - DNA, 2025 bp, Artificial Sequence
  derived and/or modified sequence
atggcccgggcccactggggctgctgcccctggctggtgctgctgtgtgcatgtgcgtgggggcatactaagcctgtcgacctggggggccaagatgtaaggaactgtagcaccaaccccccataccttcccgtgaccgttgtgaatacaacaatgagcctgaccgccttgagacagcaaatgcagacacagaacttatctgcttacatcattccagggactgatgcacacatgaatgaatatatcggccagcatgatgaaagacgcgcctggatcacaggctttactggttccgcagggacagccgtcgtgactatgaaaaaggcagccgtttggaccgattcacggtattggacacaagcagagcggcagatggactgcaactgggaactccacaaggaggtggggaccactcccatagttacatggctgcttaccgaaatcccagccggtggtcgcgtgggcttcgacccattcctcctgtcaattgacacgtgggaatcttacgacttggcgctccaaggttcaaaccgccaattggtctccattaccactaacctggtcgaccttgtctgggggagtgagaggccacctgttccgaaccagcctatttatgccctacaggaagcctttacaggcagtacatggcaggagaaagtctccggggtgcgttctcagatgcagaaacaccaaaaggtgcctacagctgttcttctatctgcactcgaggaaaccgcctggttattcaacctcagagctagcgacatcccatacaacccgttcttctattcttacaccctcctgactgatagctctatcaggctcttcgcaaataagtctcgcttttcctccgagactctgtcatatctgaattcctcttgcacaggccctatgtgcgtccagatcgaagactactcccaggttcgggattccattcaggcttacagtctgggtgatgttcgtatctggatcggaacgagttatactatgtacgggatctacgagatgatacccaaggagaagctggtgaccgacacctacagccccgtcatgatgacgaaggccgttaagaatagtaaagagcaggccctgctaaaagccagtcatgtaagggacgctgtggccgtaattcggtacctcgtctggctcgagaaaaatgtgccgaaaggaaccgtagacgaattttcgggggcagagattgtagataagtttcggggagaagagcagtttagctccggtccatcctttgagaccatttcagcctcaggcctgaacgctgcactggcccattatagccctactaaggaacttaataggaagctaagctccgacgagatgtacttactggactcaggcggtcagtattgggatggtaccactgacattacacgcactgtgcattgggggacaccaagcgcttttcagaaggaggcatatacccgggtgctgatcgggaatatcgacctaagcaggctcattttccccgcagccactagtggtcgaatggtggaggccttcgctaggagagccttgtgggatgccggacttaactacggccatgggacagggcacggaattggcaacttcctttgcgtgcatgaatggcccgtcggctttcaatcgaataatatcgcaatggctaagggcatgtttacatcgatagaacctggctactacaaagacggtgagtttgggatcaggttggaggacgtggctctggttgtcgaggccaaaacaaagtacccggggagctacctgactttcgaagtggtgtcattcgtgccatacgaccgaaatctgatcgatgtgagccttctgtcacccgagcatctccaatatctcaaccggtactaccagacgattagggaaaaagtcggcccagagttacagcggagacagctgctagaagagttcgagtggctgcagcagcatactgagcccctggctgcccgggccccggataccgcatcctgggccagcgtgttggtggtgtctacgctggcaatcctcggctggtcagtttag

SEQ ID NO: 138144 - DNA, 552 bp, Artificial Sequence
  derived and/or modified sequence
atggcacgtgcacattggggctgctgtccttggcttgttctcttgtgtgcctgcgcctggggtcacacgaaaccggtcgacctaggtggccaggatgtcagaaattgctctaccaacccaccttatctgccagttacagtcgtgaacacaaccatgtctctgactgcgctgagacagcaaatgcagacccaaaatctctcagcttatattattcccggtactgatgctcacatgaatgaatatattggtcagcatgatgagcgcagggcgtggattacagggttcactggaagtgccggaaccgctgtggttacaatgaagaaggccgctgtgtggaccgattccaggtactggactcaagctgagagacagatggactgcaactgggagctgcacaaggaggtaggaaccaccccaatcgttacctggctgcttactgagatccctgctggcggtagggttgggttcgatcctttcttattaagtatcggaatgttatttctacagagtttgaacctttctatgctaacaagggtgacccagctaccctag

SEQ ID NO: 138145 - DNA, 2025 bp, Artificial Sequence
  derived and/or modified sequence
atggccagggcccactgggggtgttgtccctggctggtgcttctgtgcgcttgtgcctggggccacaccaagccagtagacctcggtgggcaggacgtgcgaaactgctctaccaatcccccttacctgccggtaactgtggtgaataccacaatgtccctgacggccctgcgccagcagatgcagacacaaaatctcagcgcctatattatccctggcacagacgcacacatgaatgaatatataggtcagcacgacgaaagacgagcctggatcaccggtttcacagggtccgctggcacagcagttgtgaccatgaaaaaggctgcagtgtggaccgacagtcgctactggactcaggctgagcgccagatggactgtaactgggagcttcataaggaagtgggcaccactcctattgtcacctggttattgacagagattccggcaggcggacgggtaggattcgaccctttcctactctctatcgacacctgggaatcttatgatttagccttgcaggggtcaaatcgccaactggtgagcatcacaaccaacctggtggatctcgtttggggtagtgaacggcctccagtgcccaaccagccaatttacgctttgcaggaggcttttacgggctccacatggcaggaaaaggtctccggggttcgctcacagatgcagaaacaccagaaagtgcctaccgccgtcttactctcagccctggaggaaactgcttggctgtttaacttgcgggcaagcgacatcccctataacccctttttttacagctataccctcctgaccgacagttccatccgcctattcgcgaataaatcacgcttcagctccgagaccctttcataccttaatagctcttgtacagggccaatgtgcgtgcagatcgaggactacagccaggtccgcgattccatccaggcatactccctcggcgacgttaggatatggatcggcacatcctataccatgtatggcatctatgagatgatccccaaggagaagttagttacagatacttatagccccgtgatgatgactaaggctgttaaaaattcaaaggagcaggccctcctgaaagcaagtcacgttagggatgcggttgccgtgattcggtacctagtctggctcgaaaagaacgtgcccaagggaaccgtggatgaattctccggtgctgagattgtggataaattccggggtgaggagcagttcagtagcggtccctccttcgaaaccataagcgctagcgggttgaacgccgcactggcccactattccccgaccaaggagctgaataggaaactgtcttctgatgaaatgtatcttctggattccggcggtcaatattgggacggtaccacagacattacccgtaccgtgcattggggcacgccatcagctttccagaaggaggcctatacaagagtactgattggcaacatagacctctcccggctgatttttccggcagctacctctggcaggatggtggaagcttttgcgaggcgcgcattgtgggacgccggtcttaattacggccacggaacaggtcacggaatcgggaacttcttgtgcgtgcacgagtggcccgtcgggtttcagagcaataatatcgcaatggccaaggggatgttcacctccattgagcctggatattacaaggatggcgaattcggaattcggctggaggatgttgctctggtggtggaagccaaaaccaaatatccgggaagctacctgaccttcgaagtcgttagctttgtcccatacgataggaacttgatcgatgtctctctgttaagtcctgaacacttacaatatctgaatagatactatcagacgataagagagaaggtcggtcctgaattacagcgtcgacagctgctggaagagttcgaatggttgcagcagcacacagaacctctggctgcgcgtgccccagacactgccagttgggcctcggtcctggtggtgtcaacactggccatcctgggttggtccgtatag

SEQ ID NO: 138146 - DNA, 912 bp, Artificial Sequence
  derived and/or modified sequence
cttgcacagtccgcctcgggcagcccaaagctcctctgcccaccctggctcccagagccctccaaaacaaaagaccagagaagcactctccacccagcagccagacgcctccttcttgacgccagcccccaccctctgtctgctcgagcccaggaaaggcctgaaggaagaggccggggaaagagccctccctctctcccttgtccctccatccacccagcgccggcatctggagaccctatggcccgggctcactggggctgctgcccctggctggtcctcctctgtgcttgtgcctggggccacacaaagccagtggaccttggagggcaggatgtgagaaactgttccaccaaccccccttaccttccagttactgtggtcaataccacaatgtcactcacagccctccgccagcagatgcagacccagaatctctcagcctacatcatcccaggcacagatgctcacatgaacgagtacatcggccaacatgacgagaggcgtgcgtggattacaggctttacagggtctgcaggaactgcagtggtgactatgaagaaagcagctgtctggaccgacagtcgctactggactcaggctgagcggcagatggactgcaactgggagctccataaggaagttggcaccactcctattgtcacctggctcctcaccgagattcctgctggagggcgtgtgggttttgaccccttcctcttgtccattggtatgctcttccttcagtccctgaatttgtccatgctaacgagggtgactcagcttccctaggatataaagaaatggaccttggtagaaggaggggcggtgggactataaagatagagcatttgaaattgtagttgcagaatgttttgcaatgaggatgtattcatggattgtgtaattaaa

SEQ ID NO: 138147 - DNA, 3270 bp, Artificial Sequence
  derived and/or modified sequence
ctcccagagccctccaaaacaaaagaccagagaagcactctccacccagcagccagacgcctccttcttgacgccagcccccaccctctgtctgctcgagcccaggaaaggcctgaaggaagaggccggggaaagagccctccctctctcccttgtccctccatccacccagcgccggcatctggagaccctatggcccgggctcactggggctgctgcccctggctggtcctcctctgtgcttgtgcctggggccacacaaagccagtggaccttggagggcaggatgtgagaaactgttccaccaaccccccttaccttccagttactgtggtcaataccacaatgtcactcacagccctccgccagcagatgcagacccagaatctctcagcctacatcatcccaggcacagatgctcacatgaacgagtacatcggccaacatgacgagaggcgtgcgtggattacaggctttacagggtctgcaggaactgcagtggtgactatgaagaaagcagctgtctggaccgacagtcgctactggactcaggctgagcggcagatggactgcaactgggagctccataaggaagttggcaccactcctattgtcacctggctcctcaccgagattcctgctggagggcgtgtgggttttgaccccttcctcttgtccattgacacctgggagagttatgatctggccctccaaggctctaacagacagctggtgtccatcacaaccaatcttgtggacctggtatggggatcagagaggccaccggttccaaatcaacccatttatgccctgcaggaggcattcacagggagcacttggcaggagaaagtatctggcgtccgaagccagatgcagaagcatcaaaaggtcccgactgccgtccttctgtcggcgcttgaggagacggcctggctcttcaaccttcgagccagtgacatcccctataaccccttcttctattcctacacgctgctcacagactcttctattaggttgtttgcaaacaagagtcgctttagctccgaaaccttgagctatctgaactccagttgcacaggccccatgtgtgtgcaaatcgaggattacagccaagttcgtgacagcatccaggcctactcattgggagatgtgaggatctggattgggaccagctataccatgtatgggatctatgaaatgatacccaaggagaaactcgtgacagacacctactccccagtgatgatgaccaaggcagtgaagaacagcaaggagcaggccctcctcaaggccagccacgtgcgggacgctgtggctgtgatccggtacttggtctggctggagaagaacgtgcccaaaggcacagtggatgagttctcgggggcagagatcgtggacaagttccgaggagaagaacagttctcctccggacccagttttgaaaccatctctgctagtggtctgaatgctgccctggcccactacagcccgaccaaggagctgaaccgcaagctgtcctcagatgagatgtacctgctggactctggggggcagtactgggacgggaccacagacatcaccagaacagtccactggggcaccccctctgccttccagaaggaggcatacacccgtgtgctgataggaaatattgacctgtccaggctcatctttcccgctgctacatcagggcgaatggtggaggcctttgcccgcagagccttgtgggatgctggtctcaattatggtcatgggacaggccacggcattggcaacttcctgtgtgtgcatgagtggccagtgggattccagtccaacaacatcgctatggccaagggcatgttcacttccattgaacctggttactataaggatggagaatttgggatccgtctcgaagatgtggctctcgtggtagaagcaaagaccaagtacccagggagctacctgacctttgaagtggtatcatttgtgccctatgaccggaacctcatcgatgtcagcctgctgtctcccgagcatctccagtacctgaatcgctactaccagaccatccgggagaaggtgggtccagagctgcagaggcgccagctactagaggagttcgagtggcttcaacagcacacagagcccctggccgccagggccccagacaccgcctcctgggcctctgtgttagtggtctccacccttgccatccttggctggagtgtctagaggctccagactctcctgttaaccctccatctagatggggggctcccttgcttagctcccctcaccctgcactgaacataccccaagagcccctgctggcccattgcctagaaacctttgcattcatcctccttctccaagacctatggagaaggtcccaggccccaggaacacagggcttcttggccccagatggcacctccctgcaccccggggttgtataccacaccctgggcccctaatcccaggccccgagataggaaagccagctagtctcttctcttctgtgatctcagtaggcctaacctataacctagcacagactgctacagctgctcccctcccgccaaacaaaaccccaagagagcaatgcccctaccacccaagggtgccatggtcccgggagagcccaaacctatcaccacctgttgggcatagccagagctgttcccacccagccagggcatgaaacatcaaccccccacatgtgaacccatcattcctaaaccctgggtaggctccatgccaagtaacagcagagggagttaagccataggaatttggctgtggagtaagagggaatgcggtgaggcactctggaatatgaccctaccagaggttggagaacaaacttgggcagccggaacccgtcactattctagacttccctggcattcgaggagccctttgaactttccaaagtgcagccacagctacaatgctgttaaatcctcccacattcttggatgccccttcaccttgtgtggacagtgtctggtttctccattttacagacaggaaaactgagcttcagacagggggtgggctttgcctaaggacacacaaatttggttgggagttgatggggccagatgagccagcattccagctctttcacccttcagcaacatgcagagtccctgagcccacctcccagccctctcctcattctctgaacccactgtggtgagaagaatttgctccggccaaattggccgttagccacctgggtccacatcctgctaagacgtttaaaacagcctaacaaagaca

SEQ ID NO: 138148 - protein, 414 aa, Artificial Sequence
  derived and/or modified sequence
MASGDTLYIATDGSEMPAEIVELHEIEVETIPVETIETTVVGEEEEEDDDDEDGGGGDHGGGGGHGHAGHHHHHHHHHHHPPMIALQPLVTDDPTQVHHHQEVILVQTREEVVGGDDSDGLRAEDGFEDQILIPVPAPAGGDDDYIEQTLVTVAAAGKSGGGGSSSSGGGRVKKGGGKKSGKKSYLSGGAGAAGGGGADPGNKKWEQKQVQIKTLEGEFSVTMWSSDEKKDIDHETVVEEQIIGENSPPDYSEYMTGKKLPPGGIPGIDLSDPKQLAEFARMKPRKIKEDDAPRTIACPHKGCTKMFRDNSAMRKHLHTHGPRVHVCAECGKAFVESSKLKRHQLVHTGEKPFQCTFEGCGKRFSLDFNLRTHVRIHTGDRPYVCPFDGCNKKFAQSTNLKSHILTHAKAKNNQ

SEQ ID NO: 138149 - protein, 34 aa, Artificial Sequence
  derived and/or modified sequence
MASGDTLYIATDGSEMPAEIVELHEIEVETIPVE

SEQ ID NO: 138150 - DNA, 2592 bp, Artificial Sequence
  derived and/or modified sequence
agggcgaacgggcgagtggcagcgaggcggggcgggctgaggccagcgcggaagtctcgcgaggccgggcccgagcagagtgtggcggcggcggcgagatctgggctcgggttgaggagttggtatttgtgtggaaggaggcggaggcgcaggaggaagggggaagcggagcgccggcccggagggcgggaggaggcgcggccagggcgggcggttgcggcgaggcgaggcgaggcggggagccgagacgagcagcggccgagcgagcgcgggcgcgggcgcaccgaggcgagggaggcggggaagccccgccgccgccgcggcgcccgccccttcccccgccgcccgccccctctccccccgcccgctcgccgccttcctccctctgccttccttccccacggccggccgcctcctcgcccgcccgcccgcagccgaggagccgaggccgccgcggccgtggcggcggagccctcagccatggcctcgggcgacaccctctacatcgccacggacggctcggagatgccggccgagatcgtggagctgcacgagatcgaggtggagaccatcccggtggagaccatcgagaccacagtggtgggcgaggaggaggaggaggacgacgacgacgaggacggcggcggtggcgaccacggcggcgggggcggccacgggcacgccggccaccaccaccaccaccatcaccaccaccaccacccgcccatgatcgctctgcagccgctggtcaccgacgacccgacccaggtgcaccaccaccaggaggtgatcctggtgcagacgcgcgaggaggtggtgggcggcgacgactcggacgggctgcgcgccgaggacggcttcgaggatcagattctcatcccggtgcccgcgccggccggcggcgacgacgactacattgaacaaacgctggtcaccgtggcggcggccggcaagagcggcggcggcggctcgtcgtcgtcgggaggcggccgcgtcaagaagggcggcggcaagaagagcggcaagaagagttacctcagcggcggggccggcgcggcgggcggcggcggcgccgacccgggcaacaagaagtgggagcagaagcaggtgcagatcaagaccctggagggcgagttctcggtcaccatgtggtcctcagatgaaaaaaaagatattgaccatgagacagtggttgaagaacagatcattggagagaactcacctcctgattattcagaatatatgacaggaaagaaacttcctcctggaggaatacctggcattgacctctcagatcccaaacaactggcagaatttgctagaatgaagccaagaaaaattaaagaagatgatgctccaagaacaatagcttgccctcataaaggctgcacaaagatgttcagggataactcggccatgagaaaacatctgcacacccacggtcccagagtccacgtctgtgcagaatgtggcaaagcttttgttgagagttcaaaactaaaacgacaccaactggttcatactggagagaagccctttcagtgcacgttcgaaggctgtgggaaacgcttttcactggacttcaatttgcgcacacatgtgcgaatccataccggagacaggccctatgtgtgccccttcgatggttgtaataagaagtttgctcagtcaactaacctgaaatctcacatcttaacacatgctaaggccaaaaacaaccagtgaaaagaagagagaagacccttctcgaccacgggaagcatcttccagaagtgtgattgggaataaatatgcctctcctttgtatattatttctaggaagaattttaaaaatgaatcctacacacctaagggacatgttttgataaagtagtaaaaattaaaaaaaaaaaactttactaagatgacattgctaagatgctctatcttgctctgtaatctcgtttcaaaaacacagtgtttttgtaaagtgtggtcccaacaggaggacaattcatgaacttcgcatcaaaagacaattctttatacaacagtgctaaaaatgggacttcttttcacattcttataaatatgaagctcacctgttgcttacaatttttttaattttgtattttccaagtgtgcatattgtacacttttttggggatatgcttagtaatgctacgtgtgatttttctggaggttgataactttgcttgcagtagattttctttaaaagaatgggcagttacatgcatacttcaaaagtattttcctgtaaaaaaaaaaaagttatataggttttgtttgctatcttaattttggttgtattctttgatgttaacacattttgtataattgtatcgtatagctgtattgaatcatgtagtatcaaatattagatgtgatttaatagtgttaatcaatttaaacccattttagtcactttttttttccaaaaaaatactgccagatgctgatgttcagtgtaatttctttgcctgttcagttacagaaagtggtgctcagttgtagaatgtattgtaccttttaacacctgatgtgtacatcccatgtaacagaaagggcaacaataaaatagcaatcctaaag

SEQ ID NO: 138151 - DNA, 1245 bp, Artificial Sequence
  derived and/or modified sequence
atggccagcggcgacaccctgtacatcgccaccgacggcagcgagatgcccgccgagatcgtggagctgcacgagatcgaggtggagaccatccccgtggagaccatcgagaccaccgtggtgggcgaggaggaggaggaggacgacgacgacgaggacggcggcggcggcgaccacggcggcggcggcggccacggccacgccggccaccaccaccaccaccaccaccaccaccaccacccccccatgatcgccctgcagcccctggtgaccgacgaccccacccaggtgcaccaccaccaggaggtgatcctggtgcagaccagagaggaggtggtgggcggcgacgacagcgacggcctgagagccgaggacggcttcgaggaccagatcctgatccccgtgcccgcccccgccggcggcgacgacgactacatcgagcagaccctggtgaccgtggccgccgccggcaagagcggcggcggcggcagcagcagcagcggcggcggcagagtgaagaagggcggcggcaagaagagcggcaagaagagctacctgagcggcggcgccggcgccgccggcggcggcggcgccgaccccggcaacaagaagtgggagcagaagcaggtgcagatcaagaccctggagggcgagttcagcgtgaccatgtggagcagcgacgagaagaaggacatcgaccacgagaccgtggtggaggagcagatcatcggcgagaacagcccccccgactacagcgagtacatgaccggcaagaagctgccccccggcggcatccccggcatcgacctgagcgaccccaagcagctggccgagttcgccagaatgaagcccagaaagatcaaggaggacgacgcccccagaaccatcgcctgcccccacaagggctgcaccaagatgttcagagacaacagcgccatgagaaagcacctgcacacccacggccccagagtgcacgtgtgcgccgagtgcggcaaggccttcgtggagagcagcaagctgaagagacaccagctggtgcacaccggcgagaagcccttccagtgcaccttcgagggctgcggcaagagattcagcctggacttcaacctgagaacccacgtgagaatccacaccggcgacagaccctacgtgtgccccttcgacggctgcaacaagaagttcgcccagagcaccaacctgaagagccacatcctgacccacgccaaggccaagaacaaccagtag

SEQ ID NO: 138152 - DNA, 105 bp, Artificial Sequence
  derived and/or modified sequence
atggccagcggcgacaccctgtacatcgccaccgacggcagcgagatgcccgccgagatcgtggagctgcacgagatcgaggtggagaccatccccgtggagtag

SEQ ID NO: 138153 - DNA, 1245 bp, Artificial Sequence
  derived and/or modified sequence
atggcgtctggagataccctgtatatcgccaccgatggctcagagatgccggctgaaattgtagagctgcacgagatcgaggtggaaacaattcccgttgagactatagagactaccgtcgtgggcgaggaggaggaagaggacgacgacgacgaggacggcggcggcggagaccatggcgggggcggggggcacggacatgccgggcaccatcatcatcaccaccaccatcaccatcatccacctatgatcgctctgcagcccctggtgacagacgatcccactcaggtccaccatcaccaggaggtgatcctcgtgcagacccgggaggaagtagtgggaggggatgattccgacggcctcagagccgaagatgggttcgaagaccagatccttatcccggtccccgccccggcaggaggcgacgacgattatatagaacagacattggtcacagtagcggccgctgggaaaagcggcggaggtggaagtagctcctctggcggcggcagggtaaagaagggcggcggcaagaagagcggaaagaagtcatacctgtcaggcggcgcaggtgcagcgggaggaggcggagccgaccctggaaataaaaaatgggaacagaagcaggtgcagataaaaactttggagggggaattctccgttaccatgtggtcttccgatgagaagaaagatattgatcatgagaccgtcgtagaagaacaaatcatcggcgagaactcacctcccgattattcagaatacatgacaggtaagaaactcccgcctggaggtattcccggtattgatttgtctgaccccaagcagttggcagaattcgctcggatgaaaccgagaaaaatcaaagaggacgacgcccccagaacaatagcttgtcctcacaaaggctgtaccaaaatgttccgagacaattccgccatgaggaagcacctgcacacccatggtccacgcgttcacgtttgtgctgaatgcggtaaagcatttgtggagtccagtaaacttaagcgccaccagctcgtacataccggtgaaaagccattccagtgcacattcgaggggtgtggcaagcggttcagcctggatttcaacttgagaactcatgtgcggatccatacaggagacagaccttatgtatgccccttcgacggctgcaataagaagtttgcccagtccacgaacctgaaaagtcacattctaacacatgccaaggcgaaaaataaccagtag

SEQ ID NO: 138154 - DNA, 105 bp, Artificial Sequence
  derived and/or modified sequence
atggctagtggcgatactttatatatagcaactgatggttctgaaatgcctgccgaaatcgtggaacttcacgaaatcgaggtcgaaactatccctgtcgagtag

SEQ ID NO: 138155 - DNA, 1245 bp, Artificial Sequence
  derived and/or modified sequence
atggccagcggggacaccctgtacatcgccacagatggcagcgagatgcctgctgagatcgtggagctgcacgagattgaggtggagaccatccctgtggagaccatcgagaccaccgtggtgggggaggaggaggaggaggatgatgatgatgaagatggcggcggcggggaccatggaggcggcggcggccacggccacgccggccaccaccaccaccaccaccaccaccaccaccacccccccatgattgccctgcagcccctggtgacagatgaccccacccaggtgcaccaccaccaggaggtgatcctggtgcagacccgggaggaggtggtgggcggagatgacagtgatggcctgcgggcagaagatggctttgaggaccagatcctgatccctgtgcctgccccagctggaggagatgatgactacatcgagcagaccctggtgacagtggccgccgccggcaagagcggcggcggcggcagcagcagcagcggcggcggccgggtgaagaagggcggcggcaagaagagcggcaagaagagctacctgtctggaggagctggagctgctgggggcggcggcgctgaccccggcaacaagaagtgggagcagaagcaggtgcagatcaagaccctggagggggagttctctgtgaccatgtggagcagtgatgagaagaaggacatcgaccacgagaccgtggtggaggagcagatcattggagagaacagccccccagactacagcgagtacatgaccgggaagaagctgcccccaggcggcatccctggcatcgacctgagtgaccccaagcagctggccgagtttgccaggatgaagcccaggaagatcaaggaggatgatgcccccaggaccatcgcctgcccccacaagggctgcaccaagatgttccgggacaacagcgccatgaggaagcacctgcacacccacggcccccgggtgcacgtgtgtgctgaatgtgggaaggcctttgtggagagcagcaagctgaagaggcaccagctggtgcacactggagagaagcccttccagtgcacctttgagggctgtgggaagcgcttcagcctggacttcaacctgcggacccacgtgcgcatccacactggagaccggccctacgtgtgcccctttgatggctgcaacaagaagtttgcccagagcaccaacctgaagagccacatcctgacccacgccaaggccaagaacaaccagtag

SEQ ID NO: 138156 - DNA, 105 bp, Artificial Sequence
  derived and/or modified sequence
atggccagcggggacaccctgtacatcgccacagatggcagcgagatgcctgctgagatcgtggagctgcacgagattgaggtggagaccatccctgtggagtag

SEQ ID NO: 138157 - DNA, 1245 bp, Artificial Sequence
  derived and/or modified sequence
atggccagcggcgacaccctgtacatcgccaccgacggcagcgagatgccagctgagatcgtggagttacacgagatcgaagtggagaccatccctgtggagaccatcgagacgaccgtggtcggtgaagaagaggaagaagacgatgacgatgaagacggcgggggaggtgatcatggcgggggaggcggccatggtcacgctggccaccatcatcatcaccatcaccatcaccatcaccctcccatgattgctttgcagcccctcgtcaccgatgacccaacccaggttcaccatcaccaggaggttatcttggtgcaaacacgggaagaggttgtgggaggcgacgattcagacggcttgcgagccgaggatgggtttgaagatcagattctgatacccgtgcccgcacccgctggcggtgatgatgattacatcgagcagactttggtaacagtggccgcggccggcaaatccggaggaggcggaagctcctcaagcggcggcggtagagttaagaagggaggcggaaaaaagtccggaaagaagtcctacctctcgggcggggcaggcgccgctggtgggggcggcgctgacccaggaaacaagaagtgggaacaaaaacaagttcagattaagacacttgaaggcgagttttcagtgactatgtggtcctctgacgaaaaaaaagacatcgatcatgaaacagttgttgaagaacagattatcggggaaaacagcccccctgactacagcgagtatatgacgggaaagaaacttcctccgggcggcatcccggggatcgatcttagtgatcctaaacaactcgctgagttcgcccggatgaagccgagaaaaattaaagaggatgatgccccacggaccatcgcatgtcctcacaaaggctgtacgaagatgtttagggacaacagtgccatgcggaagcatctccatacacacggacccagagtccacgtgtgcgccgagtgcggaaaggcttttgtcgaatcctccaaactaaaaagacaccagctggttcatactggcgagaagcctttccagtgcactttcgaggggtgtggaaagaggtttagcctggatttcaatcttcggacccacgtcaggatccatactggtgataggccatacgtttgccccttcgatggctgcaacaagaaatttgcgcagtctaccaacttgaagagtcatattctgactcacgcgaaagctaagaataaccagtag

SEQ ID NO: 138158 - DNA, 105 bp, Artificial Sequence
  derived and/or modified sequence
atggccagcggcgacaccctgtacatcgccaccgacggcagcgagatgcctgcagagattgtcgaactgcacgagatagaggtggagacgatcccagtcgagtag

SEQ ID NO: 138159 - DNA, 1245 bp, Artificial Sequence
  derived and/or modified sequence
atggcaagtggcgatacgttgtatattgcaaccgatggatcagagatgcctgcggaaatcgtcgagctacacgagatagaggtggagacaatccctgtggagaccatcgagacaacagtggtgggcgaggaagaggaagaagatgacgacgatgaggacggtggcggaggggatcacgggggtggaggtggacacgggcacgctggccatcaccatcaccatcatcaccatcaccatcacccccctatgatcgccctgcaacctctagtgacggatgatcccactcaagtgcaccaccatcaagaagtcatactggtgcaaacacgcgaagaggtagtcggtggggacgactcagatgggttacgggctgaagatgggtttgaggatcaaattctgatacctgttcctgcccctgccggtggggatgacgattacatcgagcagactctggtcactgtggctgccgctgggaaatctggcggtggcggaagctcaagctccggagggggacgagtaaagaaaggcggaggcaagaaaagtggcaagaagagctacttgtctggcggtgctggtgcggcagggggaggcggagctgatcccggtaacaagaagtgggagcagaaacaggtgcaaatcaagaccttggagggagagttctcagtgacgatgtggtcgtccgatgaaaaaaaagatattgatcatgaaaccgtggttgaggagcagatcatcggagagaattctcctcctgattatagcgagtatatgactggcaaaaagctgcctcctggcggaattcctggcatcgatctctcggatccaaaacagctggccgaatttgcacggatgaaacccaggaaaattaaagaggatgacgctcctagaacaatcgcatgcccacacaaaggttgcaccaagatgttccgggacaacagcgccatgcggaaacatctacacacccacggcccacgggtgcatgtctgcgcagagtgtggcaaggcattcgtagagtctagcaagcttaagcgccatcaattagttcatactggggagaagccctttcaatgtacctttgagggatgcggaaaaaggttttccctcgactttaacctaagaacccacgttcgtattcacaccggagacaggccctacgtatgtccttttgacggttgcaataaaaagttcgcacagtccacaaacctgaaaagtcatatcctgacccatgctaaagcaaaaaataatcagtag

SEQ ID NO: 138160 - DNA, 105 bp, Artificial Sequence
  derived and/or modified sequence
atggctagcggcgataccctgtacatcgcaacagacgggtccgagatgcccgctgaaatcgtggagcttcacgagatagaggtggaaaccatccctgtggaatag

SEQ ID NO: 138161 - DNA, 6697 bp, Artificial Sequence
  derived and/or modified sequence
cgaggcgaggcgaggcggggagccgagacgagcagcggccgagcgagcgcgggcgcgggcgcaccgaggcgagggaggcggggaagccccgccgccgccgcggcgcccgccccttcccccgccgcccgccccctctccccccgcccgctcgccgccttcctccctctgccttccttccccacggccggccgcctcctcgcccgcccgcccgcagccgaggagccgaggccgccgcggccgtggcggcggagccctcagccatggcctcgggcgacaccctctacatcgccacggacggctcggagatgccggccgagatcgtggagctgcacgagatcgaggtggagaccatcccggtggagaccatcgagaccacagtggtgggcgaggaggaggaggaggacgacgacgacgaggacggcggcggtggcgaccacggcggcgggggcggccacgggcacgccggccaccaccaccaccaccatcaccaccaccaccacccgcccatgatcgctctgcagccgctggtcaccgacgacccgacccaggtgcaccaccaccaggaggtgatcctggtgcagacgcgcgaggaggtggtgggcggcgacgactcggacgggctgcgcgccgaggacggcttcgaggatcagattctcatcccggtgcccgcgccggccggcggcgacgacgactacattgaacaaacgctggtcaccgtggcggcggccggcaagagcggcggcggcggctcgtcgtcgtcgggaggcggccgcgtcaagaagggcggcggcaagaagagcggcaagaagagttacctcagcggcggggccggcgcggcgggcggcggcggcgccgacccgggcaacaagaagtgggagcagaagcaggtgcagatcaagaccctggagggcgagttctcggtcaccatgtggtcctcagatgaaaaaaaagatattgaccatgagacagtggttgaagaacagatcattggagagaactcacctcctgattattcagaatatatgacaggaaagaaacttcctcctggaggaatacctggcattgacctctcagatcccaaacaactggcagaatttgctagaatgaagccaagaaaaattaaagaagatgatgctccaagaacaatagcttgccctcataaaggctgcacaaagatgttcagggataactcggccatgagaaaacatctgcacacccacggtcccagagtccacgtctgtgcagaatgtggcaaagcttttgttgagagttcaaaactaaaacgacaccaactggttcatactggagagaagccctttcagtgcacgttcgaaggctgtgggaaacgcttttcactggacttcaatttgcgcacacatgtgcgaatccataccggagacaggccctatgtgtgccccttcgatggttgtaataagaagtttgctcagtcaactaacctgaaatctcacatcttaacacatgctaaggccaaaaacaaccagtgaaaagaagagagaagacccttctcgaccacgggaagcatcttccagaagtgtgattgggaataaatatgcctctcctttgtatattatttctaggaagaattttaaaaatgaatcctacacacctaagggacatgttttgataaagtagtaaaaattaaaaaaaaaaaactttactaagatgacattgctaagatgctctatcttgctctgtaatctcgtttcaaaaacacagtgtttttgtaaagtgtggtcccaacaggaggacaattcatgaacttcgcatcaaaagacaattctttatacaacagtgctaaaaatgggacttcttttcacattcttataaatatgaagctcacctgttgcttacaatttttttaattttgtattttccaagtgtgcatattgtacacttttttggggatatgcttagtaatgctacgtgtgatttttctggaggttgataactttgcttgcagtagattttctttaaaagaatgggcagttacatgcatacttcaaaagtattttcctgtaaaaaaaaaaaagttatataggttttgtttgctatcttaattttggttgtattctttgatgttaacacattttgtataattgtatcgtatagctgtattgaatcatgtagtatcaaatattagatgtgatttaatagtgttaatcaatttaaacccattttagtcactttttttttccaaaaaaatactgccagatgctgatgttcagtgtaatttctttgcctgttcagttacagaaagtggtgctcagttgtagaatgtattgtaccttttaacacctgatgtgtacatcccatgtaacagaaagggcaacaataaaatagcaatcctaaagcaagaatatggcagaacaagatctgtaagcacagtcttattttcttttgttgtccagaatacttataattcttgagcctcccagaaattggaagctaaataaagcaactcaagtttcctttattttgcactcaattacagtgattattgatgaaagcgatgcatggatattttaatacttcctacatgtcctgacttctgaaagagagtaggtaacaggcatcccgagttcaggaactacctcagaacaccccaggccaggttggtcataggctgtgattttagcccccggcaagtgtgagtgaagcatctgtaccaccgcgcaggctgagcgcctgcgcagggtaaggtgccacctggcagtggggcacacagagggaagaccaggcctgtccatcagccggctgccttcagaggcagctccagcaggaccttggcttgtctgacaggaaatgcttgtggtcgttggttatttggtttgagagcccttgttcctccatctagtggagtccttattaaatgctagcaatgtggcaattgagtgccagtagcttaatttcatgtttctaaatggacactgggtgcaaatcggcaaggtgattagattattagaaaattctgctcaatgagtacctctcacattgtaacctcttaaatgtacgattataatgttggatcttaggtcaaataacagacttgagaatactttataaactgccatgatacagcaaaatctcatttattcaaagtgcaaacatactgtgtgtctttctgttttgtgtatgcttgactgcaagataaatgacaaactagctaatatccgagatttatttacaaatggccagggaccccatcaggtgaaacacatagcccattgtcttagagcttctccatcggtcctgtacaggaggattggtgacctactaacagtgaccctgtggctctgtggaattttgaagtgccttttgtgaatcatgaatgaaacatttaacttgagaccctttaaaaaattcatccagaatctgttaccccttgggtagtttgatggaactgagttaagcagaagaccccagctgttttctgggtaagccaggctttgctgtatctggcagtcaggagagaggtcagcccatggtggaggtcttcagtgccgagggctcggatgagaacgtgtagttctttgacttggacctgggcagcgtcttctatggatgcctgccttgtgagcacccacaccttccctccccactgtcgggttgagtagccccagcgtggctgtgttaggagtcctttgcccaacattgtgctgcactggagcctggccctggcactgtcctcaggaccctgcccaagggcccaccgcagagcacacctatgctatggggagccctgctggcagccccgagagccatgccatggcctgcaggagccaggctcctgtgtggatgaagtccctcttcctctgtgccttgatcccttgggggtgcctttggtcatctcttctgtcctttcctgtctctgaaatagtcatcactccccttgactctctctgttcacgtcttctcagtctgcagagttaacttctgtaaggagtttaatctggggttccaagaaaacaagttccttgttaacatagcactgactttgcaacaatagaaaactaacaaatgagcaacaatataaagagtagaggtagttctcattgggtgtaacttcaacccattctgcttgtggttagaatttataattttgctaacgatgtaatttactaaggtttgaaatggtattctaacagtgagtccattgtcttgaggattaatctgatttataagtaatactgatagacatattttcgtacatctgagcagaaataaatgcatgtttctagcatatgtaatataaaaactccagaggataagtttacacttaacaagatgttgttttctatttttgaatttcttattatttccccctttttggtagtggagttgagagggggagcatactatttgtataaagaactgtcaccccagagtgacatttattttccaagatgaccctgaactcatgctgttggtttcatatggtgtttgtgtgctttgcctagattcaaggcctgaggatttgaggaaaatcgggattttttttttcctatttggttttcatgtaaaagttctaaatgtcacttattttgctaaataagaccctttcacaggatagtgtgcgcaatacctgtccgtgtttccaagcagagttcaagttcatgtcttcacaagtagatgagagtcacttccagtcgggggaagcccgcctgagcagtgttttgagagtgcgtacattggaggactgccccacgtccgtttgcactctgccttgcaaaacttactgtggagacgtgtcccagactggtctcagaccagagtttgtggcacaggaaaacctggccccctaaaaagaagttttggaattggaagcctgataatttcgggaggctgaggcaggagaacggcgtgaacccgggaggcggagcttgcagtgagccgagatcgcaccactgcactccagcctgggtgacagagcaagactccgtctcccaaaaaaaaaaaaaaaaaaaaaaaaaaggaaacctgacaattctacccacctccccccacccccgactataggcaaagagagttgatcacttccagggtctctgacttctgtgacctggaaatcagcctggcttgggaaattcatgttgttgatctttaattatttaattattctttaataatccttctattttcttgacatctgacccccagcaagagtaaggatcccagaggtcaaaacagtggtgagagccaagctgctcacagacacccacttgatgccacagccatgccatgaggcttcctcccagctgctctgctggcttgctgaagccagctctgagtcacagggttgccttggaccctcggctgtagggggcacctgtctggctccgggccctttgtcctggatacactgacagtaatgtgagcgcagcacttcagagttcaggcccagcaggtcctggcaagtgcattccacccgaacttttaacccaagcggtggggaaggaagccaaaactccaagctgcactttcttggggttctggccatgcacttcttagccttctctctgactttacaggacaaaaggtaccccacgccttcagaatcatgcttacctgcacggcagcatctgactggatggctggctaggtctcatccaccccaaattactgacccttgatttatgttgttactgctcaggttatgctcagatgccctggttgcctgaagatggtttaagtgcaggcccttcagacaagtcacgtcaggcaagagagggctggcctctgacccacaagagggcagatttgtggccaagaggcttcctggcatccacccccaggcccaagggatcagtgtggtgccagagaggatctttaagctgggactgtactgaggcttgatgggaagtatgggcagcatgtacttgacacgttatcacccagtccccttgtaaaatctggaatggagcgtttaagctgagcgttagcatcaggtcagcaggcaaagcaaacctcccacaaactgggtgccgtaaggtgggaggtgacacatggagagcttcgtcctggccgagcaggcacccagccccatgtcccccgccagcattctggatgtcagaggagggtgcgtgtgatggcgtcacattcatctgaagcacactgattgattttccacaaggtggcaagtttgatcaaattgaccgcttttcatgagacacccagatgctgtaaaaaaaaaaaacagcactgggatgtgttgaggagggggcagtttgctgtgctctgttctgtctgctgctctctctgggggccgcacaatgtccgcacacatcacggaggggagaaaggcatcagtaccaaacggaacaacctcttttttctacattgtccatacccggacatgtgaggctctattatcaacaggtggtgagaaaaattatgtttttattcgctttctggtaacttctgtaggccctggctcaaggacttagcatttcgtctcatgtacatctttttcttaagtgttctttgccatttctggaattgtccttggtttttccttagctcataggtcatagatgcagaaatatagtatttaaggcatccgcatccagcatcagatggctttgcatccagaaaaacattgataactcagtttgaagcaccaagcatgtgtaatatggctctatacaatataataaatgcataatgttaagctttttaa

SEQ ID NO: 138162 - DNA, 636 bp, Artificial Sequence
  derived and/or modified sequence
ttctcgtcaaagcagactttattggggcgacagggccgccccgcacgcgccagccgctccccgcgcggcccccgggccgcccacccgcctcaaccccgctcccggccggcccctccctcccttctcctcaggctcccgcccccgtggtgcccggggccgcgcggaccgctcaccggctcccaaggcagcggctgtagcggcgacgccccgttcccgagtgcggccccggcccgaggcggcgggttttgtggctgttgcaccgcgaagggcggcagccgcgcgacaccgggaagcgggaggcggtggcggcggcggcggcgcgctgacgtcacgcgccgcgggccagccagggcgcgtgcgagccgccccgcccccggtcccatcggccccaatccgggaggagcccggcgagtgggcggggccgcggaggccagcggacagatcgattggccgagaggagaatcgagagggcgaacgggcgagtggcagcgaggagccgaggccgccgcggccgtggcggcggagccctcagccatggcctcgggcgacaccctctacatcgccacggacggctcggagatgccggccgagatcgtggagctgcacgagatcgaggtggagaccatcccggtggag

SEQ ID NO: 138163 - protein, 246 aa, Artificial Sequence
  derived and/or modified sequence
MGDREQLLQRARLAEQAERYDDMASAMKAVTELNEPLSNEDRNLLSVAYKNVVGARRSSWRVISSIEQKTMADGNEKKLEKVKAYREKIEKELETVCNDVLSLLDKFLIKNCNDFQYESKVFYLKMKGDYYRYLAEVASGEKKNSVVEASEAAYKEAFEISKEQMQPTHPIRLGLALNFSVFYYEIQNAPEQACLLAKQAFDDAIAELDTLNEDSYKDSTLIMQLLRDNLTLWTSDQQDEEAGEGN

SEQ ID NO: 138164 - DNA, 741 bp, Artificial Sequence
  derived and/or modified sequence
atgggcgacagagagcagctgctgcagagagccagactggccgagcaggccgagagatacgacgacatggccagcgccatgaaggccgtgaccgagctgaacgagcccctgagcaacgaggacagaaacctgctgagcgtggcctacaagaacgtggtgggcgccagaagaagcagctggagagtgatcagcagcatcgagcagaagaccatggccgacggcaacgagaagaagctggagaaggtgaaggcctacagagagaagatcgagaaggagctggagaccgtgtgcaacgacgtgctgagcctgctggacaagttcctgatcaagaactgcaacgacttccagtacgagagcaaggtgttctacctgaagatgaagggcgactactacagatacctggccgaggtggccagcggcgagaagaagaacagcgtggtggaggccagcgaggccgcctacaaggaggccttcgagatcagcaaggagcagatgcagcccacccaccccatcagactgggcctggccctgaacttcagcgtgttctactacgagatccagaacgcccccgagcaggcctgcctgctggccaagcaggccttcgacgacgccatcgccgagctggacaccctgaacgaggacagctacaaggacagcaccctgatcatgcagctgctgagagacaacctgaccctgtggaccagcgaccagcaggacgaggaggccggcgagggcaactag

SEQ ID NO: 138165 - DNA, 741 bp, Artificial Sequence
  derived and/or modified sequence
atgggcgatcgcgaacagctgttgcagagggctcggcttgccgagcaggcagagcgctatgacgatatggcaagcgccatgaaagccgtgactgagctcaatgagcctctcagtaacgaagatagaaacctgctgtccgtggcttacaagaatgttgtgggtgcacgccgtagtagctggcgggtgatctcgtccatcgagcagaaaactatggcagatggaaacgaaaagaagctggagaaagtgaaggcctacagggaaaagatcgagaaagaactggagacggtgtgcaatgacgtcctttcattactggacaagttcctcatcaagaattgcaatgacttccagtacgaatcaaaagtgttctacctgaagatgaagggagactattaccggtatctagccgaggtagcatccggggagaagaagaacagtgtcgtggaggcctctgaggctgcatacaaagaggcttttgaaatatcaaaggagcagatgcagccaacacatccgataaggctcgggctcgcactcaatttctctgtgttttactatgaaattcaaaacgcaccagaacaggcatgtctgctagctaagcaggctttcgatgacgccatagctgaactggatacactgaacgaagacagctataaagacagcacgctcattatgcagttattgcgggacaatttgacactgtggactagcgatcagcaggatgaggaggccggcgaaggcaattag

SEQ ID NO: 138166 - DNA, 741 bp, Artificial Sequence
  derived and/or modified sequence
atgggagaccgggagcagctgctgcagagggcccggctggccgagcaggccgagagatatgatgacatggccagcgccatgaaggctgtgacagagctgaatgagcccctgagcaatgaagatagaaacctgctgtctgtggcctacaagaatgtggtgggcgcccggcgcagctcctggagggtcatcagcagcattgagcagaagaccatggctgatggaaatgagaagaagctggagaaggtgaaggcctaccgggagaagattgagaaggagctggagaccgtgtgcaatgatgtgctgagcctgctggacaagttcctgatcaagaactgcaatgacttccagtatgagagcaaggtgttctacctgaagatgaagggggactactaccgctacctggccgaggtggccagcggggagaagaagaacagcgtggtggaggccagcgaggccgcctacaaggaggcctttgagatcagcaaggagcagatgcagcccacccaccccatccggctgggcctggccctgaacttcagcgtcttctactatgagatccagaatgcccctgagcaggcctgcctgctggccaagcaggcctttgatgatgccatcgccgagctggacaccctgaatgaagattcctacaaggacagcaccctcatcatgcagctgctgcgggacaacctgaccctgtggaccagtgaccagcaggatgaggaggccggggagggcaactag

SEQ ID NO: 138167 - DNA, 741 bp, Artificial Sequence
  derived and/or modified sequence
atgggcgaccgggagcagctgctgcagcgggcccggctggccgagcaggcagagcgctatgatgacatggcctcagccatgaaagccgtaacagaattgaacgaacccctttccaatgaagacagaaatctactgtccgtggcctacaagaacgttgtaggcgcccgaagaagttcctggagagtgatctcctctatcgaacaaaaaacgatggctgatggtaatgaaaagaaactcgaaaaggtgaaagcttacagagagaaaatcgagaaagagcttgagacggtgtgcaacgatgtcctttccctcctggataaatttctcatcaaaaactgtaacgattttcaatatgagagtaaagtgttctatcttaaaatgaagggggactactacaggtatctggcagaggtcgccagtggcgagaagaaaaattccgtggtggaggcttcagaagccgcctataaggaggcattcgagatctctaaagaacagatgcagccaacccacccaattcggctgggtctcgcccttaatttctctgttttttattacgaaatccagaacgccccagagcaagcctgtctcctcgcgaagcaggcctttgacgacgccatcgccgagttggataccctaaacgaggactcttacaaggactccaccctcattatgcagttactccgagacaatttaaccctgtggaccagcgatcagcaggacgaggaggcaggcgaaggaaattag

SEQ ID NO: 138168 - DNA, 741 bp, Artificial Sequence
  derived and/or modified sequence
atgggcgatagggaacagttgcttcagagggctcggctcgctgagcaagcggaacgatatgacgacatggccagcgcaatgaaggctgtgacggaactgaacgagcccctatccaacgaggacagaaacttactttccgttgcttataaaaatgtcgtcggtgcacggagaagtagttggagggttatcagcagcatcgagcaaaagaccatggcagatggcaatgaaaagaaactcgagaaagtgaaagcatacagggaaaagatcgaaaaggagctggagaccgtttgcaacgatgtcctgagccttctggataagtttctgatcaagaactgtaatgactttcagtatgaaagcaaagtgttttacctgaaaatgaagggggattattaccgctatcttgcagaggttgctagcggtgaaaagaaaaactcagtggtagaagcctccgaagccgcatacaaagaggcctttgaaattagtaaggagcaaatgcagcctacacatcctatcaggctgggactggcactgaacttttccgtgttttattacgaaatacagaatgcccctgagcaggcctgtttgctggccaagcaggcatttgacgacgcgatcgctgaattagacaccctgaacgaagattcctacaaggattcgacattgatcatgcagctgctaagagacaacttgaccctctggacttctgaccagcaagatgaagaggccggagaagggaattag

SEQ ID NO: 138169 - DNA, 1825 bp, Artificial Sequence
  derived and/or modified sequence
gcaggcgtcgtcccgtcctcccatcccccagcgcggccgcgtctcctccctcggcgttgtccgcggcgcgagccacagcgcgcggggcgagccagcgagagggcgcgagcggcggcgctgcctgcagcctgcagcctgcagcctccggccggccggcgagccagtgcgcgtgcgcggcggcggcctccgcagcgaccggggagcggactgaccggcgggagggctagcgagccagcggtgtgaggcgcgaggcgaggccgagccgcgagcgacatgggggaccgggagcagctgctgcagcgggcgcggctggccgagcaggcggagcgctacgacgacatggcctccgctatgaaggcggtgacagagctgaatgaacctctctccaatgaagatcgaaatctcctctctgtggcctacaagaatgtggttggtgccaggcgatcttcctggagggtcattagcagcattgagcagaaaaccatggctgatggaaacgaaaagaaattggagaaagttaaagcttaccgggagaagattgagaaggagctggagacagtttgcaatgatgtcctgtctctgcttgacaagttcctgatcaagaactgcaatgatttccagtatgagagcaaggtgttttacctgaaaatgaagggtgattactaccgctacttagcagaggtcgcttctggggagaagaaaaacagtgtggtcgaagcttctgaagctgcctacaaggaagcctttgaaatcagcaaagagcagatgcaacccacgcatcccatccggctgggcctggccctcaacttctccgtgttctactatgagatccagaatgcacctgagcaagcctgcctcttagccaaacaagccttcgatgatgccatagctgagctggacacactaaacgaggattcctataaggactccacgctgatcatgcagttgctgcgagacaacctcaccctctggacgagcgaccagcaggatgaagaagcaggagaaggcaactgaagatccttcaggtcccctggcccttccttcacccaccacccccatcatcaccgattcttccttgccacaatcactaaatatctagtgctaaacctatctgtattggcagcacagctactcagatctgcactcctgtctcttgggaagcagtttcagataaatcatgggcattgctggactgatggttgctttgagcccacaggagctccctttttgaattgtgtggagaagtgtgttctgatgaggcattttactatgcctgttgatctatgggaaatctaggcgaaagtaatggggaagattagaaagaattagccaaccaggctacagttgatatttaaaagatccatttaaaacaagctgatagtgtttcgttaagcagtacatcttgtgcatgcaaaaatgaattcacccctcccacctctttcttcaattaatggaaaactgttaagggaagctgatacagagagacaacttgctcctttccatcagctttataataaactgtttaacgtgaggtttcagtagctccttggttttgcctctttaaattatgacgtgcacaaaccttcttttcaatgcaatgcatctgaaagttttgatacttgtaacttttttttttttttggttgcaattgtttaagaatcatggatttattttttgtaactctttggctattgtccttgtgtatcctgacagcgccatgtgtgtcagcccatgtcaatcaagatgggtgattatgaaatgccagacttctaaaataaatgttttggaattcaatgggtaaataaatgctgctttggggatatta

SEQ ID NO: 138170 - protein, 326 aa, Artificial Sequence
  derived and/or modified sequence
MDLTAIYESLLSLSPDVPVPSDHGGTESSPGWGSSGPWSLSPSDSSPSGVTSRLPGRSTSLVEGRSCGWVPPPPGFAPLAPRLGPELSPSPTSPTATSTTPSRYKTELCRTFSESGRCRYGAKCQFAHGLGELRQANRHPKYKTELCHKFYLQGRCPYGSRCHFIHNPSEDLAAPGHPPVLRQSISFSGLPSGRRTSPPPPGLAGPSLSSSSFSPSSSPPPPGDLPLSPSAFSAAPGTPLARRDPTPVCCPSCRRATPISVWGPLGGLVRTPSVQSLGSDPDEYASSGSSLGGSDSPVFEAGVFAPPQPVAAPRRLPIFNRISVSE

SEQ ID NO: 138171 - DNA, 1745 bp, Artificial Sequence
  derived and/or modified sequence
agcctgacttcagcgctcccactctcggccgacacccctcatggccaaccgttacaccatggatctgactgccatctacgagagcctcctgtcgctgagccctgacgtgcccgtgccatccgaccatggagggactgagtccagcccaggctggggctcctcgggaccctggagcctgagcccctccgactccagcccgtctggggtcacctcccgcctgcctggccgctccaccagcctagtggagggccgcagctgtggctgggtgcccccaccccctggcttcgcaccgctggctccccgcctgggccctgagctgtcaccctcacccacttcgcccactgcaacctccaccaccccctcgcgctacaagactgagctatgtcggaccttctcagagagtgggcgctgccgctacggggccaagtgccagtttgcccatggcctgggcgagctgcgccaggccaatcgccaccccaaatacaagacggaactctgtcacaagttctacctccagggccgctgcccctacggctctcgctgccacttcatccacaaccctagcgaagacctggcggccccgggccaccctcctgtgcttcgccagagcatcagcttctccggcctgccctctggccgccggacctcaccaccaccaccaggcctggccggcccttccctgtcctccagctccttctcgccctccagctccccaccaccacctggggaccttccactgtcaccctctgccttctctgctgcccctggcacccccctggctcgaagagaccccaccccagtctgttgcccctcctgccgaagggccactcctatcagcgtctgggggcccttgggtggcctggttcggaccccctctgtacagtccctgggatccgaccctgatgaatatgccagcagcggcagcagcctggggggctctgactctcccgtcttcgaggcgggagtttttgcaccaccccagcccgtggcagccccccggcgactccccatcttcaatcgcatctctgtttctgagtgacaaagtgactgcccggtcagatcagctggatctcagcggggagccacgtctcttgcactgtggtctctgcatggaccccagggctgtggggacttgggggacagtaatcaagtaatccccttttccagaatgcattaacccactcccctgacctcacgctggggcaggtccccaagtgtgcaagctcagtattcatgatggtgggggatggagtgtcttccgaggttcttgggggaaaaaaaattgtagcatatttaagggaggcaatgaaccctctcccccacctcttccctgcccaaatctgtctcctagaatcttatgtgctgtgaataataggccttcactgcccctccagtttttatagacctgaggttccagtgtctcctggtaactggaacctctcctgagggggaatcctggtgctcaaattaccctccaaaagcaagtagccaaagccgttgccaaaccccacccataaatcaatgggccctttatttatgacgactttatttattctaatatgattttatagtatttatatatattgggtcgtctgcttcccttgtatttttcttcctttttttgtaatattgaaaacgacgatataattattataagtagactataatatatttagtaatatatattattaccttaaaagtctatttttgtgttttgggcatttttaaataaacaatctgagtgt

SEQ ID NO: 138172 - DNA, 522 bp, Artificial Sequence
  derived and/or modified sequence
atgcccgccatgccatctcctctgtgtgcaccggcgagggtgtcacctagccccctgactgccgccccaccgttctgcagcctctctcctatcctgtgggtctctttaatattacttctcaccagtataagcaaatgttgcgagagcattttcaaatttatacagaatccatttacaagccactacttcccttgtagccatccgtcccagggcaagaggcggctacaccctggcatcctgcacagctttccaacagtttttcctacggcctccctggtgccacatctgagcatcctgttcagtgcacagcagccggaacgctcattccaacgcatgtcccctaccatgtctcatttcagcaagctttcaagcccttgccactccgagcaacgctcaaccccctttccacatccatctggactgccagccctggctacccccctgacttctctccagtttctctgcgtacagcctttttggctgctgcccccctcacggaacactgataacttcttgccttag

SEQ ID NO: 138173 - DNA, 459 bp, Artificial Sequence
  derived and/or modified sequence
atggaagcggaggcctggggttcccaggcaagagctgggctgggcgccgctgagaactgtcttgaaggtggaaaccaggcatttttgctggaaagggtcacaggtaccaagggccgcggccaaggtcaacccctggagcgcgccggtgaagagggagaagccggcggggatccgaggagagatcccggcgaagtcgtggcgaagagtagagttcgtgcaagaccccatctgtccctatatcccgcactgccaggtgtggctctggctcttctgtgctgtcccctccaagaccggtgcctcagattagtgcccgcttgcccaacggctggcccccagcacccacaggttctcccctgggcactgcagaagcagggcgtcgtgcggagcggcccatgggctactgaggaaatggtatggggaacgagaacgggggtgggcggacttacagccgtattttag

SEQ ID NO: 138174 - DNA, 981 bp, Artificial Sequence
  derived and/or modified sequence
atggacctgaccgccatctacgagagcctgctgagcctgagccccgacgtgcccgtgcccagcgaccacggcggcaccgagagcagccccggctggggcagcagcggcccctggagcctgagccccagcgacagcagccccagcggcgtgaccagcagactgcccggcagaagcaccagcctggtggagggcagaagctgcggctgggtgccccccccccccggcttcgcccccctggcccccagactgggccccgagctgagccccagccccaccagccccaccgccaccagcaccacccccagcagatacaagaccgagctgtgcagaaccttcagcgagagcggcagatgcagatacggcgccaagtgccagttcgcccacggcctgggcgagctgagacaggccaacagacaccccaagtacaagaccgagctgtgccacaagttctacctgcagggcagatgcccctacggcagcagatgccacttcatccacaaccccagcgaggacctggccgcccccggccacccccccgtgctgagacagagcatcagcttcagcggcctgcccagcggcagaagaaccagcccccccccccccggcctggccggccccagcctgagcagcagcagcttcagccccagcagcagcccccccccccccggcgacctgcccctgagccccagcgccttcagcgccgcccccggcacccccctggccagaagagaccccacccccgtgtgctgccccagctgcagaagagccacccccatcagcgtgtggggccccctgggcggcctggtgagaacccccagcgtgcagagcctgggcagcgaccccgacgagtacgccagcagcggcagcagcctgggcggcagcgacagccccgtgttcgaggccggcgtgttcgcccccccccagcccgtggccgcccccagaagactgcccatcttcaacagaatcagcgtgagcgagtag

SEQ ID NO: 138175 - DNA, 981 bp, Artificial Sequence
  derived and/or modified sequence
atggatttaaccgctatctatgagtcactcctgtctttgtctcctgatgtgccagtaccatcagaccatggggggactgaatcttcacctggctggggcagttcggggccctggagtctctccccatccgacagttcgccaagtggcgttacctcacgcctcccagggcgaagcacctccctcgtggaagggaggtcatgcggatgggttcctccgccccctggttttgcgccgctagcaccaagactcggaccggaactgtctcccagtcccacctccccaacggccacctccacaaccccatctcggtataagaccgagctgtgtagaactttctccgagtcagggcggtgtaggtatggggctaaatgtcaattcgcgcatgggctgggcgaattgagacaagctaacaggcatcccaagtacaaaaccgaactgtgccacaagttctacctccagggcagatgcccatacgggtcccggtgtcacttcatccacaacccatcggaagatttagcggctcccggtcatccgcctgtacttcggcagagcatttccttctctggcttgccctccggaagaagaacctcgcctcccccgccgggactagcaggtccaagtctgagcagctcatcattctccccatcttcttcccctcccccaccaggggatctgccactttccccatctgctttttccgcagcccctggcacccctctagcccgaagagatccaacgcctgtttgttgcccttcttgtagacgggccacacccatttccgtttggggtccactgggtggactagtgcgaacccctagcgtccagtcgcttggttccgatccggatgaatatgctagtagtgggagcagccttggagggtcagacagtcctgtctttgaggccggagtgtttgcaccaccccaacctgtcgcggccccccgccgcctgcccattttcaaccggatttcagtgagtgagtag

SEQ ID NO: 138176 - DNA, 981 bp, Artificial Sequence
  derived and/or modified sequence
atggacctgacagccatctatgagagcctgctgagcctgagcccagatgtgcctgtgcccagcgaccatggaggaacagagagcagccctggctggggcagcagcggcccctggagcctgagccccagcgacagcagccccagcggcgtgaccagccggctgcccggccgcagcaccagcctggtggagggccgcagctgtggctgggtgcccccacctcctggctttgcccccctggccccccggctgggccctgagctgagccccagccccaccagccccacagccaccagcaccacccccagccgctacaagacagagctgtgcaggaccttcagcgagagcggccgctgccgctacggggccaagtgccagtttgcccacggcctgggggagctgcggcaggccaacagacaccccaagtacaagacagagctgtgccacaagttctacctgcagggccgctgcccctacggcagccgctgccacttcatccacaaccccagcgaggacctggccgcccctggccacccccctgtgctgcggcagagcatctccttcagcggcctgcccagcggccgccgcaccagccccccacctcctggcctggccggccccagcctgagcagcagcagcttcagccccagcagcagccccccacctcctggggacctgcccctgagccccagcgccttctctgctgcccctggcacccccctggcccggcgggaccccacccctgtgtgctgccccagctgccggcgggccacccccatctctgtgtggggccccctgggcggcctggtgaggaccccatctgtgcagagcctgggcagtgaccctgatgaatatgccagcagcggcagcagcctgggcggcagtgacagccctgtgtttgaagctggggtgtttgccccaccccagcctgtggccgccccccggcggctgcccatcttcaaccgcatctctgtgtctgagtag

SEQ ID NO: 138177 - DNA, 981 bp, Artificial Sequence
  derived and/or modified sequence
atggacctgaccgccatctacgagagcctgctgagcctgagccccgatgtgcctgtgcccagtgatcatgggggtacagagtcaagccccgggtggggttcctcaggaccttggtctctctcaccatccgactcatcaccatctggggttacctctcgactcccaggaaggagtacgagcttggttgagggccggtcctgcggctgggtcccccctccacctgggtttgcacccctggcaccacggctggggccggaacttagcccttctcccacttctcctacagccacaagtaccactccttcccgatacaaaaccgagctgtgccggaccttctccgagagtggtagatgtaggtacggtgccaagtgtcaatttgcccatggactcggggaacttaggcaagccaataggcatccgaaatataaaactgagctctgtcataaattctatcttcagggacgctgcccctacggaagtcgatgccatttcatccacaatcctagcgaagacctggcagccccgggacaccctcccgtgcttaggcagtccatcagcttcagcggactcccatctggtaggaggacgagtccccctcctcctggcctggcgggcccttccttgagctcttcctccttttctccgtcatctagcccaccccccccaggcgatctgcccctatcacccagcgcattcagcgccgcccccgggactcctttggccagacgtgatccgacaccagtttgttgcccttcttgccggagggcgacccccatctcagtttgggggccgcttggaggcctggtgaggaccccgagtgttcagtcactcggctcggatccagatgaatacgcaagttcaggttctagcctgggaggaagcgactctcccgtgtttgaggcaggcgtgtttgcaccccctcaacctgtggctgcacctcgcaggctacccatttttaaccgaataagcgtttctgaatag

SEQ ID NO: 138178 - DNA, 981 bp, Artificial Sequence
  derived and/or modified sequence
atggatctcacagcgatatatgaatcattgctgtccctctccccagatgtgccagtgccttccgatcacgggggtactgagtccagccctggctggggaagctcaggtccatggtcgctctcgccatctgactcgagtccatctggggtaactagccgccttcccggaaggtccacatctctggtggaaggccgtagttgcggatgggtgccccctccacctggcttcgcaccgctcgccccaaggttgggccctgaacttagccccagtcctacctctcccacagcaactagtactacgccaagtagatacaagaccgaactgtgtaggaccttcagcgaatcaggccgatgtcgttatggagcaaaatgtcagtttgcccacggccttggcgagctcaggcaggcaaatcggcaccccaagtacaaaaccgaactgtgtcacaaattctaccttcaggggagatgcccatacggttcccgatgccatttcatccataatccatctgaagatctggctgcgccaggccatccccctgttctgcggcaatctatttctttctctggtcttccttccggacggagaactagcccacccccacctggactcgccggaccaagcctctcttcctccagcttcagcccgtctagctcacctccccctcccggtgacctgcctctgtctccatctgcctttagcgcagcaccgggaacccctttggcccgtagagatccaaccccggtgtgctgcccttcctgccgtcgagctacacccatttcggtgtggggaccattgggaggactcgtgaggacgccaagtgttcaatccttgggcagcgatcctgatgagtatgcatcctcggggtctagtctaggaggatccgactcacctgtgtttgaggccggtgtctttgcacctccccagcctgttgccgctcccagaaggctgcctatctttaacagaatctcagtttcggaatag

SEQ ID NO: 138179 - protein, 630 aa, Artificial Sequence
  derived and/or modified sequence
MSVSSGVQILTKPETVDRRRSAETTKEAGRPLEMAVSEPEASAAEWKQLDPAQSNLYNDVMLENYCNQASMGCQAPKPDMISKLEKGEAPWLGKGKRPSQGCPSKIARPKQKETDGKVQKDDDQLENIQKSQNKLLREVAVKKKTQAKKNGSDCGSLGKKNNLHKKHVPSKKRLLKFESCGKILKQNLDLPDHSRNCVKRKSDAAKEHKKSFNHSLSDTRKGKKQTGKKHEKLSSHSSSDKCNKTGKKHDKLCCHSSSHIKQDKIQTGEKHEKSPSLSSSTKHEKPQACVKPYECNQCGKVLSHKQGLIDHQRVHTGEKPYECNECGIAFSQKSHLVVHQRTHTGEKPYECIQCGKAHGHKHALTDHLRIHTGEKPYECAECGKTFRHSSNLIQHVRSHTGEKPYECKECGKSFRYNSSLTEHVRTHTGEIPYECNECGKAFKYSSSLTKHMRIHTGEKPFECNECGKAFSKKSHLIIHQRTHTKEKPYKCNECGKAFGHSSSLTYHMRTHTGESPFECNQCGKGFKQIEGLTQHQRVHTGEKPYECNECGKAFSQKSHLIVHQRTHTGEKPYECNECEKAFNAKSQLVIHQRSHTGEKPYECNECGKTFKQNASLTKHVKTHSEDKSHE

SEQ ID NO: 138180 - DNA, 2752 bp, Artificial Sequence
  derived and/or modified sequence
cgctaaggccgccctccgggtagccgccatgtcggtctccagcggcgtccagattctgacaaagccagagaccgtggaccggaggagaagtgcggaaacgaccaaagaggccgggcgaccactggagatggctgtgtccgagcccgaggccagcgccgcggaatggaagcaactggatcctgctcagagcaacctgtataatgatgtgatgctggagaactactgcaaccaagcctcaatggggtgtcaagctcccaaaccagacatgatctccaagttggaaaaaggagaagcaccatggttggggaaggggaaaagacccagtcaaggttgtccaagtaaaatagcaagacccaagcaaaaagaaactgatggaaaagtccagaaagatgatgaccagcttgaaaatatccagaaatctcaaaacaaactcctcagggaagttgcagtcaagaagaaaactcaagctaagaagaatggcagtgactgtggttcactggggaaaaaaaataatttgcataaaaaacatgttccttcaaagaaaaggcttcttaaatttgagtcatgtggaaaaattttgaaacagaatttagatttacctgatcactcaagaaactgtgtaaaaaggaaatctgatgcagctaaagaacacaagaagtcattcaaccatagcttatctgatacaaggaaaggcaaaaagcaaactggaaagaaacatgagaaattatccagccatagctcatctgataagtgtaacaaaactggcaaaaaacatgacaaattatgctgtcatagttcatcccatattaaacaggacaaaattcaaactggagagaaacatgagaaatcacccagccttagctcatctactaagcatgaaaaacctcaagcttgtgtgaaaccctatgaatgtaatcaatgtggaaaggttctcagccataaacaaggactcattgaccatcagagagttcatactggggagaaaccatatgaatgtaatgaatgtgggatagcctttagccaaaagtcacaccttgttgtacatcagagaactcacaccggagaaaaaccatatgaatgtattcagtgtggcaaagcccatggtcataaacatgcactcactgaccatctaagaattcatactggagaaaagccctatgaatgtgctgaatgtgggaaaaccttcagacacagctcaaaccttattcaacatgtgagatctcacacaggtgagaagccatatgaatgtaaggaatgtgggaagtcttttaggtataactcatctcttaccgaacatgtgagaacacatacaggtgaaataccatatgaatgcaatgaatgtggaaaagcctttaagtatagctcatcccttactaaacacatgagaattcatacaggtgagaaaccctttgaatgtaatgaatgtgggaaagctttcagcaagaagtcacacctcattatacatcaaagaactcatactaaggagaaaccttataaatgtaatgagtgtggaaaagcctttggacatagctcatctcttacttaccatatgagaactcatacaggtgaaagtccctttgaatgtaatcaatgtgggaaaggctttaaacaaattgaaggccttactcaacatcagagagttcatactggagagaaaccgtatgagtgtaatgaatgtgggaaagcctttagccaaaagtctcacctcattgtacatcagagaactcatactggggagaaaccttatgaatgtaacgaatgtgaaaaagcctttaatgcaaaatcacagcttgttatacatcagcgatcccacactggagaaaaaccctatgaatgtaatgaatgtgggaaaactttcaaacaaaatgcatccctaaccaaacatgtgaaaactcattcagaagataaatctcatgagtgaagttaatgtgggaaatttgttaactaaatttaaggttttgttgaaccttggaaatatgctgattttaaagagtgttagaaagcctttagcaagatgtcacaccttgttgtacatgagaaactttgaaaatggatcttcatatagaatcagtggatggaaacaagggtttaaacttgatacaaaaccttttataaaaaatattgttttaactactcaattattataaatgatctacatgttcagattgaaattgaaagctttaaaaattgtgaattatttgaatattcaaagcaatggagaaacaagttatatatgctgacagttcctgtgtttcttcttgttttgtacttaagcaccatatattagagttgaatttgcatatctgtttattgccttatgtaaatgagtgtggccatctgtataagcctctttgacattttcacccagctctttcttaatgtctgtgttggcttctgcatcagcagaaatctttttaaaagggttgttatatatgtaaaaaatgttaacaggaaaatgagagaaaataaagcagctgaggatacaaatgtgctggtagggagcgatattcaagatatattgtgaagtgtgaaaaagtaggttgctgaaccatgtatatagtatgttcccctttgtgtacaaaagggtatgtttgtttaacctctgtctcttatctctgtatgtgtatgtatctttgtatgcatatatacatgtatctgtatgtgaatagactttgaaaaaatacagaataaacttcatggtggttgccattgggcagaggagtataggactggggtctaggataggagcaag

SEQ ID NO: 138181 - DNA, 1893 bp, Artificial Sequence
  derived and/or modified sequence
atgagcgtgagcagcggcgtgcagatcctgaccaagcccgagaccgtggacagaagaagaagcgccgagaccaccaaggaggccggcagacccctggagatggccgtgagcgagcccgaggccagcgccgccgagtggaagcagctggaccccgcccagagcaacctgtacaacgacgtgatgctggagaactactgcaaccaggccagcatgggctgccaggcccccaagcccgacatgatcagcaagctggagaagggcgaggccccctggctgggcaagggcaagagacccagccagggctgccccagcaagatcgccagacccaagcagaaggagaccgacggcaaggtgcagaaggacgacgaccagctggagaacatccagaagagccagaacaagctgctgagagaggtggccgtgaagaagaagacccaggccaagaagaacggcagcgactgcggcagcctgggcaagaagaacaacctgcacaagaagcacgtgcccagcaagaagagactgctgaagttcgagagctgcggcaagatcctgaagcagaacctggacctgcccgaccacagcagaaactgcgtgaagagaaagagcgacgccgccaaggagcacaagaagagcttcaaccacagcctgagcgacaccagaaagggcaagaagcagaccggcaagaagcacgagaagctgagcagccacagcagcagcgacaagtgcaacaagaccggcaagaagcacgacaagctgtgctgccacagcagcagccacatcaagcaggacaagatccagaccggcgagaagcacgagaagagccccagcctgagcagcagcaccaagcacgagaagccccaggcctgcgtgaagccctacgagtgcaaccagtgcggcaaggtgctgagccacaagcagggcctgatcgaccaccagagagtgcacaccggcgagaagccctacgagtgcaacgagtgcggcatcgccttcagccagaagagccacctggtggtgcaccagagaacccacaccggcgagaagccctacgagtgcatccagtgcggcaaggcccacggccacaagcacgccctgaccgaccacctgagaatccacaccggcgagaagccctacgagtgcgccgagtgcggcaagaccttcagacacagcagcaacctgatccagcacgtgagaagccacaccggcgagaagccctacgagtgcaaggagtgcggcaagagcttcagatacaacagcagcctgaccgagcacgtgagaacccacaccggcgagatcccctacgagtgcaacgagtgcggcaaggccttcaagtacagcagcagcctgaccaagcacatgagaatccacaccggcgagaagcccttcgagtgcaacgagtgcggcaaggccttcagcaagaagagccacctgatcatccaccagagaacccacaccaaggagaagccctacaagtgcaacgagtgcggcaaggccttcggccacagcagcagcctgacctaccacatgagaacccacaccggcgagagccccttcgagtgcaaccagtgcggcaagggcttcaagcagatcgagggcctgacccagcaccagagagtgcacaccggcgagaagccctacgagtgcaacgagtgcggcaaggccttcagccagaagagccacctgatcgtgcaccagagaacccacaccggcgagaagccctacgagtgcaacgagtgcgagaaggccttcaacgccaagagccagctggtgatccaccagagaagccacaccggcgagaagccctacgagtgcaacgagtgcggcaagaccttcaagcagaacgccagcctgaccaagcacgtgaagacccacagcgaggacaagagccacgagtag

SEQ ID NO: 138182 - DNA, 1893 bp, Artificial Sequence
  derived and/or modified sequence
atgagtgtctccagcggcgtgcaaatcttgactaagcccgaaactgtggataggcgacgaagcgccgagacaacaaaggaagccggccgccctctggagatggcggtgtcagagcccgaagcgagcgcagccgagtggaagcagcttgacccggcccagtcaaacctgtacaacgacgtaatgctagagaactactgtaatcaggcctctatggggtgtcaagctcccaagcccgatatgatcagcaaattggagaaaggcgaagcaccctggctgggaaaaggtaaaaggccatctcaggggtgcccttctaaaatcgctcgaccaaagcagaaagaaactgatggaaaggtgcagaaggatgacgaccaactcgagaacatacaaaaatcccagaacaagctgctgcgggaagtcgctgtaaaaaagaagacccaagctaagaaaaatggcagtgattgtggaagcctggggaagaagaataatctgcataaaaagcacgtccctagcaagaaaaggctgctaaaatttgaaagctgtggcaagattctgaagcagaacctggacttacctgatcacagcaggaactgcgtcaagcgcaagtctgatgcggctaaagagcacaagaagtcattcaatcattccctctcagatacaaggaaagggaagaagcaaaccggaaagaaacacgaaaagctgagttcacacagcagttccgacaaatgtaataagactgggaaaaagcacgataaactgtgttgccactcatcaagccatattaagcaggataagatccagactggcgaaaagcacgagaaaagcccaagtttgtctagttccactaaacacgagaaaccacaagcttgtgtgaaaccatatgaatgcaaccagtgtggcaaagtgttaagccataaacagggtctgatcgatcaccaaagagtccacaccggcgagaaaccgtatgagtgcaatgagtgcggaatcgcattctcacagaagtctcacctcgtggtacatcagcggacccataccggtgagaagccctacgagtgcatccagtgtggcaaagcacacggccataagcacgccctcacagaccatttgcggattcacactggtgaaaaaccttacgagtgcgctgaatgcggtaagacatttcggcatagttcaaacctgatacagcatgttagaagtcatactggcgaaaagccatacgagtgtaaggaatgcggaaaatcatttagatacaactcctcactgacggagcacgtccggacccatactggggagattccctatgagtgcaatgaatgtggaaaagccttcaaatattctagctccctgaccaaacatatgcgcatccatacaggcgagaagcctttcgagtgtaacgaatgtggtaaggccttcagtaagaagtcccacttgattatccatcagcggacacatacaaaggaaaagccctacaaatgcaatgaatgcggaaaggcctttgggcactccagctcactcacttatcacatgagaactcacacaggagagtcaccattcgagtgcaaccagtgcgggaaaggatttaagcagattgaaggtctaacgcaacatcaaagagtgcatacaggagagaaaccttatgagtgcaatgagtgcggaaaggcattttcccagaagagccatcttatcgtccaccaaaggacacacaccggtgaaaagccatacgagtgcaacgaatgtgaaaaggccttcaacgctaagtctcaattggtgattcaccagagatctcatactggcgaaaaaccgtacgagtgtaatgagtgcggcaaaaccttcaaacagaatgcttctctgactaagcacgtcaaaacccactctgaagataagtctcacgaatag

SEQ ID NO: 138183 - DNA, 1893 bp, Artificial Sequence
  derived and/or modified sequence
atgtctgtgtcctctggagtgcagatcctgaccaagccagagaccgtggacagaagaagatctgctgagaccaccaaggaggccggccggcccctggagatggctgtgtctgagcctgaggccagcgctgctgagtggaagcagctggaccctgcccagagcaacctgtacaatgatgtgatgctggagaactactgcaaccaggcctccatgggctgccaggcccccaagccagacatgatcagcaagctggagaagggggaggccccctggctgggcaagggcaagaggcccagccagggctgccccagcaagatcgcccggcccaagcagaaggagacagatggcaaggtgcagaaggatgatgaccagctggagaacatccagaagagccagaacaagctgctgcgggaggtggccgtgaagaagaagacccaggccaagaagaatggaagtgactgtggcagcctgggcaagaagaacaacctgcacaagaagcacgtgcccagcaagaagaggctgctgaagtttgagagctgtgggaagatcctgaagcagaacctggacctgcctgaccacagcaggaactgtgtgaagaggaagagtgatgctgccaaggagcacaagaagagcttcaaccacagcctgagtgacaccaggaagggcaagaagcagacaggcaagaagcatgagaagctgagcagccacagcagcagtgacaagtgcaacaagacaggcaagaagcatgacaagctgtgctgccacagcagcagccacatcaagcaggacaagatccagacaggagagaagcatgagaagagccccagcctgagcagcagcaccaagcatgagaagccccaggcctgtgtgaagccctatgagtgcaaccagtgtgggaaggtgctgagccacaagcagggcctgattgaccaccagagggtgcacactggagagaagccctatgagtgcaatgaatgtggcatcgccttcagccagaagagccacctggtggtgcaccagaggacccacactggagagaagccctatgagtgcatccagtgtgggaaggcccacggccacaagcacgccctgacagaccacctgcgcatccacactggagagaagccctatgaatgtgctgaatgtgggaagaccttccgccacagcagcaacctgatccagcacgtgcgcagccacactggagagaagccctatgagtgcaaggaatgtgggaagagcttccgctacaacagcagcctgacagaacatgtgaggacccacactggagagatcccctatgagtgcaatgaatgtgggaaggccttcaagtacagcagcagcctgaccaagcacatgaggatccacactggagagaagccctttgagtgcaatgaatgtgggaaggccttcagcaagaagagccacctgatcatccaccagaggacccacaccaaggagaagccctacaagtgcaatgaatgtgggaaggccttcggccacagcagcagcctgacctaccacatgaggacccacactggagagagcccctttgagtgcaaccagtgtgggaagggcttcaagcagatcgagggcctgacccagcaccagagggtgcacactggagagaagccctatgagtgcaatgaatgtgggaaggccttcagccagaagagccacctgattgtgcaccagaggacccacactggagagaagccctatgagtgcaatgaatgtgagaaggccttcaatgccaagagccagctggtgatccaccagaggagccacactggagagaagccctatgagtgcaatgaatgtgggaagaccttcaagcagaatgccagcctgaccaagcacgtgaagacccacagcgaggacaagagccatgaatag

SEQ ID NO: 138184 - DNA, 1893 bp, Artificial Sequence
  derived and/or modified sequence
atgagcgtgagcagcggcgtgcagatcctgaccaagcccgagaccgtggacagacgccgatcagctgagacaacaaaagaagcgggtcgcccactggagatggccgtgagtgagcccgaagcaagcgccgcggagtggaaacaacttgatcctgcccagtccaacctctataatgacgtcatgctggaaaactattgtaatcaggcatcaatggggtgccaggcccctaagccagatatgatctccaaattggagaaaggggaggctccttggctcgggaagggcaaacggccctcccagggatgccctagtaaaatcgctagacctaagcagaaagaaacagatggaaaagtgcaaaaggatgacgatcagctggaaaacatacagaagtcacaaaacaaacttcttagggaggtggcagtgaagaagaaaacccaggccaagaagaatggatctgattgcggttccctggggaagaagaacaatttacacaaaaagcacgtgcctagcaaaaaaaggctgcttaagttcgagtcttgtgggaagatcctgaaacaaaatttagatctgccagaccactcacgaaactgtgtgaagcgcaagagtgatgcagccaaagagcataaaaagagcttcaatcattccctttctgatacgagaaaaggaaagaagcagacaggtaaaaagcatgaaaaactgtccagccattcctcaagcgataagtgcaacaagaccgggaaaaagcacgataagctctgctgccatagctcttctcacattaagcaggacaagatccaaacaggagaaaagcacgagaagtctccgagcctgagtagtagtacgaagcatgagaagccacaggcatgcgtgaaaccatacgagtgcaaccagtgtggaaaggttttatctcataagcaggggctgatcgaccaccagcgggtgcataccggcgagaagccctatgaatgtaatgaatgtggcatcgccttcagtcagaaatcccacctggttgtacatcaacgcacacatactggcgaaaagccatacgagtgtatccagtgtgggaaggcccacggacataaacacgctctaaccgatcacctgagaattcacacaggtgaaaagccttacgagtgtgcagagtgtggcaagacattcagacactcctcgaacctcatccagcacgttagaagccacaccggagagaagccttatgagtgcaaagaatgcggcaagtccttccgctacaattcctcccttaccgaacacgtcagaacccacaccggcgaaatcccctacgagtgcaacgaatgcggcaaggcctttaaatactccagttctcttaccaaacatatgcggatccataccggggagaagccatttgaatgtaacgagtgcggcaaagccttcagtaaaaaaagtcacctgatcatccaccaacgcacccacactaaggaaaagccttacaagtgcaatgagtgtggcaaggcgtttggccacagttcttctcttacgtaccacatgcgaacacataccggtgagagtccctttgagtgcaatcagtgtggcaagggatttaaacagatcgaggggctcacccaacatcagagggtccacacaggtgaaaagccatacgagtgcaatgagtgtgggaaggccttttcacagaaatcccacctgattgttcaccagagaactcacaccggagagaaaccgtacgaatgcaacgagtgtgagaaggcattcaatgcaaaatctcaattggttatccatcagaggtcacacaccggtgagaaaccttatgagtgtaatgaatgcgggaaaacattcaaacagaacgcctctctgacaaagcacgtgaagacacactcggaggataaatctcacgaatag

SEQ ID NO: 138185 - DNA, 1893 bp, Artificial Sequence
  derived and/or modified sequence
atgtccgtgtcatcaggtgtacagatactgacgaaaccggagacggtggaccgaaggaggtctgcagagaccacgaaggaggcaggtcggccattagagatggctgtctccgaacccgaagccagcgcagccgagtggaagcagttggatcccgcacagagtaatttgtacaatgacgtgatgctcgagaattattgcaaccaggcttctatgggttgccaggcacccaagcccgacatgatttctaaacttgaaaagggagaagccccatggctgggaaagggaaagcgccctagtcaggggtgtccctcaaagatagcccgaccaaaacaaaaggaaaccgatgggaaggttcagaaggatgatgaccagttggaaaacatacagaagagccagaacaagctgctcagagaggtggcagtcaagaaaaaaacgcaggccaagaagaatgggtctgactgcgggtcactaggtaaaaaaaacaacctgcacaagaagcacgtgccgagtaaaaagcggctgttgaaattcgagagttgcggtaaaattctgaagcagaatctggacttgccagatcacagtcgcaactgcgtcaaacgtaaatccgacgctgcgaaggaacacaagaaaagcttcaaccacagtttgtcagatacacgtaagggcaagaaacagacaggaaagaaacatgagaagctctctagccatagctctagcgataaatgtaacaaaacgggtaaaaaacacgacaaactgtgctgccactcttcttctcatatcaaacaggacaaaattcagaccggggagaagcatgagaagagcccctccctttcaagcagcacaaagcacgaaaagcctcaagcttgtgtgaaaccatacgagtgcaaccagtgcggtaaagtcctgtcccataaacagggactgattgatcatcagcgcgtacataccggagaaaaaccgtatgagtgtaatgaatgcggcattgcgttttctcaaaaaagccatctagtggtgcaccagcgcacccacaccggagagaagccttacgaatgcatccagtgcggcaaggctcatggacacaagcatgctcttactgaccaccttcggattcacacaggggaaaaaccttacgagtgcgctgagtgtggcaaaaccttccgtcactcttcgaatctcattcagcatgtaaggtcccacactggagagaagccttatgagtgtaaagagtgcgggaaaagcttcaggtataacagcagtctgaccgaacatgtacgcacgcacacgggggagatcccttacgagtgcaatgaatgcggaaaagcttttaagtactcaagttcactgacaaagcatatgagaatccatactggagagaaacccttcgaatgtaacgaatgcggcaaagctttttccaaaaagtctcatctgattattcatcagaggacgcacaccaaagagaagccgtataaatgtaatgagtgcggcaaggccttcggacattcttcctccttgacttatcatatgcggacccataccggcgagtcacctttcgaatgcaaccagtgcggcaaagggtttaaacagatagagggactgacgcaacaccaaagagtgcataccggagaaaaaccatacgagtgcaatgagtgcggaaaggccttcagtcagaagtcacacctcatagtccaccagaggacccacacgggggagaagccatacgaatgcaacgagtgtgagaaggccttcaacgcgaagtcccagcttgtgatccatcaacggagccacactggggaaaaaccttatgaatgtaatgagtgcggcaagacattcaagcaaaacgccagcctcaccaaacatgtgaaaacccactcagaggacaaatcccatgagtag

SEQ ID NO: 138186 - DNA, 6266 bp, Artificial Sequence
  derived and/or modified sequence
cgctaaggccgccctccgggtagccgccatgtcggtctccagcggcgtccagattctgacaaagccagagaccgtggaccggaggagaagtgcggaaacgaccaaagaggccgggcgaccactggagatggctgtgtccgagcccgaggccagcgccgcggaatggaagcaactggatcctgctcagagcaacctgtataatgatgtgatgctggagaactactgcaaccaagcctcaatggggtgtcaagctcccaaaccagacatgatctccaagttggaaaaaggagaagcaccatggttggggaaggggaaaagacccagtcaaggttgtccaagtaaaatagcaagacccaagcaaaaagaaactgatggaaaagtccagaaagatgatgaccagcttgaaaatatccagaaatctcaaaacaaactcctcagggaagttgcagtcaagaagaaaactcaagctaagaagaatggcagtgactgtggttcactggggaaaaaaaataatttgcataaaaaacatgttccttcaaagaaaaggcttcttaaatttgagtcatgtggaaaaattttgaaacagaatttagatttacctgatcactcaagaaactgtgtaaaaaggaaatctgatgcagctaaagaacacaagaagtcattcaaccatagcttatctgatacaaggaaaggcaaaaagcaaactggaaagaaacatgagaaattatccagccatagctcatctgataagtgtaacaaaactggcaaaaaacatgacaaattatgctgtcatagttcatcccatattaaacaggacaaaattcaaactggagagaaacatgagaaatcacccagccttagctcatctactaagcatgaaaaacctcaagcttgtgtgaaaccctatgaatgtaatcaatgtggaaaggttctcagccataaacaaggactcattgaccatcagagagttcatactggggagaaaccatatgaatgtaatgaatgtgggatagcctttagccaaaagtcacaccttgttgtacatcagagaactcacaccggagaaaaaccatatgaatgtattcagtgtggcaaagcccatggtcataaacatgcactcactgaccatctaagaattcatactggagaaaagccctatgaatgtgctgaatgtgggaaaaccttcagacacagctcaaaccttattcaacatgtgagatctcacacaggtgagaagccatatgaatgtaaggaatgtgggaagtcttttaggtataactcatctcttaccgaacatgtgagaacacatacaggtgaaataccatatgaatgcaatgaatgtggaaaagcctttaagtatagctcatcccttactaaacacatgagaattcatacaggtgagaaaccctttgaatgtaatgaatgtgggaaagctttcagcaagaagtcacacctcattatacatcaaagaactcatactaaggagaaaccttataaatgtaatgagtgtggaaaagcctttggacatagctcatctcttacttaccatatgagaactcatacaggtgaaagtccctttgaatgtaatcaatgtgggaaaggctttaaacaaattgaaggccttactcaacatcagagagttcatactggagagaaaccgtatgagtgtaatgaatgtgggaaagcctttagccaaaagtctcacctcattgtacatcagagaactcatactggggagaaaccttatgaatgtaacgaatgtgaaaaagcctttaatgcaaaatcacagcttgttatacatcagcgatcccacactggagaaaaaccctatgaatgtaatgaatgtgggaaaactttcaaacaaaatgcatccctaaccaaacatgtgaaaactcattcagaagataaatctcatgagtgaagttaatgtgggaaatttgttaactaaatttaaggttttgttgaaccttggaaatatgctgattttaaagagtgttagaaagcctttagcaagatgtcacaccttgttgtacatgagaaactttgaaaatggatcttcatatagaatcagtggatggaaacaagggtttaaacttgatacaaaaccttttataaaaaatattgttttaactactcaattattataaatgatctacatgttcagattgaaattgaaagctttaaaaattgtgaattatttgaatattcaaagcaatggagaaacaagttatatatgctgacagttcctgtgtttcttcttgttttgtacttaagcaccatatattagagttgaatttgcatatctgtttattgccttatgtaaatgagtgtggccatctgtataagcctctttgacattttcacccagctctttcttaatgtctgtgttggcttctgcatcagcagaaatctttttaaaagggttgttatatatgtaaaaaatgttaacaggaaaatgagagaaaataaagcagctgaggatacaaatgtgctggtagggagcgatattcaagatatattgtgaagtgtgaaaaagtaggttgctgaaccatgtatatagtatgttcccctttgtgtacaaaagggtatgtttgtttaacctctgtctcttatctctgtatgtgtatgtatctttgtatgcatatatacatgtatctgtatgtgaatagactttgaaaaaatacagaataaacttcatggtggttgccattgggcagaggagtataggactggggtctaggataggagcaagacttccttgtatatttggatttttaaatcatgcacatgtattatttttataattaaaatattttaatatgcataaatcaacattatttaaggttgtcactgagcccctccacaacatgtgagatcaacatgtgagatctcagattttgacagagttaaaatctttgtatgcttattcatgaatgatgatgaatctaaagtatatagtatgaaacttgatgttgaattcataaagactttttctatcacacacaagttctttcattaacatagtgaattataacagcactgtttctacatttgccattttttgatgttgaattgtgattgcaggtgatgatgaattgtgattgcaggtgaatgaaagtgattttatgaataatcaccctgttttatctcatattcaaagaactaacacacaaacacctcaatcagggaattcgaatgaaacaaatgtcacccctccctgttctcgctcaatattgggcattatttactggatcactgtactctttctgagtgaacccagagttggcctcagaatcattgtgcagcgtgcattccagaaggtactatgcatcaacttggactgtcacaggagacctatttgccattgcacacctggattttttttactcttgagccatagattaaaaatacttctggctgggcatggtgggtgcctgtaatctccagcactgtgggaggccaaggtgggtggatcacttgaggccaggagtttgagatcagactagccaacacaatgaaaccccatctctactaaaaatacaaaaaattatctgggcatgctgtaatccctgtaatcccagccactcaggaggctgaggcaagagagttgcttgcacccaggagatggaggttacagtgcactccagcctgggcagcagagtgaggctctgtctcaaaaaaaagaaatacaaaaaatgcacaaaacttctgaactattttgaaatctaagttgttacactaaaagcagagacataagtacagaaatggttttcaaaaacatcatacctttattttaatacaatattaatttacataatataaaatattataatttggcatgttatcttttatattttttaaagcacaatccctacattatttcatttattcctcagaactaacatatgagcagtaatcgggacttgtctagtcatgttcaatcctgttgagtaaatatttcacctagacagtaatttagcataataatgggccccaaagaaatatgtgcttaaatgccatctttacaaatatttatcattcaagctccttccttcctgacctcatttcagagaattataatgtgttaatataatatattgagaatggaatatgtgttcgtgtatgtgcatgtgcacacatgcatacacatgcacgggttgaaagctcaactcatgaatatatcccctcatttccaagtaacttatttatcacatgggaagaaaatgcaatatgaaagccatttctaccagtaatttcttaacaagtggaaatatagcactatgcacagaatgagtcatcactgtctagagctgtagaaagcctgcactttttagatggatgaaacagttgcaggttatggctatgttgaatttccacatgtcttggggaacccatagtattgccacatctgagacagtgagaattataggtatgcctgaatgatataaatgaatgctgaaagccactttgtgcagtaataaaatgaattaaaagttagcattgatgaatgaggaaaggatgtctaaatacaattggaggttagtataggaaaacagacacacagtggtaagtctgaatcgatacgtaaactctagtgtgcataaaaattgcctgaatgatttgttaaaacacagacttgagaatgcaaattcttgggcctcgtcacagacatattggatcagaaaccctgtgggtgggccttgagaatttgcattttaataagtttccagtggattcctgtgctgctggtctggggaccaccctttgagaaccactaatctaaatcatggtgtaagtaagtttaaaaaattatttttaaactgtttttcagatcctctttaagaaaatgaaggggcataaaagtaaattattattaacagttttgaaacatttatttattcaagtgatatgatcatctaagtgcctgagatacagcagtctacaaaacaaaaagaaagcaaacaaacaaaacaaaaccctgttctcatagaccttaattctagaggaggacataggtaataaataaacaactacaatataaagtataacagatcactggatggcaaaaagcaaaccaaggaaggggagggaagtgttggggaatgtaattttaaatatagtgatgggaagcaggcagtaagcttacttagatggtgacaaaagcaaagacccagagagggtaaaagagcaaaccatgtatatatatatgacggaagagcattccagggatatatcttttagaatctgagggtgtgggaagagaaagatgttaaactcctctgacataaagaagaggaaaaaaagtggaaacatttttttaaatcaagatttaaaaaaaaattacatttgtgataggtagaaaacaatctgtcacacactgcttttggtagttgtgtaagtttgtacaacctaccaaaatgtaaatctgacagtatacatcaaagccttatgatggtcggcagtccatcgaggaatctattctatgttgtacaatcaaggcgtactatgatatttattgcagaacagagagaaatagcatatacattgctagttaattgattaaataaagcatgattccttcaaaaattgagtaatatgacattaaaaaccacaatttcaaactatatttaagaagatacaaataattctttattattacttttactctcaggaatgtgtttgagtgatgcatctccaggcatcaagtgagtaatccaatattgaagaaaattaaaattttccacaaagtcccccttctagaagaatgtgctcatatcttttgaccagaaatgagtcacatgaccacacctagtttcaggtggcttgaggaaattgaatctttctttttttgttttattttgttttgagacaaagtctctgtcacccagactggagtgtgcagtagtgcaatcttggctcattacaatctctacctcccaggcttaagcactcctcccaccttagccttcctagtagctgggactacaggtgcatgccaccaagctaattttttttttttttttttggtggaaacagagttttgccatgttactcaggctggtctcaaacttctgggctcaagtgatctgcccaccttggcctcccaaagtgctgtgattaaaagtgtgagctaccacatttggccaaatctttaatttcttaaccttcatagtaaaggaaataaagagacatgggcattgaaaaatggatgttgtacaaaccaacctgtagcatctaaaatactaaataaaaaacagtttacaaaa

SEQ ID NO: 138187 - protein, 447 aa, Artificial Sequence
  derived and/or modified sequence
MLLDAGPQYPAIGVTTFGASRHHSAGDVAERDVGLGINPFADGMGAFKLNPSSHELASAGQTAFTSQAPGYAAAAALGHHHHPGHVGSYSSAAFNSTRDFLFRNRGFGDAAAAASAQHSLFAASAGGFGGPHGHTDAAGHLLFPGLHEQAAGHASPNVVNGQMRLGFSGDMYPRPEQYGQVTSPRSEHYAAPQLHGYGPMNVNMAAHHGAGAFFRYMRQPIKQELICKWIEPEQLANPKKSCNKTFSTMHELVTHVTVEHVGGPEQSNHICFWEECPREGKPFKAKYKLVNHIRVHTGEKPFPCPFPGCGKVFARSENLKIHKRTHTGEKPFKCEFEGCDRRFANSSDRKKHMHVHTSDKPYLCKMCDKSYTHPSSLRKHMKVHESSSQGSQPSPAASSGYESSTPPTIVSPSTDNPTTSSLSPSSSAVHHTAGHSALSSNFNEWYV

SEQ ID NO: 138188 - DNA, 5231 bp, Artificial Sequence
  derived and/or modified sequence
ctatcagtctcgcgctcaccgcccggctgaggaggtgaaagtttctccccaggaagataaaccgcaaaagacaatattgtgcatgatttgcgccttttctttggctttttctttctttcttcacccccccacccacttttttttttttttttttcaaaaagcagagagggaaaaacggagagtgaaggagcgaggaggcgagcgtgagagaaaggagagagagagaaaagaaagggcgaggggctagtggagaagtaaggaggggcgcgctgcgcgaggcggagagagggcgaagcagtcgcggcactggcgctcacattcctctatgctacaaatccaggaggaagtttttttttagggggctgagatgctccatgcctttccccgggcagccttgacgcgcggccctctcggcagagactgagcggcgagaaagtgcgagccgggccggcagaatctgcctggcgggcgctggagcctgcgttactcgcggcccgcagccgtccggctactttgcgtttggcccggccagcgcccgggcgcgccgcgccattgcctgcaggctaggacttcgcgaggtgggtcgactccccctccctcctcctcttcttcctcctcttcctcctcctcttgttcctcctcctcctcccgattttccctcctcggctggcgagggtggggggggcgggggaggccggggctcgccccgagcagccacgatgctcctggacgccggcccccagtacccagcgatcggcgtgaccacctttggcgcgtcccgccaccactccgcgggcgacgtggccgaacgagacgtgggcctgggcatcaacccgttcgccgacggcatgggcgccttcaagctcaaccccagttcgcacgagctggcttcggccggccagacggccttcacgtcgcaggcgccaggctacgcggctgctgcggccctgggccatcaccatcacccgggccacgtcggctcctattccagcgcagccttcaactccacgcgggactttctgttccgcaaccggggttttggcgacgcggcggcggcagccagcgcacagcacagcctctttgctgcatcggccgggggcttcgggggcccacacggccacacggacgccgcgggccacctcctcttccccgggcttcacgagcaggctgccggccacgcgtcgcctaacgtggtcaacgggcagatgaggctcggcttctcgggggacatgtacccgcgaccggagcagtacggccaggtgaccagcccgcgttcggagcactatgctgcgccgcagctgcacggctacgggcccatgaacgtgaacatggccgcgcatcacggcgccggcgccttcttccgctacatgcgccaacccatcaagcaagagctcatctgcaagtggatcgagcccgagcagctggccaaccccaaaaagtcgtgcaacaaaactttcagcaccatgcacgagctagttacgcacgtcaccgtggagcacgtaggtggcccggagcagagtaatcacatctgcttctgggaggagtgtccgcgcgagggcaagcccttcaaagccaaatacaaactggttaaccacatccgcgtgcacacgggcgagaagccctttccctgccccttccctggctgtggcaaggtcttcgcgcgctccgagaatttaaagatccacaaaaggacgcacacaggggagaagcccttcaagtgcgagtttgagggctgtgaccggcgcttcgctaacagcagcgaccgcaagaagcacatgcacgtgcacacgagcgacaagccctatctttgcaagatgtgcgacaagtcctacacgcatcccagttcgctgcgcaaacacatgaaggtccacgaatcctcctcgcagggctcgcagccttcgccggccgccagctctggctacgaatcctccacgcctcccaccatcgtgtctccctccacagacaacccgaccacaagctccttatcgccctcctcctccgcagtccaccacacagccggccacagtgcgctctcttccaattttaacgaatggtacgtttaaaatcagaaacaaaacatcgaacaaaaccctatttaagagactgatcacacacgtatacacaacattactgaaagaaccctgcgaatcaaaacaacccccacacagaccccgcaatccttttttaaaaaatctgccaatagacccaggacgagtaagagaggaagcatcaaccttttaaaaatttcctttcgctttcattatttttctttttttggcaaaggcttggtacccaaggtgcggtagggggtcgagggggaggaggccacctgaccaaatgccgccaaccccgagggccagtttcttgtcgaattggtacgggctctctggggcttcggcttctttttttctttgttttcttgtaaatacagaattattagcttaaaactgtactgttgaattctgtaaatagttatatctcggttggagcgggtgggtgggattgtggcgttgtggtctttgcattgggggaggggggagggaccggatgggcggggggagggggagggggaggggtgggcggccgaaagccaactgtttgtactgaatggcaagaatgttctagtaaatgtgtaccaaaatgtgaattactttgtacgattacagtctccacgtcgacctaacccaatattattggtattaatgtgctttttttgtataaagtgcaaacatttcgtcccaaagtctaagtactttagtgcagtaaaatgttgtttcatgtcctgtcaagaattcgtatagtacgagcctggatctgcgtgtcaaactgttccatttgtttatgtaaagtgatattaaaaaagatataaactataactgtccgttacttttggcaaaagatacaaccacataatgtatataattcctagtttccatatttatccgcatgtaaagggccggtttatccatgttacagctcttcaatatttatggctagaagaactcgtatgtacactttagtttccagaactgtttggtaacctttcgtaccttattaaagattcttaaatctccgtgattgtggtaggaatttcttcttcacccaccagcaacctgctgcctcttctgccagtcttaaagggtctccagaaaagctctccagtctcccttgccttccctttctgtcactgcaggtcgtataaacgtgataaatgaatgctaccctgctggctctccgagagagtgtaattagtatttatatcaaaatttatgaaacaaattttcggccgcagtataatttaaatgacctttgcagatgtagaataacaaccataaaaataacaggaatagattgcacaggcgacatcaatattaatgtagacgaattgtcagaagctcaggggctcgctctgcaacattgcaaatgaacttgcagccgagggttccgctgccccctagattaaattccccgggctgaaactgagttgcagatttacaatatcatattttaaattgctgtcttcaattaaaccatttatgaccataactaattttcaggatgtcgatgcatgcttttccaggccttccttctttgtacaaaagtaaatgtccataaagcgtttcacttatattcttcaaacatgatgctaatttaaattaattacttcctatgatatgttattattcctatgattttgccactgttattagttctctcaaaaatacatctagggaagaggattattttaagtaatttgattatctttctatctcttttatttatttctcatttacttaagaaattcgttccattggttggcattgatacagtaaatttgtaaatgaggagacaatataaaaaatctaaattacttgtgcttaatgactgtagcagaatgccttttctctaaatcagattgtctttcttgcagtttagtttgatagatttgcaagctatgctgcttccatgaagttagctgcgctggtaggaacgcaggcttctttgtctctggttgtagcttgcatgatcgccccattaggcagacaacgtagccggagatcacaaatcaggcccttggctgtagttgctagtgtgtggaggtgcagagcaggtggcagaaactgacctcactgggcaagggtggccatggacctgattctttaatgcactctatgtgttcaggaagccacaggccatatttgactctgagaaagaaaacaagaggaaaaaccccacaaagtataacaaccccttaagatacatctattttaaagtgaaattaatttttcagtttataccattggccaattacaagataaaaatgttcaatttctttaagaatcctttgttgacttgtcttttcatctcttgctatttatatttgtcactgtttcaacaaagtcttatttgctgaggaaggactttgctgcacttactgtaccacatcaaacactggggagggtggtgtttaactttttaaaaaatgttattctgattataacaataatattggcttttttcatgaaaagagcgccaccttgcaaggtttagtgagatttatggaagttgaatacctaagcaggaattgctgctagctccaaaaatttgcgaagcaaaagctagccccaattggtttggaagtttgaaactgattaacagatttgcatttgaagtgactccagacattaggtccagacattagttaaaaatagaaagaggaataaagacatctcttctctctagaaaagataacaccacaattaataatccttcccactttcattgagatcagcttgtctgataacctgatatgagtgtgataatgataaacatgataatagtggtacttttgtaattttgctggtgcatttaagaagatagtaaatgatgagttcatcttttcttcgaacattcctattcctagatgtagtttacctcaaattgggaattataactgtctaatttttgttgtgtacctgatgccccttttgctttaataccacagtgtaacaattaaatatcacactatgacatatgatttaagtaggatattttaaagataaattttaggggtaaatgtttacttcaaaatgactccatatttcaaatatctgtttagactgtgaaggccaaataatttttaagaaaacatttgaagagtagtgtgtttgcatttgtgaataatcttactcacagcaagtaaacgtaataaaagccaacatttaagccaa

SEQ ID NO: 138189 - DNA, 1344 bp, Artificial Sequence
  derived and/or modified sequence
atgctgctggacgccggcccccagtaccccgccatcggcgtgaccaccttcggcgccagcagacaccacagcgccggcgacgtggccgagagagacgtgggcctgggcatcaaccccttcgccgacggcatgggcgccttcaagctgaaccccagcagccacgagctggccagcgccggccagaccgccttcaccagccaggcccccggctacgccgccgccgccgccctgggccaccaccaccaccccggccacgtgggcagctacagcagcgccgccttcaacagcaccagagacttcctgttcagaaacagaggcttcggcgacgccgccgccgccgccagcgcccagcacagcctgttcgccgccagcgccggcggcttcggcggcccccacggccacaccgacgccgccggccacctgctgttccccggcctgcacgagcaggccgccggccacgccagccccaacgtggtgaacggccagatgagactgggcttcagcggcgacatgtaccccagacccgagcagtacggccaggtgaccagccccagaagcgagcactacgccgccccccagctgcacggctacggccccatgaacgtgaacatggccgcccaccacggcgccggcgccttcttcagatacatgagacagcccatcaagcaggagctgatctgcaagtggatcgagcccgagcagctggccaaccccaagaagagctgcaacaagaccttcagcaccatgcacgagctggtgacccacgtgaccgtggagcacgtgggcggccccgagcagagcaaccacatctgcttctgggaggagtgccccagagagggcaagcccttcaaggccaagtacaagctggtgaaccacatcagagtgcacaccggcgagaagcccttcccctgccccttccccggctgcggcaaggtgttcgccagaagcgagaacctgaagatccacaagagaacccacaccggcgagaagcccttcaagtgcgagttcgagggctgcgacagaagattcgccaacagcagcgacagaaagaagcacatgcacgtgcacaccagcgacaagccctacctgtgcaagatgtgcgacaagagctacacccaccccagcagcctgagaaagcacatgaaggtgcacgagagcagcagccagggcagccagcccagccccgccgccagcagcggctacgagagcagcaccccccccaccatcgtgagccccagcaccgacaaccccaccaccagcagcctgagccccagcagcagcgccgtgcaccacaccgccggccacagcgccctgagcagcaacttcaacgagtggtacgtgtag

SEQ ID NO: 138190 - DNA, 1344 bp, Artificial Sequence
  derived and/or modified sequence
atgttactggacgccggtcctcagtatcctgcgattggagttaccacgtttggcgcctctcgacaccactctgccggcgatgttgccgagcgagatgtcggccttggaattaatccatttgcagacgggatgggggcctttaaattgaatccctcttcacatgagttggcctctgcgggacagaccgcattcacatctcaggctccaggctacgccgctgcggcagccctcggccatcatcaccaccctggccatgtgggttcttacagctccgctgcctttaatagtacgagggatttcctttttcgcaaccgggggttcggagacgccgcggctgcagccagcgcccagcattctctctttgcagctagcgctggtggctttggtggcccacacggccatacggatgccgccgggcacctgctcttcccaggcctgcatgagcaagcggccggacatgcatcccctaacgttgtcaatggccagatgagattggggttctctggtgacatgtatccaaggcctgaacagtatgggcaggtcacttctcccagatccgaacattatgctgcgccacagctccatggctatggcccaatgaacgttaacatggctgctcatcatggtgcaggagccttcttcagatacatgcgccagcccataaagcaggagctaatctgcaagtggatcgagccagaacagctggctaacccaaaaaagtcatgtaacaagaccttctccacaatgcacgaactggtgacccacgttaccgtggaacatgtgggcggccccgagcagagcaatcatatctgtttctgggaggaatgccctagggaaggcaagcctttcaaggccaagtataagcttgttaatcatataagggtgcacactggcgagaagccattcccctgcccttttccaggttgcggcaaagtgtttgcacgcagcgaaaatctgaaaatccacaagagaactcataccggagagaagcccttcaaatgcgaattcgaaggatgtgataggcgctttgctaattcatctgatcggaaaaagcacatgcacgttcacacgtccgacaagccgtacctgtgtaagatgtgcgacaagtcgtatacgcatccatctagtctcagaaaacacatgaaagtacatgagtcctcctcacaggggagccagccctcgcccgcggccagctccggatacgagagcagcacaccccccactatcgtgagccccagtaccgataacccaaccacctcttcgctgagcccctcttcctccgctgtacaccataccgcgggtcactccgcgctgtccagtaatttcaacgagtggtacgtgtag

SEQ ID NO: 138191 - DNA, 1344 bp, Artificial Sequence
  derived and/or modified sequence
atgctgctggatgctggcccccagtacccagccatcggcgtgaccacctttggagccagccgccaccacagcgctggagatgtggccgagagagatgtgggcctgggcatcaacccctttgctgatggcatgggcgccttcaagctgaaccccagcagccatgagctggccagcgctggccagacagccttcaccagccaggcccctggctacgccgctgctgctgccctgggccaccaccaccaccctggccacgtgggcagctacagcagcgctgccttcaacagcacccgggacttcctgttcaggaacagaggatttggagatgctgctgctgctgccagcgcccagcacagcctgtttgctgccagcgctgggggctttggaggcccccacggccacacagatgctgctggccacctgctcttccctggcctgcacgagcaggccgccggccacgccagccccaacgtggtgaatggccagatgaggctgggcttcagcggggacatgtaccccaggcctgagcagtatggccaggtgaccagccccaggtctgagcactacgccgccccccagctgcacggctacggccccatgaatgtgaacatggccgcccaccacggggccggggccttcttccgctacatgaggcagcccatcaagcaggagctgatctgcaagtggattgagcctgagcagctggccaaccccaagaagagctgcaacaagaccttcagcaccatgcatgagctggtgacccacgtgacagtggagcacgtgggcggccctgagcagagcaaccacatctgcttctgggaggagtgcccccgggagggcaagcccttcaaggccaagtacaagctggtgaaccacatccgggtgcacactggagagaagcccttcccctgccccttccctggctgcggcaaggtgtttgcccggtctgagaacctgaagatccacaagaggacccacactggagagaagcccttcaagtgtgaatttgagggctgtgacagaagatttgccaacagcagtgacaggaagaagcacatgcacgtgcacaccagtgacaagccctacctgtgcaagatgtgtgacaagagctacacccaccccagcagcctgaggaagcacatgaaggtgcatgagagcagcagccagggcagccagcccagccctgctgccagcagcggctatgagagcagcaccccacccaccatcgtgagccccagcacagacaaccccaccaccagcagcctgagccccagcagcagcgctgtgcaccacacagctggccacagcgccctgagcagcaacttcaatgagtggtacgtgtag

SEQ ID NO: 138192 - DNA, 1344 bp, Artificial Sequence
  derived and/or modified sequence
atgctgctggacgccggcccccagtaccccgccatcggcgtgaccaccttcggggcttcccgccatcatagcgcaggagacgttgccgaacgggacgtaggtttggggatcaatccctttgctgatggcatgggtgcttttaagttgaacccgtcttcacatgagctggccagcgccgggcagactgcattcacttcccaagccccaggctatgccgcggctgctgcacttgggcatcaccatcatccgggtcatgtgggcagctattctagtgcagcgttcaactccactagagatttcctttttcgcaaccggggttttggcgacgcggctgccgctgcatcagcccaacactcactcttcgccgcttcagccggcggatttggtgggccccacgggcacactgatgctgcaggacatttgctgttcccaggtctccatgagcaggctgctggtcatgcgtctccaaacgtggtcaacgggcagatgcgacttggtttctctggtgacatgtacccccggcccgagcagtatgggcaggtgacctcccccaggtccgaacactatgccgccccacagctgcatggttatgggccaatgaatgtcaacatggccgcccatcatggagccggagctttctttcgctacatgagacagccgatcaagcaggagttgatctgtaagtggattgaacccgagcaactcgcaaaccctaaaaagagctgcaataagacattcagtacaatgcacgagcttgtcacacatgtgacggttgagcatgtaggaggcccagagcagtctaaccatatctgcttttgggaggaatgtccacgcgaagggaaaccttttaaggcaaaatacaaactggtgaaccacataagagttcatacaggggagaagccattcccatgcccatttcctgggtgcggaaaggtgtttgcgcggagcgaaaacttgaagatccataaaagaacccacaccggagagaagcccttcaagtgtgagtttgagggttgcgatcgaaggttcgccaatagctctgaccgcaaaaagcacatgcacgttcacacaagcgacaagccctatttatgtaaaatgtgtgacaaatcttacacacaccccagctccttgcggaagcatatgaaggtccacgaatccagcagtcagggttcacaaccttcccccgcagcatctagtgggtacgagagctcaacgcccccaacaatagtgagtccgtcaaccgacaatcctacaacctccagtttatcgccttcatcctctgccgtgcaccacaccgcagggcacagtgccttgagttctaattttaatgagtggtacgtctag

SEQ ID NO: 138193 - DNA, 1344 bp, Artificial Sequence
  derived and/or modified sequence
atgcttttggacgcagggcctcagtatcctgcaataggagtcacaacatttggggcttcacgacaccatagtgccggtgacgtggccgaaagggacgtcggactgggcattaaccctttcgccgacgggatgggcgcatttaaactgaacccctcgagccatgaactagcatccgccggacagactgcatttacttcccaagcccctggttatgcagctgccgcagccttgggccaccaccaccatcctgggcatgtgggctcttactctagcgcagcctttaacagcactcgggattttctatttcgaaaccgaggattcggagacgccgcagccgcagcatctgctcaacactctctgttcgctgcctcagctggcggttttggaggtccccacgggcacacggatgcagcgggacacttgctatttcccggactgcacgagcaggccgcagggcacgcctctcctaacgtggtaaacgggcagatgaggttgggcttctcgggagacatgtacccgaggcccgagcagtatgggcaagtcacgtcccctcggtctgaacactacgcagctccacaacttcacgggtacggcccaatgaacgtgaacatggccgctcatcacggagctggggcatttttccgttacatgcggcagccaataaaacaggagctgatatgcaagtggattgagccggagcaactggccaaccctaaaaagtcatgcaataagacattttccaccatgcatgaactagtaacacatgtgacagtagaacatgtaggtgggccagagcagtcaaaccacatatgcttttgggaggagtgtccccgagagggtaaacccttcaaggcaaaatataagctagtcaaccacattcgcgtacacacaggcgagaaacctttcccgtgcccattccctggttgcggaaaggtctttgcccgatccgaaaatctgaagatacacaaaaggacacacaccggcgaaaaacctttcaagtgcgagttcgaaggatgtgaccggcgattcgcaaacagctctgatcgtaaaaagcacatgcacgtgcatacaagtgacaagccctacctgtgtaagatgtgtgacaagtcatatacccaccctagctccctgaggaagcatatgaaggtccatgagtcaagcagtcagggaagtcagccatctccagccgcaagtagcggctatgagtcctctacaccacccactattgtttctcccagcacagataacccaaccacttcttcgttaagtccttcgtcatccgctgttcatcacaccgcaggccatagcgcactcagctccaacttcaacgaatggtatgtgtag

SEQ ID NO: 138194 - DNA, 5241 bp, Artificial Sequence
  derived and/or modified sequence
atgattgctgctatcagtctcgcgctcaccgcccggctgaggaggtgaaagtttctccccaggaagataaaccgcaaaagacaatattgtgcatgatttgcgccttttctttggctttttctttctttcttcacccccccacccacttttttttttttttttttcaaaaagcagagagggaaaaacggagagtgaaggagcgaggaggcgagcgtgagagaaaggagagagagagaaaagaaagggcgaggggctagtggagaagtaaggaggggcgcgctgcgcgaggcggagagagggcgaagcagtcgcggcactggcgctcacattcctctatgctacaaatccaggaggaagtttttttttagggggctgagatgctccatgcctttccccgggcagccttgacgcgcggccctctcggcagagactgagcggcgagaaagtgcgagccgggccggcagaatctgcctggcgggcgctggagcctgcgttactcgcggcccgcagccgtccggctactttgcgtttggcccggccagcgcccgggcgcgccgcgccattgcctgcaggctaggacttcgcgaggtgggtcgactccccctccctcctcctcttcttcctcctcttcctcctcctcttgttcctcctcctcctcccgattttccctcctcggctggcgagggtggggggggcgggggaggccggggctcgccccgagcagccacgatgctcctggacgccggcccccagtacccagcgatcggcgtgaccacctttggcgcgtcccgccaccactccgcgggcgacgtggccgaacgagacgtgggcctgggcatcaacccgttcgccgacggcatgggcgccttcaagctcaaccccagttcgcacgagctggcttcggccggccagacggccttcacgtcgcaggcgccaggctacgcggctgctgcggccctgggccatcaccatcacccgggccacgtcggctcctattccagcgcagccttcaactccacgcgggactttctgttccgcaaccggggttttggcgacgcggcggcggcagccagcgcacagcacagcctctttgctgcatcggccgggggcttcgggggcccacacggccacacggacgccgcgggccacctcctcttccccgggcttcacgagcaggctgccggccacgcgtcgcctaacgtggtcaacgggcagatgaggctcggcttctcgggggacatgtacccgcgaccggagcagtacggccaggtgaccagcccgcgttcggagcactatgctgcgccgcagctgcacggctacgggcccatgaacgtgaacatggccgcgcatcacggcgccggcgccttcttccgctacatgcgccaacccatcaagcaagagctcatctgcaagtggatcgagcccgagcagctggccaaccccaaaaagtcgtgcaacaaaactttcagcaccatgcacgagctagttacgcacgtcaccgtggagcacgtaggtggcccggagcagagtaatcacatctgcttctgggaggagtgtccgcgcgagggcaagcccttcaaagccaaatacaaactggttaaccacatccgcgtgcacacgggcgagaagccctttccctgccccttccctggctgtggcaaggtcttcgcgcgctccgagaatttaaagatccacaaaaggacgcacacaggggagaagcccttcaagtgcgagtttgagggctgtgaccggcgcttcgctaacagcagcgaccgcaagaagcacatgcacgtgcacacgagcgacaagccctatctttgcaagatgtgcgacaagtcctacacgcatcccagttcgctgcgcaaacacatgaaggtccacgaatcctcctcgcagggctcgcagccttcgccggccgccagctctggctacgaatcctccacgcctcccaccatcgtgtctccctccacagacaacccgaccacaagctccttatcgccctcctcctccgcagtccaccacacagccggccacagtgcgctctcttccaattttaacgaatggtacgtttaaaatcagaaacaaaacatcgaacaaaaccctatttaagagactgatcacacacgtatacacaacattactgaaagaaccctgcgaatcaaaacaacccccacacagaccccgcaatccttttttaaaaaatctgccaatagacccaggacgagtaagagaggaagcatcaaccttttaaaaatttcctttcgctttcattatttttctttttttggcaaaggcttggtacccaaggtgcggtagggggtcgagggggaggaggccacctgaccaaatgccgccaaccccgagggccagtttcttgtcgaattggtacgggctctctggggcttcggcttctttttttctttgttttcttgtaaatacagaattattagcttaaaactgtactgttgaattctgtaaatagttatatctcggttggagcgggtgggtgggattgtggcgttgtggtctttgcattgggggaggggggagggaccggatgggcggggggagggggagggggaggggtgggcggccgaaagccaactgtttgtactgaatggcaagaatgttctagtaaatgtgtaccaaaatgtgaattactttgtacgattacagtctccacgtcgacctaacccaatattattggtattaatgtgctttttttgtataaagtgcaaacatttcgtcccaaagtctaagtactttagtgcagtaaaatgttgtttcatgtcctgtcaagaattcgtatagtacgagcctggatctgcgtgtcaaactgttccatttgtttatgtaaagtgatattaaaaaagatataaactataactgtccgttacttttggcaaaagatacaaccacataatgtatataattcctagtttccatatttatccgcatgtaaagggccggtttatccatgttacagctcttcaatatttatggctagaagaactcgtatgtacactttagtttccagaactgtttggtaacctttcgtaccttattaaagattcttaaatctccgtgattgtggtaggaatttcttcttcacccaccagcaacctgctgcctcttctgccagtcttaaagggtctccagaaaagctctccagtctcccttgccttccctttctgtcactgcaggtcgtataaacgtgataaatgaatgctaccctgctggctctccgagagagtgtaattagtatttatatcaaaatttatgaaacaaattttcggccgcagtataatttaaatgacctttgcagatgtagaataacaaccataaaaataacaggaatagattgcacaggcgacatcaatattaatgtagacgaattgtcagaagctcaggggctcgctctgcaacattgcaaatgaacttgcagccgagggttccgctgccccctagattaaattccccgggctgaaactgagttgcagatttacaatatcatattttaaattgctgtcttcaattaaaccatttatgaccataactaattttcaggatgtcgatgcatgcttttccaggccttccttctttgtacaaaagtaaatgtccataaagcgtttcacttatattcttcaaacatgatgctaatttaaattaattacttcctatgatatgttattattcctatgattttgccactgttattagttctctcaaaaatacatctagggaagaggattattttaagtaatttgattatctttctatctcttttatttatttctcatttacttaagaaattcgttccattggttggcattgatacagtaaatttgtaaatgaggagacaatataaaaaatctaaattacttgtgcttaatgactgtagcagaatgccttttctctaaatcagattgtctttcttgcagtttagtttgatagatttgcaagctatgctgcttccatgaagttagctgcgctggtaggaacgcaggcttctttgtctctggttgtagcttgcatgatcgccccattaggcagacaacgtagccggagatcacaaatcaggcccttggctgtagttgctagtgtgtggaggtgcagagcaggtggcagaaactgacctcactgggcaagggtggccatggacctgattctttaatgcactctatgtgttcaggaagccacaggccatatttgactctgagaaagaaaacaagaggaaaaaccccacaaagtataacaaccccttaagatacatctattttaaagtgaaattaatttttcagtttataccattggccaattacaagataaaaatgttcaatttctttaagaatcctttgttgacttgtcttttcatctcttgctatttatatttgtcactgtttcaacaaagtcttatttgctgaggaaggactttgctgcacttactgtaccacatcaaacactggggagggtggtgtttaactttttaaaaaatgttattctgattataacaataatattggcttttttcatgaaaagagcgccaccttgcaaggtttagtgagatttatggaagttgaatacctaagcaggaattgctgctagctccaaaaatttgcgaagcaaaagctagccccaattggtttggaagtttgaaactgattaacagatttgcatttgaagtgactccagacattaggtccagacattagttaaaaatagaaagaggaataaagacatctcttctctctagaaaagataacaccacaattaataatccttcccactttcattgagatcagcttgtctgataacctgatatgagtgtgataatgataaacatgataatagtggtacttttgtaattttgctggtgcatttaagaagatagtaaatgatgagttcatcttttcttcgaacattcctattcctagatgtagtttacctcaaattgggaattataactgtctaatttttgttgtgtacctgatgccccttttgctttaataccacagtgtaacaattaaatatcacactatgacatatgatttaagtaggatattttaaagataaattttaggggtaaatgtttacttcaaaatgactccatatttcaaatatctgtttagactgtgaaggccaaataatttttaagaaaacatttgaagagtagtgtgtttgcatttgtgaataatcttactcacagcaagtaaacgtaataaaagccaacatttaagccaa

SEQ ID NO: 138195 - protein, 467 aa, Artificial Sequence
  derived and/or modified sequence
MTMLLDGGPQFPGLGVGSFGAPRHHEMPNREPAGMGLNPFGDSTHAAAAAAAAAAFKLSPAAAHDLSSGQSSAFTPQGSGYANALGHHHHHHHHHHHTSQVPSYGGAASAAFNSTREFLFRQRSSGLSEAASGGGQHGLFAGSASSLHAPAGIPEPPSYLLFPGLHEQGAGHPSPTGHVDNNQVHLGLRGELFGRADPYRPVASPRTDPYAAGAQFPNYSPMNMNMGVNVAAHHGPGAFFRYMRQPIKQELSCKWIDEAQLSRPKKSCDRTFSTMHELVTHVTMEHVGGPEQNNHVCYWEECPREGKSFKAKYKLVNHIRVHTGEKPFPCPFPGCGKIFARSENLKIHKRTHTGEKPFKCEFEGCDRRFANSSDRKKHMHVHTSDKPYICKVCDKSYTHPSSLRKHMKVHESQGSDSSPAASSGYESSTPPAIASANSKDTTKTPSAVQTSTSHNPGLPPNFNEWYV

SEQ ID NO: 138196 - protein, 457 aa, Artificial Sequence
  derived and/or modified sequence
MTMLLDGGPQFPGLGVGSFGAPRHHEMPNREPAGMGLNPFGDSTHAAAAAAAAAAFKLSPAAAHDLSSGQSSAFTPQGSGYANALGHHHHHHHHHHHTSQVPSYGGAASAAFNSTREFLFRQRSSGLSEAASGGGQHGLFAGSASSLHAPAGIPEPPSYLLFPGLHEQGAGHPSPTGHVDNNQVHLGLRGELFGRADPYRPVASPRTDPYAAGAQFPNYSPMNMNMGVNVAAHHGPGAFFRYMRQPIKQELSCKWIDEAQLSRPKKSCDRTFSTMHELVTHVTMEHVGGPEQNNHVCYWEECPREGKSFKAKYKLVNHIRVHTGEKPFPCPFPGCGKIFARSENLKIHKRTHTGEKPFKCEFEGCDRRFANSSDRKKHMHVHTSDKPYICKVCDKSYTHPSSLRKHMKCCPAWYPGQSLIPDEELDTDVGMQQPALHNTTYPKCRVNAEPTVQEMIY

SEQ ID NO: 138197 - DNA, 3939 bp, Artificial Sequence
  derived and/or modified sequence
gcggcgagtaacgagcctgcctactgcccgctgcccgcctgcccggccgctagccggctccgccacttggcgcagcccagcccggaggccggtacccagggagcctcctggccccgcggttctgtgcactcggggagaggaggggtgcccgggacaggattggcaaactccgccctccacttactattttgcttatttttctttgtgcgcgcctgttagtttgttaaaccagatctagtccgagtcttttctcctcccttctcctccctcctcctccccccgccaacaccccctccctgctctttcttcccctcctccctcctatccctctgcaggagactcttgcagtgacggaaagttgcagcccctggtagcgccttgggggtctccccgcagtgtccaaccgccgccacccctttccgactacggcacttcggagatctcctccttcgccggtaccctctctcacttcggccggatcgcctgtgcccagaacgtcccacccatgacgatgctcctggacggaggcccgcagttccctgggctgggagtgggcagcttcggcgcgccgcgccaccacgagatgcccaaccgtgagccggcaggcatggggctgaatcccttcggggactcaacccacgccgccgccgccgccgccgccgccgctgccttcaagctgagccctgccgcggcgcacgatctatcttcaggccagagctcggctttcacgccgcagggttcgggctacgccaacgccctgggccaccatcaccaccaccatcaccatcatcaccacaccagccaggtgcccagctacggtggcgctgcctctgccgccttcaactcaacgcgcgagtttctgttccgccagcgcagctccgggctcagtgaggcggcctcgggtggcgggcagcacgggctcttcgccggctcggcgagcagcctgcatgctccagctggcatccccgagccccctagctacttgctgtttcccgggctgcatgagcagggcgctgggcacccgtcgcccacagggcacgtggacaacaaccaggtccacctggggctgcgtggggagctgttcggccgtgctgacccataccgcccagtggccagcccgcgcacggacccctacgcggccggcgctcagtttcctaactacagccccatgaacatgaacatgggagtgaacgtggcggcccaccacgggcccggcgccttcttccgttatatgcggcagcctatcaagcaggagctgtcgtgcaagtggatcgacgaggctcagctgagccggcccaagaagagctgcgaccggaccttcagcaccatgcatgagctggtgacacatgtcaccatggagcatgtggggggcccggagcagaacaaccacgtctgctactgggaggagtgcccccgggagggcaagtctttcaaggcgaagtacaaactggtcaaccacatccgagtgcacacgggcgagaagcccttcccatgccccttcccgggctgcgggaagatctttgcccgttctgagaacctcaagatccacaagaggacccacacaggtgagaaacctttcaaatgtgaatttgaaggctgtgacagacgctttgccaacagcagcgaccgtaagaagcacatgcatgtgcatacctcggacaagccctatatctgcaaagtgtgcgacaagtcctacacgcacccgagctccctgcgcaaacacatgaaggttcatgaatctcaagggtcagattcctcccctgctgccagttcaggctatgaatcttccactccacccgctatagcttctgcaaacagtaaagataccactaaaaccccttctgcagttcaaactagcaccagccacaaccctggacttcctcctaattttaacgaatggtacgtctgaggacaaacacaaaccctgttaattatagaatggaccaaatacatttttaaaagaaaactgagaccaatcagatggaaatggagttttaaggcaagaggccatatatagggctacatcttgttaattgcaattgtccaggaaggttttgggcaagatccaaaagtagccatgcccttttctcaggatagaaaatatgttttggcatttgaagcattttttacaaaatctttacactactttttcttccccttcctcttgctctctgcacaccccattcttaaactcctccaattcattttaacacttgtcctgtttcttgagaggaagttatagaaggcttgttggtggtggtgatgttaaactgatggaaattctttttcgccttagtggtgattgtttaaactctcacagtcttaaaccgtgccaaagtcctgttatgtcttgaacttttcctcaaagcattacacttgtgaatgtatttttgtctaatagggtcgaaactgttgttcagtattttttcaggctgaggatgtgatgttactctacacattgtgacgtttagtatacagttgccttttgtaataactttttttttgtaaatacatatccattgatgccatatttatcgtttgtaatttaattattgctacaagtgccgggaactgaacaatatttatggataaatgttttctaacaaattctgtacagcttttgattataactgctttagcattaaaaattgttttgaaagaagaacacaatttacaattttggaaccactgactcctttctcttgttttgtaacagccttcttctacaaagaggagatgtgagcaaattaaatcttgtttgttggtatttataactcactcagatcccttttttaattgttaaattatttttctattacagtataaattccttacagtgtcagtttccatctgggaagactctcctttctttatctctatctcagatggttgtttaactgcgagtttaaatgtgtttgtcctggattttcggcatgcaaatcaaatattactgatcaattcagttagtggccatgacatctcaatcttgtacttcaaagactgagaagctggatttaatcatccctgccctacatatataaacataaggtaacctactgaattttatgtcccttagttctttattaccttacataaaaatgaaaattgcggcaggatgcatgtctgtctgttctatctagagatcacccatatacctatatatgtttgtatctatgacttatctaatctgcctatcaatctatctagtagctatctatatattttcaaaagatagcttatgtctaaaacagtggtgatgagtaaggccagttgagcattgcttacttatggttaaagtgcttcttaaaagaaccatagtccatttacaattttggaaggcaaaggctgatttgtttgctgtatatagttcaattcataattatcgcaattatccataacatttatatagcggtgtaataactgcagcagttctgaaatgatgctatgggaaaaaaattgcaaaatatgtatttttaaagttcatgatttgtaggcaaagatgttaagagcattgtttccattaaaatcaataacaatgaaaaacggttgtttgctttgtgataaaatgttaacaatccatttaatcttcagtgaagcaactcatttggacaaacagttcttttacagtggttatatggaaaagaaattgattgctattttggggggctggagtgggtagagtattgagaccttttttattagggtgctgtttgttattgagagcccaatctctgcatgaataacagaaaggtggacataaggaattgtaaagtatttagaatgtattgaataggcttaagtacctcctttaaggggcaatgctctaggtttttggtggcagtcaatttggtattatatatgatcattttcaattctagaattttgtttattgttctttttgaagaaataaagtcttggcacatcttatttatgttataa

SEQ ID NO: 138198 - DNA, 1404 bp, Artificial Sequence
  derived and/or modified sequence
atgaccatgctgctggacggcggcccccagttccccggcctgggcgtgggcagcttcggcgcccccagacaccacgagatgcccaacagagagcccgccggcatgggcctgaaccccttcggcgacagcacccacgccgccgccgccgccgccgccgccgccgccttcaagctgagccccgccgccgcccacgacctgagcagcggccagagcagcgccttcaccccccagggcagcggctacgccaacgccctgggccaccaccaccaccaccaccaccaccaccaccacaccagccaggtgcccagctacggcggcgccgccagcgccgccttcaacagcaccagagagttcctgttcagacagagaagcagcggcctgagcgaggccgccagcggcggcggccagcacggcctgttcgccggcagcgccagcagcctgcacgcccccgccggcatccccgagccccccagctacctgctgttccccggcctgcacgagcagggcgccggccaccccagccccaccggccacgtggacaacaaccaggtgcacctgggcctgagaggcgagctgttcggcagagccgacccctacagacccgtggccagccccagaaccgacccctacgccgccggcgcccagttccccaactacagccccatgaacatgaacatgggcgtgaacgtggccgcccaccacggccccggcgccttcttcagatacatgagacagcccatcaagcaggagctgagctgcaagtggatcgacgaggcccagctgagcagacccaagaagagctgcgacagaaccttcagcaccatgcacgagctggtgacccacgtgaccatggagcacgtgggcggccccgagcagaacaaccacgtgtgctactgggaggagtgccccagagagggcaagagcttcaaggccaagtacaagctggtgaaccacatcagagtgcacaccggcgagaagcccttcccctgccccttccccggctgcggcaagatcttcgccagaagcgagaacctgaagatccacaagagaacccacaccggcgagaagcccttcaagtgcgagttcgagggctgcgacagaagattcgccaacagcagcgacagaaagaagcacatgcacgtgcacaccagcgacaagccctacatctgcaaggtgtgcgacaagagctacacccaccccagcagcctgagaaagcacatgaaggtgcacgagagccagggcagcgacagcagccccgccgccagcagcggctacgagagcagcaccccccccgccatcgccagcgccaacagcaaggacaccaccaagacccccagcgccgtgcagaccagcaccagccacaaccccggcctgccccccaacttcaacgagtggtacgtgtag

SEQ ID NO: 138199 - DNA, 1374 bp, Artificial Sequence
  derived and/or modified sequence
atgaccatgctgctggacggcggcccccagttccccggcctgggcgtgggcagcttcggcgcccccagacaccacgagatgcccaacagagagcccgccggcatgggcctgaaccccttcggcgacagcacccacgccgccgccgccgccgccgccgccgccgccttcaagctgagccccgccgccgcccacgacctgagcagcggccagagcagcgccttcaccccccagggcagcggctacgccaacgccctgggccaccaccaccaccaccaccaccaccaccaccacaccagccaggtgcccagctacggcggcgccgccagcgccgccttcaacagcaccagagagttcctgttcagacagagaagcagcggcctgagcgaggccgccagcggcggcggccagcacggcctgttcgccggcagcgccagcagcctgcacgcccccgccggcatccccgagccccccagctacctgctgttccccggcctgcacgagcagggcgccggccaccccagccccaccggccacgtggacaacaaccaggtgcacctgggcctgagaggcgagctgttcggcagagccgacccctacagacccgtggccagccccagaaccgacccctacgccgccggcgcccagttccccaactacagccccatgaacatgaacatgggcgtgaacgtggccgcccaccacggccccggcgccttcttcagatacatgagacagcccatcaagcaggagctgagctgcaagtggatcgacgaggcccagctgagcagacccaagaagagctgcgacagaaccttcagcaccatgcacgagctggtgacccacgtgaccatggagcacgtgggcggccccgagcagaacaaccacgtgtgctactgggaggagtgccccagagagggcaagagcttcaaggccaagtacaagctggtgaaccacatcagagtgcacaccggcgagaagcccttcccctgccccttccccggctgcggcaagatcttcgccagaagcgagaacctgaagatccacaagagaacccacaccggcgagaagcccttcaagtgcgagttcgagggctgcgacagaagattcgccaacagcagcgacagaaagaagcacatgcacgtgcacaccagcgacaagccctacatctgcaaggtgtgcgacaagagctacacccaccccagcagcctgagaaagcacatgaagtgctgccccgcctggtaccccggccagagcctgatccccgacgaggagctggacaccgacgtgggcatgcagcagcccgccctgcacaacaccacctaccccaagtgcagagtgaacgccgagcccaccgtgcaggagatgatctactag

SEQ ID NO: 138200 - DNA, 1404 bp, Artificial Sequence
  derived and/or modified sequence
atgaccatgctcttggacggtgggccgcagtttcctggcctgggagtgggcagttttggggcaccaaggcatcatgagatgcctaatcgagaaccggcaggcatgggtctgaaccctttcggagatagcacccacgcagccgctgcagcggccgccgcagcggcctttaaactgtctccggccgccgcccacgatctgtcttccggacagagtagtgccttcacaccccagggatcgggttacgcgaatgccctcgggcaccatcatcatcaccatcaccaccaccatcacacatcccaggttccatcatacggcggggccgcatccgctgccttcaattctacccgggaatttttattcagacagcggtcttctggactgtccgaagctgccagcgggggaggccagcacggattattcgccggcagtgcaagtagcctgcacgcccctgcaggcattccagaacccccttcctatctcctttttcccggtctgcatgaacagggagcgggacacccaagtcctaccggccacgtggataacaatcaggttcacctgggcctgagaggggagctattcggccgagccgatccatacaggcccgtcgccagtccacggaccgacccttatgccgcaggagcccagtttccgaactattcccccatgaacatgaacatgggcgtaaatgtggcagcccatcatggacccggagcattctttcggtacatgcgtcaaccaattaagcaagaactttcctgcaagtggatcgacgaagcccagctgtcgcgccccaaaaaaagctgcgatagaaccttttcaacaatgcatgagctcgtgacacacgtgaccatggaacacgtgggaggacccgagcaaaataaccacgtttgttattgggaggaatgcccgcgcgagggcaagtcgtttaaagcgaaatacaagctggtgaaccatatccgagtgcacacaggagagaaaccattcccttgcccgttcccaggatgcgggaaaatctttgcccggtcagaaaatcttaaaattcacaaaagaacacatacgggcgagaaaccctttaagtgtgaatttgaaggctgtgaccggcgttttgccaactcctctgaccgcaaaaaacatatgcacgttcacacttctgataaaccttacatctgtaaggtgtgtgacaagtcatacacccatccctcctctctcaggaagcatatgaaggtccacgagtcacagggctctgactcaagccccgcagcttcatctgggtacgaatcctccacacctcccgcaatagcatccgctaactcaaaggatacaacaaagactcctagtgctgtccagacttctactagccacaatcccggtctcccacctaacttcaatgaatggtacgtctag

SEQ ID NO: 138201 - DNA, 1374 bp, Artificial Sequence
  derived and/or modified sequence
atgaccatgttactcgacggcgggcctcagttccccggactgggtgtgggttcatttggcgcaccacgacaccacgaaatgcccaaccgggaaccagccgggatgggattgaatccgtttggcgactctactcatgcggcagcagcagcagctgctgctgcagcttttaaactgagtccggccgccgctcacgatctgagtagtggccagtccagtgcgttcacaccccaagggtccggctacgccaatgcactgggtcatcaccatcaccaccaccaccatcaccaccacacatcacaagtgccgagctatggtggcgccgcttccgcagcctttaatagcactagggagttccttttcagacagagatcttccggattgagcgaggcagccagcggcggcggccaacacggcttattcgccgggtcagcatcctcgctgcatgccccagccggtattccggagccacctagttacttactgttcccgggcctacacgagcagggggctgggcaccccagccccacagggcatgtagataacaatcaagtgcacctgggtctaaggggggaactatttgggagagcggacccatatagacccgtagctagcccgaggaccgatccctacgcagccggtgcccaatttccgaattactctccaatgaacatgaacatgggggtgaatgtcgcggcccaccacggacctggagctttctttaggtatatgcggcagcctataaaacaggagctgtcatgcaagtggattgatgaagctcagctgagtagaccaaaaaagtcctgcgataggaccttcagtaccatgcatgagctagtgactcatgtcaccatggagcacgtgggtggcccagaacaaaacaaccatgtgtgttactgggaggagtgtccccgcgagggcaagtcctttaaagccaaatataaactcgtaaatcacatccgggtccatactggggagaaaccctttccatgtccctttcctggctgcggtaagatatttgctagaagcgagaacctcaagatccataagcgcactcatacaggcgagaagcctttcaaatgcgagtttgaggggtgcgaccgcaggttcgcgaacagctccgatcggaaaaaacacatgcacgtgcacacatcagataagccttacatttgtaaagtgtgcgacaaaagctacacacatccaagcagcttgcgcaaacacatgaaatgttgtcctgcatggtatcctggccagagcctaattcctgatgaggaactcgacacagatgttggcatgcagcaacccgctctgcacaacactacttatccaaaatgtcgcgtcaatgccgaacctaccgtgcaagaaatgatatattag

SEQ ID NO: 138202 - DNA, 1404 bp, Artificial Sequence
  derived and/or modified sequence
atgaccatgctgctggatggcggcccccagtttcctggcctgggcgtgggcagctttggagcccccaggcaccacgagatgcccaaccgggagcctgctggcatgggcctgaacccctttggagacagcacccacgccgctgctgctgctgctgctgctgctgccttcaagctgagccctgctgctgcccatgacctgagcagcggccagagcagcgccttcaccccccagggcagcggctacgccaatgccctgggccaccaccaccaccaccaccaccaccaccaccacaccagccaggtgcccagctatggaggagctgccagcgctgccttcaacagcacccgggagttcctgttccggcagaggagcagcggcctgtctgaggccgccagcggcggcggccagcacggcctgtttgctggcagcgccagcagcctgcacgccccagctggcatccctgagccccccagctacctgctcttccctggcctgcacgagcagggcgccggccaccccagccccaccggccacgtggacaacaaccaggtgcacctgggcctgcggggggagctgtttggccgggctgacccctacagacctgtggccagccccaggacagacccctatgctgctggggcccagttccccaactacagccccatgaacatgaacatgggcgtgaatgtggccgcccaccacggccctggggccttcttccgctacatgaggcagcccatcaagcaggagctgagctgcaagtggattgatgaggcccagctgagccggcccaagaagagctgtgacaggaccttcagcaccatgcatgagctggtgacccacgtgaccatggagcacgtgggcggccctgagcagaacaaccacgtgtgctactgggaggagtgcccccgggagggcaagagcttcaaggccaagtacaagctggtgaaccacatccgggtgcacactggagagaagcccttcccctgccccttccctggctgcggcaagatctttgcccggtctgagaacctgaagatccacaagaggacccacactggagagaagcccttcaagtgtgaatttgagggctgtgacagaagatttgccaacagcagtgacaggaagaagcacatgcacgtgcacaccagtgacaagccctacatctgcaaggtgtgtgacaagagctacacccaccccagcagcctgaggaagcacatgaaggtgcatgagagccagggcagtgacagcagccctgctgccagcagcggctatgagagcagcaccccaccagccatcgccagcgccaacagcaaggacaccaccaagacccccagcgctgtgcagaccagcaccagccacaaccctggcctgccccccaacttcaatgagtggtacgtgtag

SEQ ID NO: 138203 - DNA, 1374 bp, Artificial Sequence
  derived and/or modified sequence
atgaccatgctgctggatggcggcccccagtttcctggcctgggcgtgggcagctttggagcccccaggcaccacgagatgcccaaccgggagcctgctggcatgggcctgaacccctttggagacagcacccacgccgctgctgctgctgctgctgctgctgccttcaagctgagccctgctgctgcccatgacctgagcagcggccagagcagcgccttcaccccccagggcagcggctacgccaatgccctgggccaccaccaccaccaccaccaccaccaccaccacaccagccaggtgcccagctatggaggagctgccagcgctgccttcaacagcacccgggagttcctgttccggcagaggagcagcggcctgtctgaggccgccagcggcggcggccagcacggcctgtttgctggcagcgccagcagcctgcacgccccagctggcatccctgagccccccagctacctgctcttccctggcctgcacgagcagggcgccggccaccccagccccaccggccacgtggacaacaaccaggtgcacctgggcctgcggggggagctgtttggccgggctgacccctacagacctgtggccagccccaggacagacccctatgctgctggggcccagttccccaactacagccccatgaacatgaacatgggcgtgaatgtggccgcccaccacggccctggggccttcttccgctacatgaggcagcccatcaagcaggagctgagctgcaagtggattgatgaggcccagctgagccggcccaagaagagctgtgacaggaccttcagcaccatgcatgagctggtgacccacgtgaccatggagcacgtgggcggccctgagcagaacaaccacgtgtgctactgggaggagtgcccccgggagggcaagagcttcaaggccaagtacaagctggtgaaccacatccgggtgcacactggagagaagcccttcccctgccccttccctggctgcggcaagatctttgcccggtctgagaacctgaagatccacaagaggacccacactggagagaagcccttcaagtgtgaatttgagggctgtgacagaagatttgccaacagcagtgacaggaagaagcacatgcacgtgcacaccagtgacaagccctacatctgcaaggtgtgtgacaagagctacacccaccccagcagcctgaggaagcacatgaagtgctgcccagcctggtacccaggccagagcctcatcccagatgaggagctggacacagatgtgggcatgcagcagcctgccctgcacaacaccacctaccccaagtgccgggtgaatgctgagcccaccgtgcaggagatgatctactag

SEQ ID NO: 138204 - DNA, 1404 bp, Artificial Sequence
  derived and/or modified sequence
atgaccatgctgctggacggcggcccccagttccccggcctgggcgtcggaagtttcggcgcgccgcgacaccacgagatgccaaacagagagcctgctggaatgggactcaaccctttcggagactcaacacatgctgccgctgccgctgccgctgccgccgccttcaaattgagcccagctgcagctcacgacctgtcctctggccagtctagcgctttcacccctcagggctcgggctatgccaacgcactgggccaccaccaccatcaccaccaccaccatcaccatacatctcaggttcctagttacggcggggccgcatccgctgccttcaacagcactcgcgaattcctgttcagacagcggtccagcggactgtcggaggccgcctcaggaggggggcagcacggactatttgcaggcagcgcttctagcctgcacgcgcctgccggtattcctgaacctccatcctatctgttgtttcctggtctccatgagcaaggggcgggacatccttcaccgactgggcacgtcgacaataaccaggttcacctcggcttgcgaggcgagctgttcggtcgagccgacccctacaggccagttgcctctccgcggaccgacccatatgcggctggggcgcagttccctaactactcccctatgaatatgaatatgggggtgaacgttgcggcccaccacgggccaggggcattttttcgctacatgaggcagccaattaagcaggaactctcctgcaagtggatagacgaagcacagctctccaggccaaagaagtcctgcgacagaaccttctcaactatgcatgaactggtgacacatgtgacaatggaacacgtcggtggaccagagcagaataaccatgtgtgctactgggaggagtgccctcgcgaaggtaagtcattcaaggctaagtataaactggtaaaccatatccgcgtccacaccggggagaagcctttcccttgtccctttcctggatgcgggaagattttcgcccgcagcgagaacctcaaaattcataagcggacccacacgggtgagaaaccttttaaatgtgagttcgaagggtgcgacagacgctttgccaactctagcgataggaaaaaacacatgcatgtgcatacaagtgacaagccatacatttgcaaggtctgtgacaagagctatacacatccttctagcttgaggaaacatatgaaagtccatgaatctcaaggctctgattcctccccagccgcaagttctggatacgagtcatcaactcctcccgccatagcatccgcaaactcaaaagacacaacgaaaacaccatcagcagttcagaccagcacaagccacaacccgggcctcccaccgaattttaatgagtggtacgtatag

SEQ ID NO: 138205 - DNA, 1374 bp, Artificial Sequence
  derived and/or modified sequence
atgaccatgctgctggacggcggcccccagttccccggcctgggcgtaggatcattcggagctccgcgacaccacgaaatgcccaacagagagccagccggtatgggcttgaacccattcggggatagtacccatgccgcagccgctgcggctgcagctgctgctttcaagctgtcgcccgctgccgcccacgatttgtcctcggggcagtcctctgcttttacaccccagggatctggttacgctaacgcactgggtcatcatcaccaccatcatcaccaccaccatcatacatcccaggtgccctcatacggcggagcagctagcgcagccttcaactccacgagagagtttttatttagacagcgctcaagcggtctgtcggaggccgccagcgggggtggacagcacggcctcttcgctggaagcgcgtcttccttgcacgcccccgcaggtattcctgagccgccttcgtacctcctattccccggtctgcacgaacagggagccgggcacccttctccgactggtcacgtagataacaaccaagtgcatttaggcctgaggggggaactgtttggccgtgccgacccctatagacctgtagcctcccctcgcactgacccatacgctgcaggggcgcagttccccaactatagccccatgaacatgaatatgggcgtgaatgtcgccgcacaccacggaccaggcgcattttttaggtacatgaggcagccaatcaagcaagagctttcctgtaagtggatcgatgaggcccagctcagcagaccaaagaagagttgtgatcgaacatttagcactatgcatgagctcgttacacacgttacaatggaacacgtgggtggtccagagcaaaataaccacgtctgttattgggaagagtgtccaagagagggcaagtcattcaaggctaaatataagctggtaaatcacatcagagtgcatactggagagaagccctttccatgcccgttcccagggtgcgggaaaatattcgcaagaagtgagaatttgaagatccataaaaggactcacacaggagaaaaaccttttaaatgcgagtttgagggatgtgacagaaggttcgccaattctagcgacagaaagaaacacatgcacgtgcacactagcgacaaaccctacatatgtaaagtctgcgataaatcatacacccacccatcgtcacttaggaagcatatgaaatgctgccccgcttggtaccctggtcaatctctcatcccggatgaggaactcgacaccgacgtcggaatgcagcagccagctttacataacacgacttaccctaaatgtcgagtcaatgctgagcccacagttcaggaaatgatttattag

SEQ ID NO: 138206 - DNA, 1404 bp, Artificial Sequence
  derived and/or modified sequence
atgaccatgctactagatgggggtccccagtttccaggcctcggcgtgggctcctttggcgcaccacgccatcatgagatgccaaacagggagccagctggcatgggactgaacccttttggtgatagcactcatgcagccgctgcagccgctgccgctgcagctttcaaattatccccggctgcggcacacgatttgtcctctgggcagagcagcgcttttactccacagggctctggctatgccaatgctttgggccaccaccatcaccaccaccatcaccaccatcacacctcacaggtgccctcctatgggggtgcagcgtccgccgcatttaatagcacacgcgagtttcttttcagacagcgatcttcggggttatctgaggcagcatcaggtggaggtcagcatggactcttcgctgggagcgccagttccctgcatgcaccagccggtattcccgagccaccaagctacctgctgttccccggactgcatgagcaaggcgcaggtcatccaagccccacaggtcatgttgataacaatcaggtccacttaggactgaggggtgagctgttcggtcgggctgacccttatcgccctgtggcctcacctaggaccgatccttatgccgcaggtgcccagttccccaattatagccctatgaatatgaacatgggagtcaacgtggccgcacatcatgggccaggcgcttttttcaggtatatgaggcagcctatcaaacaagaactgtcatgtaagtggatcgatgaagcccagctcagccgaccaaaaaagtcctgcgataggactttttctaccatgcacgaactggtaactcacgtgacaatggaacatgtgggcggacccgaacaaaataaccatgtttgctattgggaggagtgcccccgagaaggaaaatcgttcaaagctaaatataaactggtgaatcacatccgggttcacactggtgagaaaccattcccatgccctttcccaggatgcggcaaaatttttgccaggtcggagaacttaaagatccacaaacgaacgcacacaggggagaagcccttcaagtgcgagtttgagggatgtgatcggcgattcgctaactcctcagatagaaaaaaacatatgcacgtgcataccagtgacaaaccctacatttgcaaagtgtgtgataaaagctacacccatccatcaagtctgagaaaacacatgaaagttcacgagtcgcaggggagcgattccagccctgcggctagcagtggttatgagtctagcactcccccagccatcgcatctgctaattctaaagacacgacaaagacgccctcagctgtccaaacatctacctcccataatcctgggcttccacccaatttcaatgagtggtatgtctag

SEQ ID NO: 138207 - DNA, 1374 bp, Artificial Sequence
  derived and/or modified sequence
atgaccatgctgcttgacgggggaccacaattcccgggactgggggtaggatccttcggggctcctcgccaccacgagatgcctaatcgagagcccgctggcatgggactgaacccttttggtgacagcacacacgccgctgcagcggctgccgctgccgcagccttcaaactgtctccagctgccgcacatgatctgtcaagcgggcagtcatccgcattcactcctcagggctcagggtatgccaatgcactggggcaccaccaccatcaccatcaccatcaccaccacacctcccaggtgccatcttacgggggtgccgcatctgccgcttttaattccacaagagagtttcttttccgccaacgaagttctggactcagcgaggctgcctctgggggaggccagcatggactgtttgcgggatccgcatcctcactccatgccccagccggaattccagagcctcccagttatttgttgtttcctggcctgcatgagcagggcgctggacacccctcacccaccgggcacgtggacaataaccaggtccatctgggattaagaggggagctgttcggaagggccgacccatataggccagtagcgtctccgagaaccgatccttatgcagccggtgcgcaattcccaaactactcccctatgaacatgaacatgggggttaatgttgccgcacaccatggccctggcgcatttttccggtacatgcgacagcctataaagcaagagttatcatgcaaatggatcgatgaggctcagctaagcaggcctaagaagtcctgtgacagaactttttcaaccatgcacgagctggtgacacacgtgacaatggagcacgtggggggacctgagcaaaataatcacgtctgctactgggaagaatgtccacgggagggcaagtccttcaaagccaagtataagctggtcaatcatatccgcgtacacacgggggagaaaccctttccttgtccattccccggatgtggtaaaatatttgctcggagtgagaacttgaagatccataaacgcacacatacaggcgagaagccctttaaatgcgaatttgagggctgcgatcgccgttttgccaacagttccgataggaagaaacatatgcatgtgcatacatccgataagccatatatctgtaaagtttgtgataagtcctacactcacccttcctccctgcggaaacatatgaagtgctgtcctgcttggtaccccggtcagtcgctaattccagacgaagaacttgacaccgatgtcggcatgcaacagcctgctcttcacaacactacctaccccaaatgtcgggtgaacgcggaacccaccgtgcaagaaatgatctactag

SEQ ID NO: 138208 - DNA, 3469 bp, Artificial Sequence
  derived and/or modified sequence
ttactctggaggcgaagaggctgggactcgcgcggcgagcggcaagcggcgagtaacgagcctgcctactgcccgctgcccgcctgcccggccgctagccggctccgccacttggcgcagcccagcccggaggccggtacccagggagcctcctggccccgcggttctgtgcactcggggagaggaggggtgcccgggacaggattggcaaactccgccctccacttactattttgcttatttttctttgtgcgcgcctgttagtttgttaaaccagatctagtccgagtcttttctcctcccttctcctccctcctcctccccccgccaacaccccctccctgctctttcttcccctcctccctcctatccctctgcaggagactcttgcagtgacggaaagttgcagcccctggtagcgccttgggggtctccccgcagtgtccaaccgccgccacccctttccgactacggcacttcggagatctcctccttcgccggtaccctctctcacttcggccggatcgcctgtgcccagaacgtcccacccatgacgatgctcctggacggaggcccgcagttccctgggctgggagtgggcagcttcggcgcgccgcgccaccacgagatgcccaaccgtgagccggcaggcatggggctgaatcccttcggggactcaacccacgccgccgccgccgccgccgccgccgctgccttcaagctgagccctgccgcggcgcacgatctatcttcaggccagagctcggctttcacgccgcagggttcgggctacgccaacgccctgggccaccatcaccaccaccatcaccatcatcaccacaccagccaggtgcccagctacggtggcgctgcctctgccgccttcaactcaacgcgcgagtttctgttccgccagcgcagctccgggctcagtgaggcggcctcgggtggcgggcagcacgggctcttcgccggctcggcgagcagcctgcatgctccagctggcatccccgagccccctagctacttgctgtttcccgggctgcatgagcagggcgctgggcacccgtcgcccacagggcacgtggacaacaaccaggtccacctggggctgcgtggggagctgttcggccgtgctgacccataccgcccagtggccagcccgcgcacggacccctacgcggccggcgctcagtttcctaactacagccccatgaacatgaacatgggagtgaacgtggcggcccaccacgggcccggcgccttcttccgttatatgcggcagcctatcaagcaggagctgtcgtgcaagtggatcgacgaggctcagctgagccggcccaagaagagctgcgaccggaccttcagcaccatgcatgagctggtgacacatgtcaccatggagcatgtggggggcccggagcagaacaaccacgtctgctactgggaggagtgcccccgggagggcaagtctttcaaggcgaagtacaaactggtcaaccacatccgagtgcacacgggcgagaagcccttcccatgccccttcccgggctgcgggaagatctttgcccgttctgagaacctcaagatccacaagaggacccacacaggtgagaaacctttcaaatgtgaatttgaaggctgtgacagacgctttgccaacagcagcgaccgtaagaagcacatgcatgtgcatacctcggacaagccctatatctgcaaagtgtgcgacaagtcctacacgcacccgagctccctgcgcaaacacatgaaggttcatgaatctcaagggtcagattcctcccctgctgccagttcaggctatgaatcttccactccacccgctatagcttctgcaaacagtaaagataccactaaaaccccttctgcagttcaaactagcaccagccacaaccctggacttcctcctaattttaacgaatggtacgtctgaggacaaacacaaaccctgttaattatagaatggaccaaatacatttttaaaagaaaactgagaccaatcagatggaaatggagttttaaggcaagaggccatatatagggctacatcttgttaattgcaattgtccaggaaggttttgggcaagatccaaaagtagccatgcccttttctcaggatagaaaatatgttttggcatttgaagcattttttacaaaatctttacactactttttcttccccttcctcttgctctctgcacaccccattcttaaactcctccaattcattttaacacttgtcctgtttcttgagaggaagttatagaaggcttgttggtggtggtgatgttaaactgatggaaattctttttcgccttagtggtgattgtttaaactctcacagtcttaaaccgtgccaaagtcctgttatgtcttgaacttttcctcaaagcattacacttgtgaatgtatttttgtctaatagggtcgaaactgttgttcagtattttttcaggctgaggatgtgatgttactctacacattgtgacgtttagtatacagttgccttttgtaataactttttttttgtaaatacatatccattgatgccatatttatcgtttgtaatttaattattgctacaagtgccgggaactgaacaatatttatggataaatgttttctaacaaattctgtacagcttttgattataactgctttagcattaaaaattgttttgaaagaagaacacaatttacaattttggaaccactgactcctttctcttgttttgtaacagccttcttctacaaagaggagatgtgagcaaattaaatcttgtttgttggtatttataactcactcagatcccttttttaattgttaaattatttttctattacagtataaattccttacagtgtcagtttccatctgggaagactctcctttctttatctctatctcagatggttgtttaactgcgagtttaaatgtgtttgtcctggattttcggcatgcaaatcaaatattactgatcaattcagttagtggccatgacatctcaatcttgtacttcaaagactgagaagctggatttaatcatccctgccctacatatataaacataaggtaacctactgaattttatgtcccttagttctttattaccttacataaaaatgaaaattgcggcaggatgcatgtctgtctgttctatctagagatcacccatatacctatatatgtttgtatctatgacttatctaatctgcctatcaatctatctagtagctatctatatattttcaaaagatagcttatgtctaaaacagtggtgatgagtaaggccagttgagcattgcttacttatggttaaagtgcttcttaaaagaaccatagtccatttacaattttggaaggcaaaggctgatttgtttgctgtatatagttcaattcataattatcgcaattatccataacatttatatagcggtgtaataactgc

SEQ ID NO: 138209 - DNA, 1968 bp, Artificial Sequence
  derived and/or modified sequence
gcaggagactcttgcagtgacggaaagttgcagcccctggtagcgccttgggggtctccccgcagtgtccaaccgccgccacccctttccgactacggcacttcggagatctcctccttcgccggtaccctctctcacttcggccggatcgcctgtgcccagaacgtcccacccatgacgatgctcctggacggaggcccgcagttccctgggctgggagtgggcagcttcggcgcgccgcgccaccacgagatgcccaaccgtgagccggcaggcatggggctgaatcccttcggggactcaacccacgccgccgccgccgccgccgccgccgctgccttcaagctgagccctgccgcggcgcacgatctatcttcaggccagagctcggctttcacgccgcagggttcgggctacgccaacgccctgggccaccatcaccaccaccatcaccatcatcaccacaccagccaggtgcccagctacggtggcgctgcctctgccgccttcaactcaacgcgcgagtttctgttccgccagcgcagctccgggctcagtgaggcggcctcgggtggcgggcagcacgggctcttcgccggctcggcgagcagcctgcatgctccagctggcatccccgagccccctagctacttgctgtttcccgggctgcatgagcagggcgctgggcacccgtcgcccacagggcacgtggacaacaaccaggtccacctggggctgcgtggggagctgttcggccgtgctgacccataccgcccagtggccagcccgcgcacggacccctacgcggccggcgctcagtttcctaactacagccccatgaacatgaacatgggagtgaacgtggcggcccaccacgggcccggcgccttcttccgttatatgcggcagcctatcaagcaggagctgtcgtgcaagtggatcgacgaggctcagctgagccggcccaagaagagctgcgaccggaccttcagcaccatgcatgagctggtgacacatgtcaccatggagcatgtggggggcccggagcagaacaaccacgtctgctactgggaggagtgcccccgggagggcaagtctttcaaggcgaagtacaaactggtcaaccacatccgagtgcacacgggcgagaagcccttcccatgccccttcccgggctgcgggaagatctttgcccgttctgagaacctcaagatccacaagaggacccacacaggtgagaaacctttcaaatgtgaatttgaaggctgtgacagacgctttgccaacagcagcgaccgtaagaagcacatgcatgtgcatacctcggacaagccctatatctgcaaagtgtgcgacaagtcctacacgcacccgagctccctgcgcaaacacatgaagtgttgtcctgcttggtatccgggacagtctctaattcctgacgaagaacttgatactgacgttggtatgcagcagccagccctccataacactacctatcctaaatgcagggttaatgccgaacctactgtgcaagaaatgatttactgatgaggtttcaaagaaaaccacatcaatttggatgtctgttaccttgaagtgatcattttaagagtagtagcttcttccctaggtataaaaagactattttcttcttttggtgtatttcatcctgtgttgagcaatcatttgtgaaatgaaaaagcaaaaaaactccccccactttaggatttataaatgggaagatggaggtgaagactggcctaattcataacccagtatgcattatctcatgcattgtgttgaccttggtgaaaatctttttcaaataccagcattctatatgtagaactaaagtgtttaaaactagaaacatgaattgttgttttgttaattttatgtttgtgttcagaaagcaatacccaggatccctttaatttttgtttgacttaaataaaaccatttaaatta

SEQ ID NO: 138210 - protein, 475 aa, Artificial Sequence
  derived and/or modified sequence
MSLATVDTLYIFSHDTQGLLRKKLIEASFQKVILDGYGSCGPQNLNLRKEWESEEKNQYNKSDTTLSQGISPRRHQKTHFLHNHCKRKKCEKAFHECTNHVHQSIFIQEKSAKCNKCIETFIQSSKHTQPQRIHIGEKSHRCNNGEKILSKLSSLRKHKIIHNEEKPYKCKECDKAFNHRSHLTQHQIIHTGEKPYKCKECGKAFNSSSYFTRHQRIHTGEKLYKCKACSKCFTHSSNLLVHQRIHTGEKPYKCKECGKSFKVSSALTQHERIHTGEKPYKCKECSKAFNCRSYLTKHQRIHTGEKLYKCKSCSKSFSRSSSLIVHQRIHTGEKPYKCKECGKAFNCSSRLTQHQRIHTGEKPYICKECGKAFNCSSSLTKHQRIHTGVKLYKCKACSKSFSHSSCLSVHQITHTGMKPYICKDCGISFNRSSNLRRHQMIHTGEKPYKCKECGKLFNRCSTLTRHKSIHTREFL

SEQ ID NO: 138211 - protein, 743 aa, Artificial Sequence
  derived and/or modified sequence
MGLLTFRDVAVEFSLEEWEHLEPAQKNLYQDVMLENYRNLVSLGLVVSKPDLITFLEQRKEPWNVKSEETVAIQPDVFSHYNKDLLTEHCTEASFQKVISRRHGSCDLENLHLRKRWKREECEGHNGCYDEKTFKYDQFDESSVESLFHQQILSSCAKSYNFDQYRKVFTHSSLLNQQEEIDIWGKHHIYDKTSVLFRQVSTLNSYRNVFIGEKNYHCNNSEKTLNQSSSPKNHQENYFLEKQYKCKEFEEVFLQSMHGQEKQEQSYKCNKCVEVCTQSLKHIQHQTIHIRENSYSYNKYDKDLSQSSNLRKQIIHNEEKPYKCEKCGDSLNHSLHLTQHQIIPTEEKPCKWKECGKVFNLNCSLYLTKQQQIDTGENLYKCKACSKSFTRSSNLIVHQRIHTGEKPYKCKECGKAFRCSSYLTKHKRIHTGEKPYKCKECGKAFNRSSCLTQHQTTHTGEKLYKCKVCSKSYARSSNLIMHQRVHTGEKPYKCKECGKVFSRSSCLTQHRKIHTGENLYKCKVCAKPFTCFSNLIVHERIHTGEKPYKCKECGKAFPYSSHLIRHHRIHTGEKPYKCKACSKSFSDSSGLTVHRRTHTGEKPYTCKECGKAFSYSSDVIQHRRIHTGQRPYKCEECGKAFNYRSYLTTHQRSHTGERPYKCEECGKAFNSRSYLTTHRRRHTGERPYKCDECGKAFSYRSYLTTHRRSHSGERPYKCEECGKAFNSRSYLIAHQRSHTREKL

SEQ ID NO: 138212 - protein, 279 aa, Artificial Sequence
  derived and/or modified sequence
MGLLTFRDVAVEFSLEEWEHLEPAQKNLYQDVMLENYRNLVSLGLVVSKPDLLTEHCTEASFQKVISRRHGSCDLENLHLRKRWKREECEGHNGCYDEKTFKYDQFDESSVESLFHQQILSSCAKSYNFDQYRKVFTHSSLLNQQEEIDIWGKHHIYDKTSVLFRQVSTLNSYRNVFIGEKNYHCNNSEKTLNQSSSPKNHQENYFLEKQYKCKEFEEVFLQSMHGQEKQEQSYKCNKCVEVCTQSLKHIQHQTIHIRENSYSYNKYDKDLSQSSNLRK

SEQ ID NO: 138213 - DNA, 3281 bp, Artificial Sequence
  derived and/or modified sequence
ggagagcaggggcggcttccgggatttggcgggggccttcgtcggctccagttagagctcgggtctcctcgccacagctccgagtctttcgttctgggaggcccaggcggcttcgcgttctgagaataaacagaacctctgttgctctgcgacttgcaggcactgggagattcgtagctaagacgccagggcatcccggaagctgggaaatgggactgttgacattcagggatgtggccgtagaattctctttggaggagtgggaacacctggaaccagctcagaagaatttgtatcaggatgtgatgttagaaaactacagaaacctggtctctctgggtcttgttgtctctaagccggacctgatcacctttttggaacaaaggaaagagccttggaatgtgaagagtgaggagacagtagccatccagccagatgtgttttcgcattataacaaggacctgttgacagagcactgcacagaagcttcattccaaaaagtgatatcgaggagacatgggagctgtgatcttgagaatttacatttaagaaaaaggtggaaaagggaggagtgtgaagggcacaatggatgttatgatgaaaagacttttaaatatgatcaatttgatgaatcctctgttgaaagtttgtttcaccagcaaatactttcttcttgtgccaaaagctataactttgatcaatataggaaggtctttactcattcatcattgcttaatcaacaagaggaaatagatatttggggaaaacatcacatatatgataaaacttcagtgttatttaggcaggtctctactctaaatagttaccgaaatgtttttattggagagaaaaattatcattgcaataattctgaaaaaaccttgaaccaaagctcaagccctaaaaatcatcaggaaaattattttctagaaaaacaatacaaatgtaaagaatttgaggaagtctttcttcagagtatgcatgggcaagagaaacaagaacagtcttacaaatgtaataaatgtgtagaagtttgtacccagtcattaaaacatattcaacatcagaccatccatatcagagaaaactcatatagctataacaaatatgataaagatcttagtcagtcatcaaatcttagaaagcagataatccataatgaagagaaaccatacaaatgtgaaaaatgtggggatagcttaaaccatagtttgcaccttactcaacatcagatcattcctaccgaagagaaaccctataaatggaaagaatgtggcaaggtctttaaccttaactgtagtttataccttactaaacagcagcaaattgatactggagaaaacctttacaaatgtaaagcatgtagcaaatcttttactcgttcctccaatcttattgtgcatcagagaattcacactggagagaaaccatacaaatgtaaagaatgtggcaaagcctttcgctgtagttcataccttactaaacataagcgaattcatactggagagaaaccttataaatgtaaagaatgtggaaaagcttttaaccgtagttcatgccttactcaacatcagacaactcatacaggagaaaaactttacaaatgtaaagtatgtagcaaatcttatgctcgttcttcaaatcttattatgcatcagagagttcatactggagagaagccttataaatgtaaagaatgtggcaaagtctttagccgtagttcttgccttactcaacatcggaaaattcatactggagaaaatctttacaaatgcaaagtatgtgctaaaccttttacttgtttctcaaatcttattgtgcatgagagaattcatactggagagaaaccctataaatgtaaagaatgtggcaaagcctttccttatagttcacaccttattcgacatcatcgaattcatactggagaaaaaccatacaaatgtaaagcatgtagcaaatcttttagtgactcctcaggtcttactgtgcatcggcgaactcatactggagagaaaccctatacatgtaaagaatgtggcaaagcctttagttatagttcagatgttattcagcatcggagaattcatactggccagagaccctacaaatgtgaagaatgtggcaaagccttcaactataggtcatacctcactacacatcagagaagtcatactggagagagaccctacaaatgtgaagaatgtggcaaagccttcaactctaggtcatacctcactacacatcggagaagacatactggagagagaccctacaaatgtgatgaatgtggtaaagccttcagctataggtcatacctcactacacatcggagaagtcatagtggagagagaccctacaaatgtgaagaatgtggcaaagcctttaactctaggtcatacctcattgcacatcagagaagtcatactagagaaaaactttaaaaatgtaaaacatggagcagattttttacttgttacccatgtcttattgtgcatcagataatttatatgggagtgaaaccctacaaatgttaagaatgtggcataacctttaactattttcaagccttacacaatagcagagaatataaactgaaaaaatccatacaaatattaaaaatgtggcaaattattttaaactgtgctcaacccttactcaagataatccatactagagaaacactatagatgtaaaaatgtgaaaagttttattcaaaatatcaaacttatgagtcacctaggggttcatagaaaaaggaagtttgcagatgcaataaatgtgaggaagtatttaataaaaaatgaagtctaaatgtgtcagagaatttatgtgagaaaggactaaagcacagacactttcagcctttatactaaataagagtattttttgtacagaataatctaaaggcaaaataattagataatttatttgcttatatgttttaaagtagcaagaacattgatgttttgacaggtatatttcatagatacttcatttgtatttacagtatttgaggtttttggaaagcaaatattatttatataattcagctttcaaatctgttgctgcttttccttaatccgtggtgttcatgtgaaaatatgtgttctgtttttttttctgcatcagaacaatgtgaggtcattctacgttaatatcattaatatcagcatttttcatggaagtttaatgccaaatgtaaaacacatgaaaatttttaaaaatatgctctttgtgtttgaataaagtagtaatgcacgtaaacaaaaaaaaaaaaaaaa

SEQ ID NO: 138214 - DNA, 2232 bp, Artificial Sequence
  derived and/or modified sequence
atgggcctgctgaccttcagagacgtggccgtggagttcagcctggaggagtgggagcacctggagcccgcccagaagaacctgtaccaggacgtgatgctggagaactacagaaacctggtgagcctgggcctggtggtgagcaagcccgacctgatcaccttcctggagcagagaaaggagccctggaacgtgaagagcgaggagaccgtggccatccagcccgacgtgttcagccactacaacaaggacctgctgaccgagcactgcaccgaggccagcttccagaaggtgatcagcagaagacacggcagctgcgacctggagaacctgcacctgagaaagagatggaagagagaggagtgcgagggccacaacggctgctacgacgagaagaccttcaagtacgaccagttcgacgagagcagcgtggagagcctgttccaccagcagatcctgagcagctgcgccaagagctacaacttcgaccagtacagaaaggtgttcacccacagcagcctgctgaaccagcaggaggagatcgacatctggggcaagcaccacatctacgacaagaccagcgtgctgttcagacaggtgagcaccctgaacagctacagaaacgtgttcatcggcgagaagaactaccactgcaacaacagcgagaagaccctgaaccagagcagcagccccaagaaccaccaggagaactacttcctggagaagcagtacaagtgcaaggagttcgaggaggtgttcctgcagagcatgcacggccaggagaagcaggagcagagctacaagtgcaacaagtgcgtggaggtgtgcacccagagcctgaagcacatccagcaccagaccatccacatcagagagaacagctacagctacaacaagtacgacaaggacctgagccagagcagcaacctgagaaagcagatcatccacaacgaggagaagccctacaagtgcgagaagtgcggcgacagcctgaaccacagcctgcacctgacccagcaccagatcatccccaccgaggagaagccctgcaagtggaaggagtgcggcaaggtgttcaacctgaactgcagcctgtacctgaccaagcagcagcagatcgacaccggcgagaacctgtacaagtgcaaggcctgcagcaagagcttcaccagaagcagcaacctgatcgtgcaccagagaatccacaccggcgagaagccctacaagtgcaaggagtgcggcaaggccttcagatgcagcagctacctgaccaagcacaagagaatccacaccggcgagaagccctacaagtgcaaggagtgcggcaaggccttcaacagaagcagctgcctgacccagcaccagaccacccacaccggcgagaagctgtacaagtgcaaggtgtgcagcaagagctacgccagaagcagcaacctgatcatgcaccagagagtgcacaccggcgagaagccctacaagtgcaaggagtgcggcaaggtgttcagcagaagcagctgcctgacccagcacagaaagatccacaccggcgagaacctgtacaagtgcaaggtgtgcgccaagcccttcacctgcttcagcaacctgatcgtgcacgagagaatccacaccggcgagaagccctacaagtgcaaggagtgcggcaaggccttcccctacagcagccacctgatcagacaccacagaatccacaccggcgagaagccctacaagtgcaaggcctgcagcaagagcttcagcgacagcagcggcctgaccgtgcacagaagaacccacaccggcgagaagccctacacctgcaaggagtgcggcaaggccttcagctacagcagcgacgtgatccagcacagaagaatccacaccggccagagaccctacaagtgcgaggagtgcggcaaggccttcaactacagaagctacctgaccacccaccagagaagccacaccggcgagagaccctacaagtgcgaggagtgcggcaaggccttcaacagcagaagctacctgaccacccacagaagaagacacaccggcgagagaccctacaagtgcgacgagtgcggcaaggccttcagctacagaagctacctgaccacccacagaagaagccacagcggcgagagaccctacaagtgcgaggagtgcggcaaggccttcaacagcagaagctacctgatcgcccaccagagaagccacaccagagagaagctgtag

SEQ ID NO: 138215 - DNA, 840 bp, Artificial Sequence
  derived and/or modified sequence
atgggcctgctgaccttcagagacgtggccgtggagttcagcctggaggagtgggagcacctggagcccgcccagaagaacctgtaccaggacgtgatgctggagaactacagaaacctggtgagcctgggcctggtggtgagcaagcccgacctgctgaccgagcactgcaccgaggccagcttccagaaggtgatcagcagaagacacggcagctgcgacctggagaacctgcacctgagaaagagatggaagagagaggagtgcgagggccacaacggctgctacgacgagaagaccttcaagtacgaccagttcgacgagagcagcgtggagagcctgttccaccagcagatcctgagcagctgcgccaagagctacaacttcgaccagtacagaaaggtgttcacccacagcagcctgctgaaccagcaggaggagatcgacatctggggcaagcaccacatctacgacaagaccagcgtgctgttcagacaggtgagcaccctgaacagctacagaaacgtgttcatcggcgagaagaactaccactgcaacaacagcgagaagaccctgaaccagagcagcagccccaagaaccaccaggagaactacttcctggagaagcagtacaagtgcaaggagttcgaggaggtgttcctgcagagcatgcacggccaggagaagcaggagcagagctacaagtgcaacaagtgcgtggaggtgtgcacccagagcctgaagcacatccagcaccagaccatccacatcagagagaacagctacagctacaacaagtacgacaaggacctgagccagagcagcaacctgagaaagtag

SEQ ID NO: 138216 - DNA, 2232 bp, Artificial Sequence
  derived and/or modified sequence
atgggccttctgacctttagagatgtcgctgtggagttctcactggaggaatgggaacatttggaacctgcccagaagaatttgtatcaggatgtgatgctcgagaactacagaaacttggtgagcctaggtttggtggtgagtaaacccgacctcatcacttttctcgaacagagaaaggaaccatggaatgtaaagtccgaggagactgtggctatccagccggacgtcttttcgcattacaacaaggaccttctgacggagcactgtacggaagcatcttttcagaaagtgatttcaaggagacacggttcctgcgaccttgaaaacctgcaccttaggaagcgatggaaaagagaagagtgtgagggacacaatgggtgctacgatgagaagacattcaaatacgaccagttcgatgagagcagcgtggagtccctctttcaccaacaaattctgtcctcttgtgccaaatcatacaatttcgatcaatatcgcaaggtattcacccactcatcattgttaaatcagcaagaggagatagacatctggggaaaacaccacatatatgataagacttccgtgctgtttaggcaggtgtcaacactgaatagctataggaatgtctttatcggcgaaaagaactatcattgcaacaactccgagaagacattgaatcagtcctctagccccaagaaccaccaggagaactattttttggaaaaacagtacaaatgtaaagagttcgaggaggtgttcctgcagagtatgcacggacaagagaagcaggagcagagttacaaatgtaacaagtgcgtggaggtgtgtacgcaaagcctaaagcacatccagcatcagactatacatattcgtgagaattcttactcttataataagtatgacaaggacctgtcccagtcttctaatctgcggaagcaaataatccataatgaagagaagccttacaagtgcgaaaaatgtggcgacagccttaatcattccctgcatttgacgcaacatcagattattccaactgaggaaaaaccctgtaagtggaaggagtgtggcaaggtgtttaatttgaactgcagcctctatctaaccaagcagcagcagatcgatacaggagaaaacctgtataaatgcaaggcctgctccaagtcatttacacgatcctctaatctcattgttcatcaacggatccacaccggagagaaaccctataaatgtaaggaatgcggaaaggcctttaggtgctcttcttacttaaccaaacacaaaaggattcacactggagagaagccctacaaatgcaaggagtgtggtaaagcattcaatcgctcatcttgtctcacccagcaccaaacaacacacaccggggagaagctatataagtgtaaagtgtgctcgaagtcttacgctagaagcagcaacctgatcatgcatcagcgggttcacaccggcgagaaaccttacaagtgcaaggagtgcggaaaagtgtttagcaggagctcctgtctgactcaacaccggaagattcacactggggaaaatttgtataagtgtaaggtgtgtgccaaaccattcacctgctttagcaacctgattgtccatgaaagaatccacaccggcgagaagccctataaatgcaaagaatgcggcaaagctttcccatactctagccatctgatccgtcaccacaggattcataccggcgagaaaccttataagtgcaaagcctgctcaaagagtttcagcgattcctcagggctcacagtccatcgcaggacacataccggcgagaaaccatacacgtgtaaagaatgtgggaaagcattttcctatagttcagacgtgattcagcaccggcgcatccacaccgggcaaagaccatataagtgtgaagagtgtggcaaggccttcaactataggagctacctgaccacacatcaacgctcacacaccggggagaggccctataaatgcgaagaatgcggtaaggctttcaattctcgaagttacctgaccactcatcggcggcgacataccggggaaaggccgtacaaatgcgacgagtgcggtaaagccttctcttaccggtcttacctgaccacccatcggcgctcgcactcaggtgagcgaccgtataagtgcgaggaatgtggcaaggccttcaactccaggagttatttaattgctcaccagaggtcccatactagggaaaaattgtag

SEQ ID NO: 138217 - DNA, 840 bp, Artificial Sequence
  derived and/or modified sequence
atgggcctgctcacgttccgtgacgtggcagtcgaattcagcctggaggaatgggagcacctcgagccagcgcagaagaacctgtaccaagacgtcatgttggagaattatcggaacctggtgagcctgggtctcgtggtaagtaagcctgatctcctaaccgaacactgcaccgaagctagcttccagaaggtgattagtcgaaggcacggctcctgtgacttagaaaacttacacctgaggaagcggtggaaacgcgaggaatgtgaaggacacaacggttgttatgacgagaagaccttcaagtatgaccaatttgacgaatcctcagttgaaagtctgttccaccagcagatcttatctagctgtgccaaatcttataatttcgaccagtatcgaaaagtattcacacatagttccttactcaaccaacaagaggagattgatatttggggcaagcatcatatatatgataaaaccagcgtactgttcagacaggtgtccacgttaaattcataccgtaatgtctttattggagagaagaattaccactgtaacaatagcgagaagacgctcaatcagtccagctctcccaagaatcatcaggagaactattttctggagaagcaatacaagtgcaaggaatttgaggaggtcttcttacaatctatgcacggacaggagaagcaggagcagtcttacaaatgtaacaaatgtgtcgaagtctgtacacaaagcttgaaacacatacaacaccagacaatccacataagggaaaacagctactcctataataagtatgacaaagacttaagccagagcagcaacttgagaaaatag

SEQ ID NO: 138218 - DNA, 2232 bp, Artificial Sequence
  derived and/or modified sequence
atgggcctgctgaccttcagagatgtggccgtggagttcagcctggaggagtgggagcacctggagcccgcccagaagaacctgtaccaggatgtgatgctggagaactacagaaacctggtgtccctgggcctggtggtgtccaagccagacctgatcaccttcctggagcagaggaaggagccctggaatgtgaagtctgaggagaccgtggccatccagccagatgtgttcagccactacaacaaggacctgctgacagagcactgcacagaggccagcttccagaaggtgatcagcagaagacatggcagctgtgacctggagaacctgcacctgaggaagcgctggaagcgggaggagtgtgagggccacaacggctgctatgatgagaagaccttcaagtatgaccagtttgatgagagctctgtggagagcctcttccaccagcagatcctgagcagctgtgccaagagctacaactttgaccagtacaggaaggtgttcacccacagcagcctgctgaaccagcaggaggagattgacatctggggcaagcaccacatctatgacaagacctctgtgctcttccggcaggtgtccaccctgaacagctacagaaatgtgttcatcggggagaagaactaccactgcaacaacagcgagaagaccctgaaccagagcagcagccccaagaaccaccaggagaactacttcctggagaagcagtacaagtgcaaggagtttgaggaggtgttcctgcagagcatgcacggccaggagaagcaggagcagagctacaagtgcaacaagtgtgtggaggtgtgcacccagagcctgaagcacatccagcaccagaccatccacatccgggagaacagctacagctacaacaagtatgacaaggacctgagccagagcagcaacctgaggaagcagatcatccacaatgaggagaagccctacaagtgtgagaagtgtggggacagcctgaaccacagcctgcacctgacccagcaccagatcatccccacagaggagaagccctgcaagtggaaggaatgtgggaaggtgttcaacctgaactgcagcctgtacctgaccaagcagcagcagattgacacaggagaaaatctctacaagtgcaaggcctgcagcaagagcttcaccaggagcagcaacctgattgtgcaccagaggatccacactggagagaagccctacaagtgcaaggaatgtgggaaggccttccgctgcagcagctacctgaccaagcacaagaggatccacactggagagaagccctacaagtgcaaggaatgtgggaaggccttcaacagaagcagctgcctgacccagcaccagaccacccacactggagagaagctgtacaagtgcaaggtgtgcagcaagagctatgcccggagcagcaacctgatcatgcaccagagggtgcacactggagagaagccctacaagtgcaaggaatgtgggaaggtgttcagccgcagcagctgcctgacccagcacaggaagatccacactggagaaaatctctacaagtgcaaggtgtgtgccaagcccttcacctgcttcagcaacctgattgtgcatgagcgcatccacactggagagaagccctacaagtgcaaggaatgtgggaaggccttcccctacagcagccacctgatccgccaccaccgcatccacactggagagaagccctacaagtgcaaggcctgcagcaagagcttcagtgacagcagcggcctgactgtgcacaggaggacccacactggagagaagccctacacctgcaaggaatgtgggaaggccttctcctacagcagtgatgtgatccagcaccggcgcatccacacaggccagaggccctacaagtgtgaggagtgtgggaaggccttcaactaccgcagctacctgaccacccaccagaggagccacactggagagcggccctacaagtgtgaggagtgtgggaaggccttcaacagccgcagctacctgaccacccacagaagaagacacactggagagcggccctacaagtgtgatgaatgtgggaaggccttctcctaccgcagctacctgaccacccacagaagaagccacagcggggagcggccctacaagtgtgaggagtgtgggaaggccttcaacagccgcagctacctgattgcccaccagaggagccacacccgggagaagctgtag

SEQ ID NO: 138219 - DNA, 840 bp, Artificial Sequence
  derived and/or modified sequence
atgggcctgctgaccttcagagatgtggccgtggagttcagcctggaggagtgggagcacctggagcccgcccagaagaacctgtaccaggatgtgatgctggagaactacagaaacctggtgtccctgggcctggtggtgtccaagccagacctgctgacagagcactgcacagaggccagcttccagaaggtgatcagccgccgccacggcagctgtgacctggagaacctgcacctgaggaagcgctggaagcgggaggagtgtgagggccacaacggctgctatgatgagaagaccttcaagtatgaccagtttgatgagagctctgtggagagcctcttccaccagcagatcctgagcagctgtgccaagagctacaactttgaccagtacaggaaggtgttcacccacagcagcctgctgaaccagcaggaggagattgacatctggggcaagcaccacatctatgacaagacctctgtgctcttccggcaggtgtccaccctgaacagctacagaaatgtgttcatcggggagaagaactaccactgcaacaacagcgagaagaccctgaaccagagcagcagccccaagaaccaccaggagaactacttcctggagaagcagtacaagtgcaaggagtttgaggaggtgttcctgcagagcatgcacggccaggagaagcaggagcagagctacaagtgcaacaagtgtgtggaggtgtgcacccagagcctgaagcacatccagcaccagaccatccacatcagagaaaattcctacagctacaacaagtatgacaaggacctgagccagagcagcaacctgaggaagtag

SEQ ID NO: 138220 - DNA, 2232 bp, Artificial Sequence
  derived and/or modified sequence
atgggcctgctgaccttccgggacgtggccgtggagttcagcctggaggaatgggaacaccttgaacctgcgcagaaaaacctgtaccaagatgttatgttggagaattaccgcaacctagtctccctaggactggtcgtgtctaagccagatctgatcacgttcctcgagcagcggaaggagccctggaatgtgaaaagcgaagaaactgttgcaattcaaccagacgtcttctcacattacaacaaagacctgctgaccgagcattgcacggaagcctcctttcagaaagtgatttctaggcgccatgggagttgcgacctggagaacctacacctacgcaaaagatggaagagagaggagtgtgaaggtcataacggctgctatgacgaaaagaccttcaagtacgatcagttcgacgaatcaagcgtggagagcctgtttcaccagcagattctaagttcatgtgcgaaaagttataatttcgatcagtataggaaggttttcacccatagttcattgctgaaccagcaagaggagatagatatatggggaaaacatcacatctacgacaagacttccgttttattccgtcaagtgagcacactcaattcatacaggaatgtatttataggcgagaagaattaccattgcaacaatagcgaaaaaaccctgaatcagtccagctcccccaaaaaccaccaggaaaactacttcctggagaagcaatacaaatgtaaggagttcgaggaggtgttcctgcagtcgatgcatggtcaggagaagcaggaacagagctacaagtgtaacaagtgcgtggaagtatgcactcagtctttgaagcacatccagcatcagacaatccatatccgggagaactcctatagttacaacaagtacgataaagacctgtctcaaagtagcaacctccgcaaacagattatacacaatgaggaaaagccgtacaaatgcgagaagtgtggtgacagtttgaaccactccctgcacctcacccaacaccagataatccctactgaagagaagccttgcaaatggaaagagtgtgggaaggtgttcaacctcaattgcagcttgtacctcacaaaacagcagcagatcgatacaggtgaaaacctgtataagtgcaaggcttgctcaaaaagttttacacgatcctcgaatctcatagtgcaccagagaatccacacaggcgaaaaaccatacaagtgtaaagagtgtggcaaagccttccggtgttcaagctacctcacaaagcataagcgcatccacacaggcgagaagccgtacaaatgtaaggagtgtgggaaggcttttaaccgttcgagttgtctcacacagcatcagactacccacaccggggaaaagctgtataaatgtaaagtatgcagtaaatcctacgctcgtagcagcaatctgatcatgcatcagagggtacatactggggaaaagccctataagtgcaaagagtgtggaaaagtgttctcccggtctagctgtctgactcagcaccggaagattcacacaggggaaaatttgtacaagtgcaaggtatgtgcaaaaccattcacatgcttctctaatctcatcgtgcacgaacgcatacacaccggcgaaaagccttataagtgcaaggagtgcggcaaagccttcccttatagctcacacctgatcaggcaccatcgcatccacactggtgaaaaaccttataaatgcaaagcttgctccaagtccttctccgattcctccggtctaactgtgcatcggcggacgcatacgggcgagaagccttatacctgtaaggaatgtggtaaagctttttcctatagctccgatgttattcagcatcgcaggattcatacgggtcagagaccatacaaatgtgaggagtgcggtaaagccttcaactataggtcatatttaactacccatcagaggagccacacaggtgagaggccttacaaatgtgaagagtgtggaaaggctttcaatagcagatcttatctgaccactcaccggagacgccacaccggcgagcgaccatataagtgtgatgaatgcggcaaggccttctcatataggtcgtatctgacaacacatcggaggtcacactccggtgagaggccatacaaatgcgaagaatgcgggaaggcctttaactcacgctcatatttgatagcccaccaacgctcccacacccgagaaaagctctag

SEQ ID NO: 138221 - DNA, 840 bp, Artificial Sequence
  derived and/or modified sequence
atgggcctgctgaccttccgggacgtggccgtggagttcagcctggaagaatgggaacacttggagcctgcgcaaaagaatctttaccaggatgtgatgttggagaactacagaaatctggtgagcctaggtttggtggtgagtaaaccagatttattgacagaacattgcactgaggcctcctttcaaaaggtcattagcagacggcatggcagctgtgacctcgagaatctgcaccttagaaaaagatggaagagagaggagtgcgagggtcacaatgggtgttatgatgagaaaacatttaagtatgaccagttcgacgagtcatcagtagagtccctgttccatcagcagatcttgtcctcttgtgccaaatcgtacaattttgaccagtacagaaaagtctttactcactctagcttgctcaaccaacaggaagaaatcgacatctggggaaaacatcatatttatgacaagacctccgtgcttttcagacaggtgtctacactaaactcttacagaaacgtgttcatcggtgaaaaaaactaccactgtaacaattccgagaagactcttaatcagtcttcctcccccaagaaccaccaggaaaattatttcctggagaagcaatacaagtgtaaggaattcgaagaggtttttctccagtctatgcacggccaggagaagcaggaacagtcatacaaatgtaacaaatgcgtggaggtgtgcactcagtccctcaagcacatccagcatcagaccattcacatccgcgaaaacagttactcatataataagtatgacaaggacctctctcaaagctcgaacttgcgcaaatag

SEQ ID NO: 138222 - DNA, 2232 bp, Artificial Sequence
  derived and/or modified sequence
atgggtctcctgacctttcgcgatgtggccgttgaattctctctggaggagtgggaacatctggaaccagcacagaaaaatctctatcaggatgttatgctggagaattaccgcaatctggtatctttgggtcttgttgtctccaagcccgatcttataaccttcctggagcagcggaaagagccttggaatgttaaatcagaggagacagtggctatccagcccgatgtattctcccactacaataaggatctgctgacggagcactgtaccgaagcctcattccagaaggtgattagtaggagacatggatcatgtgatttagagaacctgcacctccgcaagaggtggaaacgcgaagagtgcgaggggcacaatggatgctatgacgagaaaacattcaaatatgaccagtttgacgagtcctccgtggaatctctgtttcaccagcagattctcagctcgtgtgctaagagctataactttgatcaatatagaaaagtgtttacccatagcagccttcttaatcagcaggaagagattgatatatgggggaaacaccacatttacgataaaacttctgttctgtttcgacaagtttctactctcaactcctataggaacgtgttcatcggagagaagaactaccattgtaataacagcgaaaaaacactcaatcagtcatcatcccctaagaaccaccaggaaaactacttcctggaaaagcaatacaaatgtaaagagtttgaggaggtattcctccagtcaatgcacggacaagagaagcaggaacagagttataaatgcaataagtgcgttgaggtgtgcacacagtcacttaaacacatccagcaccagaccattcatattagggagaattcgtactcgtataacaagtatgacaaggacctttctcaatcctctaacctccggaagcagataattcacaacgaggaaaagccatacaagtgcgagaagtgtggagactcgctcaaccactccctccatctcacacagcatcagatcattccgaccgaagagaaaccctgtaagtggaaggaatgtggaaaggtcttcaacttgaactgctccctctatctcactaaacagcagcagattgacaccggcgagaatttgtataagtgtaaggcttgcagcaaaagcttcacccggtcgtccaatctcatcgtccaccagcggatccacacgggtgagaaaccctacaagtgcaaggaatgcgggaaagccttcagatgcagttcatacctgaccaagcataaacgcattcacacgggcgagaaaccatacaagtgcaaggaatgcggtaaagcattcaaccgaagttcgtgccttacgcaacatcaaacgacccacacaggagaaaaactctacaagtgtaaggtttgttccaagagttatgccagatcctccaatctgatcatgcatcagcgtgttcatacaggagaaaaaccttacaagtgcaaagagtgcgggaaagtgttttcaagatccagctgccttactcaacacaggaagattcatactggggaaaatctgtacaaatgcaaggtctgtgccaagcccttcacctgtttttccaacctcatagtccatgagcgcattcacacaggagagaagccctacaagtgcaaagaatgcgggaaggccttcccctattcaagccacctgatccgtcatcataggatccataccggagagaagccgtacaaatgcaaagcttgctctaagtccttctccgactcctccggtcttactgtccaccgaaggacccacacaggcgaaaagccttacacctgcaaggagtgtggcaaagcattttcctacagctctgatgtcattcagcaccgcagaattcacaccggccagagaccatataagtgcgaggagtgcggcaaggctttcaattacaggagctacctaaccactcatcagcgctcccatacaggagaaagaccatataagtgcgaggagtgtggcaaagctttcaactctcggagctacctcacaacgcatcggagacggcataccggcgaaagaccctacaagtgtgacgaatgtggtaaggcattcagctataggagttatctgacaactcatcgacgtagccattctggggagcggccatacaagtgcgaagaatgcgggaaggcttttaattctaggagctatcttatagcccaccagcgctcccacactagagagaagttatag

SEQ ID NO: 138223 - DNA, 840 bp, Artificial Sequence
  derived and/or modified sequence
atgggccttctgacctttcgggacgtggccgtagaattttcactggaagaatgggaacacctggagcccgctcagaaaaacctgtaccaagatgtgatgttagagaattaccgaaatcttgtgagcttggggctggtcgtctcaaagcccgatctccttactgagcattgtactgaggcctccttccagaaagtgatttctcgcagacacggctcctgtgatttagagaacttacacctccggaaaaggtggaaacgggaagagtgcgaggggcacaacggttgttacgacgaaaaaacttttaagtatgaccaattcgatgagtcgagtgtggagtctctttttcatcagcagattctctcaagctgcgccaagtcttataatttcgatcagtatcggaaagtgttcacccattcaagcttgttaaaccaacaggaagagattgacatctggggcaagcatcacatatatgataagacaagtgtcctgtttcgacaggtgtcaaccttaaatagctaccgcaacgtctttatcggcgagaaaaactaccattgtaacaattctgaaaaaactctgaatcagagctcatcaccgaagaaccatcaggaaaactacttcctggaaaaacaatacaagtgcaaagaattcgaggaggtttttttgcagagcatgcacgggcaggagaagcaagagcaatcttacaagtgtaacaaatgtgtggaggtatgtactcagtccctcaagcacatccagcaccagactatccacattcgggagaattcctatagttacaataagtacgataaagacctgtctcagagctccaatctcagaaagtag

SEQ ID NO: 138224 - DNA, 3261 bp, Artificial Sequence
  derived and/or modified sequence
ggagagcaggggcggcttccgggatttggcgggggccttcgtcggctccagttagagctcgggtctcctcgccacagctccgagtctttcgttctgggaggcccaggcggcttcgcgttctgagaataaacagaacctctgttgctctgcgacttgcaggcactgggagattcgtagctaagacgccagggcatcccggaagctgggaaatgggactgttgacattcagggatgtggccgtagaattctctttggaggagtgggaacacctggaaccagctcagaagaatttgtatcaggatgtgatgttagaaaactacagaaacctggtctctctgggtcttgttgtctctaagccggacctgatcacctttttggaacaaaggaaagagccttggaatgtgaagagtgaggagacagtagccatccagccagatgtgttttcgcattataacaaggacctgttgacagagcactgcacagaagcttcattccaaaaagtgatatcgaggagacatgggagctgtgatcttgagaatttacatttaagaaaaaggtggaaaagggaggagtgtgaagggcacaatggatgttatgatgaaaagacttttaaatatgatcaatttgatgaatcctctgttgaaagtttgtttcaccagcaaatactttcttcttgtgccaaaagctataactttgatcaatataggaaggtctttactcattcatcattgcttaatcaacaagaggaaatagatatttggggaaaacatcacatatatgataaaacttcagtgttatttaggcaggtctctactctaaatagttaccgaaatgtttttattggagagaaaaattatcattgcaataattctgaaaaaaccttgaaccaaagctcaagccctaaaaatcatcaggaaaattattttctagaaaaacaatacaaatgtaaagaatttgaggaagtctttcttcagagtatgcatgggcaagagaaacaagaacagtcttacaaatgtaataaatgtgtagaagtttgtacccagtcattaaaacatattcaacatcagaccatccatatcagagaaaactcatatagctataacaaatatgataaagatcttagtcagtcatcaaatcttagaaagcagataatccataatgaagagaaaccatacaaatgtgaaaaatgtggggatagcttaaaccatagtttgcaccttactcaacatcagatcattcctaccgaagagaaaccctgtaaatggaaagaatgtggcaaggtctttaaccttaactgtagtttataccttactaaacagcagcaaattgatactggagaaaacctttacaaatgtaaagcatgtagcaaatcttttactcgttcctccaatcttattgtgcatcagagaattcacactggagagaaaccatacaaatgtaaagaatgtggcaaagcctttcgctgtagttcataccttactaaacataagcgaattcatactggagagaaaccttataaatgtaaagaatgtggaaaagcttttaaccgtagttcatgccttactcaacatcagacaactcatacaggagaaaaactttacaaatgtaaagtatgtagcaaatcttatgctcgttcttcaaatcttattatgcatcagagagttcatactggagagaagccttataaatgtaaagaatgtggcaaagtctttagccgtagttcttgccttactcaacatcggaaaattcatactggagaaaatctttacaaatgcaaagtatgtgctaaaccttttacttgtttctcaaatcttattgtgcatgagagaattcatactggagagaaaccctataaatgtaaagaatgtggcaaagcctttccttatagttcacaccttattcgacatcatcgaattcatactggagaaaaaccatacaaatgtaaagcatgtagcaaatcttttagtgactcctcaggtcttactgtgcatcggcgaactcatactggagagaaaccctatacatgtaaagaatgtggcaaagcctttagttatagttcagatgttattcagcatcggagaattcatactggccagagaccctacaaatgtgaagaatgtggcaaagccttcaactataggtcatacctcactacacatcagagaagtcatactggagagagaccctacaaatgtgaagaatgtggcaaagccttcaactctaggtcatacctcactacacatcggagaagacatactggagagagaccctacaaatgtgatgaatgtggtaaagccttcagctataggtcatacctcactacacatcggagaagtcatagtggagagagaccctacaaatgtgaagaatgtggcaaagcctttaactctaggtcatacctcattgcacatcagagaagtcatactagagaaaaactttaaaaatgtaaaacatggagcagattttttacttgttacccatgtcttattgtgcatcagataatttatatgggagtgaaaccctacaaatgttaagaatgtggcataacctttaactattttcaagccttacacaatagcagagaatataaactgaaaaaatccatacaaatattaaaaatgtggcaaattattttaaactgtgctcaacccttactcaagataatccatactagagaaacactatagatgtaaaaatgtgaaaagttttattcaaaatatcaaacttatgagtcacctaggggttcatagaaaaaggaagtttgcagatgcaataaatgtgaggaagtatttaataaaaaatgaagtctaaatgtgtcagagaatttatgtgagaaaggactaaagcacagacactttcagcctttatactaaataagagtattttttgtacagaataatctaaaggcaaaataattagataatttatttgcttatatgttttaaagtagcaagaacattgatgttttgacaggtatatttcatagatacttcatttgtatttacagtatttgaggtttttggaaagcaaatattatttatataattcagctttcaaatctgttgctgcttttccttaatccgtggtgttcatgtgaaaatatgtgttctgtttttttttctgcatcagaacaatgtgaggtcattctacgttaatatcattaatatcagcatttttcatggaagtttaatgccaaatgtaaaacacatgaaaatttttaaaaatatgctctttgtgtttgaataaagtagtaatgcatgt

SEQ ID NO: 138225 - DNA, 2024 bp, Artificial Sequence
  derived and/or modified sequence
gtcggctccagttagagctcgggtctcctcgccacagctccgagtctttcgttctgggaggcccaggcggcttcgcgttctgagaataaacagaacctctgttgctctgcgacttgcaggcactgggagattcgtagctaagacgccagggcatcccggaagctgggaaatgggactgttgacattcagggatgtggccgtagaattctctttggaggagtgggaacacctggaaccagctcagaagaatttgtatcaggatgtgatgttagaaaactacagaaacctggtctctctgggtcttgttgtctctaagccggacctgttgacagagcactgcacagaagcttcattccaaaaagtgatatcgaggagacatgggagctgtgatcttgagaatttacatttaagaaaaaggtggaaaagggaggagtgtgaagggcacaatggatgttatgatgaaaagacttttaaatatgatcaatttgatgaatcctctgttgaaagtttgtttcaccagcaaatactttcttcttgtgccaaaagctataactttgatcaatataggaaggtctttactcattcatcattgcttaatcaacaagaggaaatagatatttggggaaaacatcacatatatgataaaacttcagtgttatttaggcaggtctctactctaaatagttaccgaaatgtttttattggagagaaaaattatcattgcaataattctgaaaaaaccttgaaccaaagctcaagccctaaaaatcatcaggaaaattattttctagaaaaacaatacaaatgtaaagaatttgaggaagtctttcttcagagtatgcatgggcaagagaaacaagaacagtcttacaaatgtaataaatgtgtagaagtttgtacccagtcattaaaacatattcaacatcagaccatccatatcagagaaaactcatatagctataacaaatatgataaagatcttagtcagtcatcaaatcttagaaagcagataatccataatgaagagaaaccatacaaatgtgatgaatgtggtaaagccttcagctataggtcatacctcactacacatcggagaagtcatagtggagagagaccctacaaatgtgaagaatgtggcaaagcctttaactctaggtcatacctcattgcacatcagagaagtcatactagagaaaaactttaaaaatgtaaaacatggagcagattttttacttgttacccatgtcttattgtgcatcagataatttatatgggagtgaaaccctacaaatgttaagaatgtggcataacctttaactattttcaagccttacacaatagcagagaatataaactgaaaaaatccatacaaatattaaaaatgtggcaaattattttaaactgtgctcaacccttactcaagataatccatactagagaaacactatagatgtaaaaatgtgaaaagttttattcaaaatatcaaacttatgagtcacctaggggttcatagaaaaaggaagtttgcagatgcaataaatgtgaggaagtatttaataaaaaatgaagtctaaatgtgtcagagaatttatgtgagaaaggactaaagcacagacactttcagcctttatactaaataagagtattttttgtacagaataatctaaaggcaaaataattagataatttatttgcttatatgttttaaagtagcaagaacattgatgttttgacaggtatatttcatagatacttcatttgtatttacagtatttgaggtttttggaaagcaaatattatttatataattcagctttcaaatctgttgctgcttttccttaatccgtggtgttcatgtgaaaatatgtgttctgtttttttttctgcatcagaacaatgtgaggtcattctacgttaatatcattaatatcagcatttttcatggaagtttaatgccaaatgtaaaacacatgaaaatttttaaaaatatgctctttgtgtttgaataaagtagtaatgcatgt

SEQ ID NO: 138226 - protein, 627 aa, Artificial Sequence
  derived and/or modified sequence
MAAAVLTDRAQVSVTFDDVAVTFTKEEWGQLDLAQRTLYQEVMLENCGLLVSLGCPVPKAELICHLEHGQEPWTRKEDLSQDTCPGDKGKPKTTEPTTCEPALSEGISLQGQVTQGNSVDSQLGQAEDQDGLSEMQEGHFRPGIDPQEKSPGKMSPECDGLGTADGVCSRIGQEQVSPGDRVRSHNSCESGKDPMIQEEENNFKCSECGKVFNKKHLLAGHEKIHSGVKPYECTECGKTFIKSTHLLQHHMIHTGERPYECMECGKAFNRKSYLTQHQRIHSGEKPYKCNECGKAFTHRSNFVLHNRRHTGEKSFVCTECGQVFRHRPGFLRHYVVHSGENPYECLECGKVFKHRSYLMWHQQTHTGEKPYECSECGKVFLESAALIHHYVIHTGEKPFECLECGKAFNHRSYLKRHQRIHTGEKPFVCSECGKAFTHCSTFILHKRAHTGEKPFECKECGKAFSNRKDLIRHFSIHTGEKPYECVECGKAFTRMSGLTRHKRIHSGEKPYECVECGKSFCWSTNLIRHAIIHTGEKPYKCSECGKAFSRSSSLTQHQRMHTGKNPISVTDVGRPFTSGQTSVTLRELLLGKDFLNVTTEANILPEETSSSASDQPYQRETPQVSSL

SEQ ID NO: 138227 - DNA, 12172 bp, Artificial Sequence
  derived and/or modified sequence
attttcttctgcacttctgtctggagaggtctgtagccactgagggccccggtcggggccgctttgcaggtccctagtcaggaccgagcaggggagtaggataggaatccccgccgcacctttgtacgagcctgaccccttccgtgggtttgttcctgggtcgccgtcaagctgcggtctctcctcccccgcccttcagccccgcggtctccaggggcggcgccctgggtctggaacgcggttgccaccgaggaggcggcggccctgcgtctggaacgccgttgccaccgaggaggcggcggccccgagcgcgcctggaagccccgggcaaccggccagggtcgggcacaggtggggtccgtcaggccgcccggggctcctctgtcccagctctgcggcccagggggtgacgtgatggcggcagcggtgctgacggaccgggcccaggtgtctgtgacctttgatgatgtggctgtgactttcaccaaggaggagtgggggcagctggacctagctcagcggaccctgtaccaggaggtgatgctggaaaactgtgggctcctggtgtctctggggtgtcctgttcccaaagctgagctgatctgccacctagagcatgggcaggagccatggaccaggaaggaagacctctcccaagacacctgtccaggcgacaaaggaaaacctaagaccacagaacctaccacttgtgagccagccttgtcagagggaatctcacttcagggacaagtgacacaaggaaactcagtggactcacagttggggcaagccgaggatcaggatgggctatcagaaatgcaggaaggacacttcagaccaggaatagatccccaggagaagtctcctgggaagatgagccctgaatgtgatggtttagggacagctgatggtgtgtgttcaaggattggacaggagcaagtctctccaggagatagagtccgtagccataactcatgtgagtcaggtaaagatcccatgattcaggaagaggaaaataactttaaatgcagtgaatgtggaaaagtatttaacaagaaacacctccttgctggacatgagaaaattcactctggagttaagccctatgaatgcacagaatgtgggaaaacctttattaagagcacacatctcctgcaacatcacatgatccacactggggagaggccctatgagtgcatggagtgtggaaaggccttcaaccgcaagtcataccttacccagcaccagcggattcacagtggagagaagccttacaagtgcaatgaatgcggaaaggccttcacccaccgctccaattttgtcttgcataacaggagacacactggagaaaaatcctttgtgtgcacagaatgtggccaagtctttcgacataggccaggctttctccggcactatgttgtccacagtggtgagaatccctatgagtgcttggagtgtggcaaggtcttcaaacacaggtcatatctcatgtggcaccagcagactcataccggggagaagccctatgagtgcagtgaatgtgggaaggtcttcttggagagtgcagccctgattcaccactatgtcatccacactggagagaagccctttgagtgcctcgagtgtgggaaggctttcaaccaccgatcctacctcaagaggcaccagcggattcacactggggagaagcccttcgtgtgcagtgaatgtggaaaggccttcacccactgctctacttttatcttgcataaaagggcccacactggagaaaagcctttcgagtgcaaagagtgtgggaaagcctttagcaatcggaaggacctcattcgccacttcagcatccacactggagagaagccctatgagtgcgtggagtgtggaaaggccttcacccgcatgtcgggcctcacgaggcacaagcggattcatagtggagagaagccctatgaatgtgttgagtgtgggaaatcgttttgctggagcacaaacctcattcgacatgccattatccacactggagagaagccctataaatgtagtgaatgtggaaaggccttcagtcgcagctcgtccctcactcagcatcaaaggatgcatactgggaaaaatcccatcagtgtaacagatgtgggaagaccttttacaagtggacaaacctcagttacccttcgagaacttcttttagggaaggactttttgaatgtaaccactgaggcaaatattttgccagaggaaacatcttcctctgcatctgatcaaccataccaaagagaaaccccacaagtgtcttcactgtgagaaaaccttctgttgctgaatattacttgtcatctgaagagtcatattagaaattcgttcagtctagagccttattctccatctgataatttatcctggagagagacccagtggttattgtgcacataggagaaccttcagctgcatctttctccttagtttacagtgcaattttatctcaggaattatttttaaaaggaggaggggacatagaaaaaatgaaatgcaagcacacatcttttcaggcttctctgccaagcctatggcgctttgtcatggatttcttagtgtatttgggggaagggaaatgtttcaaggtaaagaaccttgaccctttatgtgcttgtatgtacatttattgctatccagtgtcagaacagttagtttaggaaaagtatgcaaactttaatcgcacatcttctgtattccacaatagtacttactcttgagaagcataactttatgacaacttagggggcttgagccatgaaatactcacgtttaagtcagtaaggatacacatgttaacattcaggcttttgtcttgatgcccgtcttttggtttacgtcatcattgtagccatatggtaaatttttatttgttaaatttttaaaaattacttagctcaaaatgtcagtggtaaatttttaaattgagtaaagtgattcttctttgctcttatttaaaatcgacagcatttctagttcctttgacattccatataatttttaggattagtttgtacttatttacaaaacagtcttgttcagatttttacagaaattgagttaagtctgtggattaatctgttaagaattggtatctttactatgttgggtcttgtagttcatgagtgcaggagtaggcctcttaatttataatagttaagcattccttaaagtatttcattaatgttaaaaattttcagcgtatagatccctatgcatttttgttagaatttgcatcctagggtgcttttttgtttgtgtgtgtgtgtaatttgagtgattgtaaatggcattgatgtttgaactttgaattgcacacaatttttggtagtatacagaaatataatatttttggacattgttttgctaccctgcaaccttattgagttcacttattatttttagctatttctttcgacagaatccttggaattttctatatagaaatgtcatctgcaaatacagaccattttttatctttcatcttacctgtaatataccttttatttcctttttgtttgtcttattgcattgcacaagctgggacttccattatagcgttgaataggaatagtgagaaaggccatccttacctggttcctgatagtaggggggacaatgttcagttttttgtttttttgttttttgtttgagacagggtctcgctctgtcacccaggctggagtgcagtggcacgatcttgtctcaccatagccttaagttcctgggctcaagtgatccccccacctcagccctcaccaccccccagtagctggtactacaagcatgcaccaccagtcccagctaatttttgtattttttggtagagacagggtttcaccatggtgcccaggctggtcttgaactcctgggctcaagcaacctgcttgcctgggtctcccaaagtgctgggattacaggcgtgagccacagtgcacagcatgttcagtttttcatcatgaagtataatgtaagttttataaaacatatgtcctctataagggtaaaaaatttcctctgttcccagttttctgagactctgtgttgctatgaataagtgtggaattttgttcagtactttttctccaccagttgatgtcattatgctattttccttctacatcctattgatggaatgtattgctttgatcaagttttgaatattgagccagccttgcatccttagaataaaccatacttgtttgtagagtataattgtttttatatatcatttgacatcattccctttgtttgtattttgttgaggaaatattcctctaatttattggctaataatgtgtagttcttttttcttttgtttcttatgttctaaatgtcttatgtgtggttttgatgtctaggtgatcttgacctttcaacatgaattggaaggagttctcttctaatttttggaagactgtgtagaattggtgttatttgttcttgtcatgtttgatgacctctagtcaaccattgggccagagatttttcttctggaggcttttaaattacatatttattttattggataggtagaactattcgaagtatctatttcttgtgtaataaattttgatagtctgtcctgttgaaggaatatttcatctgtatttgtagcactcccttattcttttgatagcaggatctgcacttctttttatttttaatatttaaaatgtgcatactcattttatgattgagtcttcttagacatttatcagttttattgcgcatcatgctgaaagatgtaatttttgcttcatctctcacttcagagaactagcactttatattaatgatttgtctctattcttgatttctttgatttctgctctgatcggtattatattccacttgctttggttgtatttggctctttctaacttttcaaggtggggttttagattattgatttgagatttttttgcttttttaatgtaagcattacattgtataaatttacctcatatcactattggtttgatcccacaagttttaatgttttcattacattttaattctaatagtttttattttttgagacattctctcttagccatgaattatttaatagtatgcttaattttctggtgtttggcatatttgttactgatttctaatttgttccatgtttgatctgactgtttaaatgtgttaacatttttttatgacccaggatagggtctatcttgtttcgtatagctgcttgaaaagaatgggtgttctgctgttactgggtggagtttctataaatgtctctatgatcctgctcattgttattcaagtcagctatgtccttgctgattttctgtccagcatttctgtcagttgctgagaggggtgttgaagtcctgaacataggccgggtgcagtggctcacgcctgtaatcctagcactttgagaccactaaggcaggtggatcacctgaggccaggagttcgagaccagcctggccaacatggcaaaaccctgtctactaaaaatacaaaaattagccaggcatggtggcgtgtgcctgtaatcccagctgctggggggctgaggcaggaggatcagttgaacgtgggaggcagaggttgcagtgagctgagatctcaccactgcactccagcctgggcaacagagcgagactctgtctcaacaacaacaacaaaaagtcctgaacatgattgtggaagtgtgttgctctttcaagttctatcactttttgtttgcaaagttcaaagctgtattgtttggtacatatacatgtaggtttgccaagtctttgtggtgaattgactcttctgtcattatgtgatgtcatttttttgccttttaatagtcttgtcaatactttacctgatgttctcatagtgactcctgcatattttgattaatgtttgcatggttaatatttcttcattttattttaaagcttacctgtatcattacttatgaagtcagtttctttgaacagcatatactcaggccatgctttttttattcattctgcatatgtctctcttaattggtatgttgaaatgatttacattaaaataattattgatattttagggcttaagtgtgcccttaaatgatttttgtgttcttttttattgttcctctgttatttggggttgtttactagtcttcctataggttacttcaccttttttttttttaataatttgatttgatacatatgtagtgttttttagtatagatcctccttgacttatgatggggttatgtcacaataaacccattgcaagttgaaaatactatgtcaaatatgcatttaatacacctaccctgctgaacatcatagccgatcttgccttcagaatgctcagaaaatttacattagcctgcagttgggcaaaatcatctaacacaaggcctactttataataaagttactgcaaagaattttaaataaaaattcaagtgtggtttctactgaatgcatgtcgcattcgcaccattgtaaagtcaagtagtaagtcgaaccatcctaagtcagggactgtctgtatatatctgcattttttagtgattgttctactattacagtgtaaatatataacttatgacagtttaataagttatcagcaatttagcactttacttccattaggttcctttagcttacctactaatgtaactatcttaagtaatagtaattcctcttcaaaaattgagcgctatgttgcaagatgtaatttttcttttccttttttttgagaccaagtctcactctgtcacccacgctggagtgctgtgatgcgatctcggctctctgcaacctctgcctcccgggttcaagcaattaactgcctcagcttccctagtaatggattacaggcgcccgccaccacgcctggctaatttttgtatttttagtagagacggggtttcaccatcttggccaggttggtcttgaactcttgacctcatgatccacccgcctcggccccccaaagtgctggggttacaggtgtgagccactgcacccggccacaagatgtaatttttactttatctctcacacgtattttacaaaacgtcatgagaaacattgtctcttgaccttttttttttttttttttttttaaagagacagagtctcactctgtcacccaggctggagtgcagtggcacgatcttggctcactgcaacctccgcctcctgggttcaagcgattctcctgcctcagcctcctgagtagctgggattacaggtgtgcgccgccacacccagctaattttgtatttttagtagagacggggtttcaccatgttgctcaggctggtctcaaactcctgaccttgtgatccgccaaccttggcctgtcgacctctttacccattccattgttcattcttctttcttgaaatcccaaaccttctattaacatttcttttcagttatacactgaactttactgtagcctttcttctagagtaacaaatgttctttgttttccttcctctaaagatgtctttatgtttccttcattcccaaagaatatttttgtggaatataagattcagagttggcagttgttttcttttagacttcagagatgtatctctctgttctgtacattattgtttaatataagaaacctactagcattcaaataatcattccctattttacaatgcatcagttctgtcaagcttcattcaaagtgtttttcattgtctctagtgttcagaagtttggctgtgatgtgcgtggcatggaagtttttgggtgtattctatttggcgctccctggtgcttgcccagctttttgatctgtaggattatgccttttgcaaaatttggggaactttcaactattatttcttcaaatattttttcaccccccagtcttgtcttttttagggacttcaataacatgagtggcagatcttgttttacactcccatgggtccttcaggctctcatcttttttctttttccagtctattttctgtcttgttaatattgattaatttttattgaccttccatggtcctcactgattgttttctttgtcatacctaatctgttgagtttgtgcagtgagttttcattttggttttgtattttccagttgtttaatttccattgggtgggttcttttgtacaccttctgtttctttgcttattttttaacgccaaagaaagactctcagagaatagacaactatattccaaagtcatggttctctggtggtttgtcttgacatttgaatagaaatgttaaactatctgggggaatagaaagcccacagtcttctgagttgtgctacaccaatatttctatgaacagatcttacaactgagagtgatctgcagatttttcagagtcatgttctccatggaatgtttgtaaaattccctagctctctgcactgagctgagatcgtgccactgcactccagcctgggcaacagagcgagactccatctcaaaaaaaaaaaaaattctctagctctctatgccttgttgtatcctcaggaaggagtcacctctcttccaggatcactcttgccttttgttattggacacattttcctacctcctgcccagtcttttttaggctctctgtcatacttcctcgcctagtctttaacttgtctctgataaccagatttttcccccataatctgtatctgtattcaagtctctatcctcatccccaaatggatttcaccccgcttgtccatcagtctctgcccatttcttctgtctcccacagacatggtctgtgtagttgttctgcacactacccgtcctcgccccttctcatttccctcactccacggacagctacaggagggcttccatcatttgtcctcttacttccttgttagaactttgtgctgctgaccaccactctgaaccaaaacttctttcttggttcttgaaagttgctgtctttctcctccagagggtctgtgtcttccttccaactcttaaacatttttgtttcccagaatccatcattggccattgctttttcacttgccatgagctctgtgaatgagatggttcctgctgaagacatttactttcaatgatctacagaatttcccaaatctatgtctccagactggatgtttctcacgtctgtggcccactgggcatcttctgcactttctctgcatttgtaaacactgagcctgtatgcgtgtctatgtggccatggccctggccgtggggatgcacccataattataatgagagcaggtgaatgtcatgtggctatgtatgagacattgttgtgaatgttttacatgcatcagctctttcaacatttacagcatctgtgtgtggtaggtaatgttgtttccttcattttgcagagcagaatatagataggctcaggttaagaatttgcccaaggttacacagttatgaagtttggatttaggaatgggaggccacgtagactggcttcagaattcatgtctttaaccactttattgcttctcatgttggggggtttgttttctggtcactatttttactaaagttgattcaacaatgctataatctgttactctcattcgacaatacatcttgactgtttcttcaacttgaggaaggtaaaccaaagccactctttaatgggtgcaaatatctgttgtaactatgtagaagatacagtgtctgggtttgaggacaggggagtgggaaaactgagtagggaagcggtaagacatgcatctggctttaggagtgtttgaagtgcctaaagatcagggtgaatttcccaaatttgaatcttgttgcccaagccacattgcaaccacctctttttctcttacctcgtccccacatccaggcactgccccattctgttcattccacctttttttttagtagaccctccatatatgtgtgtgttttggtgaatggccacacacagcaaagttatttttattgcaattttgttgttgttgtttgagacacagagtctcatactctgccacccagactgaagtgcagtggtgcgatctcagttcactgcaacctccatccccccatgttcaagcaattctcctgcctcagcctcccaagtagctgggattacaggcatgggccaccatgcccggctaatttttgtattttttgtagacacggggtttcaccatgttggccaggctggtctcacactcctgacctcaggtgatccacccgcctcggcctcccgaagtgctggcattacaggcatgagccaccacacccagcctttattgcaatttttggttccctcacagaatgtttaccatgaagctgtgcgtataggtggtaccatgtatgacataccttgacctcaaagataatctacctgggctttttttgtttgtttgttttgagatggagtctcactctgtcacccatgctggtgtgcagtggcgtgatcttggctcacagcagcctctgcctcccgggttcaagcgattctcctgcctcagcctcctgagtagctgggactacaggtgcctgcgaccacacccagctaatttttgtatttttagtagtagtgggatttcaccatgttggccaggatggcctccacctcctgacttcatgatccacccgcctcggcctcccaaagtgctgggattacaggcgtgagccaccgcacctggcctacctgggcttttttggacagatgtacatgattttagaaattgttatgaatgactgtcttgggatcctcaagaacacccccaggtttgacgatttgctgagaagactcaggtctcagcattctgtcatactcaacagctatgatttactgcagcaaaaaaatacaaagcaaatagtaaagggaaaaagccaaaattcagagaaaaccaggcacaatcttctgagtcttgtttcagtgaagtcacaggatgtgccttatttaagttccatctggtacttatgacaacacatgctatatgtccactgggaagcttattagagactcagtgccagggtttttattgggcatgttttctagcacatcccacaattctggacttccagaaggttagcaggggttcagcttttcagctgaaaacgttatccccctttcagctggggggaaaaaaaggcaccgaaaaacagggcagtgagctactcctgttttgggtgggtggagcagtagtaagcctcccaaaatctaaggtcccacactccagcaagggtgaaccttgcaaactcaaaaggatagcagtctccaacctgctgttttatacagtgacttaagtggtactaaaatgctatataagtcaaatttacgtaacattaagcaaataattttttttcagcaaaaaaataatggtcatgactttgtggtgaaggcttatgtaatgattgtaataaattcaggtggctcacgcctgtgataccagcacttttgggaggctgaggcgggtggatcacttgaggtcaggagtttgagaccagcctagccaacatggtgaaatcccatctctacaaaaatgaaaaattagccgggcgtagtggtacatgcatttagtcctagctacttgggaggctgaggcaggaaaatcgcttgaacctgggaggcagaggttgcagtgagccgagatcatgccactgcactccagcctgggtgacagagtgagactgtgtctcaaaaaaaaaaaaaaaaaaaaaatgcctcagttttgttaagaggaaaaagcaaatcctaagttacagtggaacttatgaacaccctagcctagagatttaatttagtgatgaaaaggtacagagagagtctttcaagaaaggacctagtctgctcgcgttctctctctctctctctctatatatatatatgtatatgtgtgtgtacatatggaccacttcaagctacacacacacacacacatatacacgtgtatgaatatatatatatggctataagtggtgcgacttgcaggtactccctttgttcacctttgtaaagatgttattgccagttcagtgtgtatttctatagtatatatgtaaacaatttgtcatccttttgttgctgcttttgaaactagttcatggcttcagtgggggagagatttaaataatatgggtttataatttctgcattattaaatgcagataacttgtgattaaagagtatgttattggaaaaaaaaaaa

SEQ ID NO: 138228 - DNA, 1884 bp, Artificial Sequence
  derived and/or modified sequence
atggccgccgccgtgctgaccgacagagcccaggtgagcgtgaccttcgacgacgtggccgtgaccttcaccaaggaggagtggggccagctggacctggcccagagaaccctgtaccaggaggtgatgctggagaactgcggcctgctggtgagcctgggctgccccgtgcccaaggccgagctgatctgccacctggagcacggccaggagccctggaccagaaaggaggacctgagccaggacacctgccccggcgacaagggcaagcccaagaccaccgagcccaccacctgcgagcccgccctgagcgagggcatcagcctgcagggccaggtgacccagggcaacagcgtggacagccagctgggccaggccgaggaccaggacggcctgagcgagatgcaggagggccacttcagacccggcatcgacccccaggagaagagccccggcaagatgagccccgagtgcgacggcctgggcaccgccgacggcgtgtgcagcagaatcggccaggagcaggtgagccccggcgacagagtgagaagccacaacagctgcgagagcggcaaggaccccatgatccaggaggaggagaacaacttcaagtgcagcgagtgcggcaaggtgttcaacaagaagcacctgctggccggccacgagaagatccacagcggcgtgaagccctacgagtgcaccgagtgcggcaagaccttcatcaagagcacccacctgctgcagcaccacatgatccacaccggcgagagaccctacgagtgcatggagtgcggcaaggccttcaacagaaagagctacctgacccagcaccagagaatccacagcggcgagaagccctacaagtgcaacgagtgcggcaaggccttcacccacagaagcaacttcgtgctgcacaacagaagacacaccggcgagaagagcttcgtgtgcaccgagtgcggccaggtgttcagacacagacccggcttcctgagacactacgtggtgcacagcggcgagaacccctacgagtgcctggagtgcggcaaggtgttcaagcacagaagctacctgatgtggcaccagcagacccacaccggcgagaagccctacgagtgcagcgagtgcggcaaggtgttcctggagagcgccgccctgatccaccactacgtgatccacaccggcgagaagcccttcgagtgcctggagtgcggcaaggccttcaaccacagaagctacctgaagagacaccagagaatccacaccggcgagaagcccttcgtgtgcagcgagtgcggcaaggccttcacccactgcagcaccttcatcctgcacaagagagcccacaccggcgagaagcccttcgagtgcaaggagtgcggcaaggccttcagcaacagaaaggacctgatcagacacttcagcatccacaccggcgagaagccctacgagtgcgtggagtgcggcaaggccttcaccagaatgagcggcctgaccagacacaagagaatccacagcggcgagaagccctacgagtgcgtggagtgcggcaagagcttctgctggagcaccaacctgatcagacacgccatcatccacaccggcgagaagccctacaagtgcagcgagtgcggcaaggccttcagcagaagcagcagcctgacccagcaccagagaatgcacaccggcaagaaccccatcagcgtgaccgacgtgggcagacccttcaccagcggccagaccagcgtgaccctgagagagctgctgctgggcaaggacttcctgaacgtgaccaccgaggccaacatcctgcccgaggagaccagcagcagcgccagcgaccagccctaccagagagagaccccccaggtgagcagcctgtag

SEQ ID NO: 138229 - DNA, 1884 bp, Artificial Sequence
  derived and/or modified sequence
atggctgccgcagtgttgacagatcgcgctcaagtctcagtgacatttgatgatgtggccgtcacattcaccaaagaagagtggggccaattggatctcgcccagcggaccttgtaccaggaggtgatgctggaaaattgcggtttgctggtgagtctcggctgcccagtgccaaaggcagagttgatctgtcacctagaacacgggcaggaaccatggacaagaaaggaggacctgtctcaggatacatgcccaggagacaaaggtaaaccaaaaacgactgagccaaccacatgcgagccagccctgagtgagggaattagtctgcagggccaggtgacacagggcaactccgtggacagtcagttgggtcaggccgaagaccaggatgggctgtcagagatgcaggaaggacacttcagacctggcattgaccctcaggaaaagtctccgggaaagatgagtccggagtgtgatggcttagggaccgcggacggcgtttgttcccgcatcggacaggagcaggtgtctcccggcgaccgggttcggtcccataattcatgcgaatccggaaaggaccccatgattcaggaagaggagaacaactttaagtgctccgaatgcggtaaagtgtttaataagaagcacctgcttgctggccacgagaaaatccactctggtgttaaaccttatgagtgtacagaatgcggcaagaccttcattaaatctacccacctgttacagcaccacatgattcacactggtgaaaggccgtacgagtgcatggaatgcggtaaagcattcaatcgtaaaagctatctgacacagcaccagaggatccatagcggcgagaagccatacaagtgcaacgagtgtggcaaggccttcactcatcgatccaatttcgtacttcacaatcgtcggcacacaggcgagaaatcctttgtgtgcacggagtgtggccaggttttcaggcaccggccaggctttttgagacattatgtggtacactccggcgagaacccgtacgagtgcctggagtgcggaaaggtttttaaacacagatcttacctgatgtggcaccaacagactcacactggtgaaaagccctatgagtgtagcgagtgcgggaaggttttcctagagtctgcggctctgattcaccactatgttatccatacaggggagaaaccctttgaatgcttagaatgcggcaaggcctttaatcatcggtcttatctgaaacgccaccagcgcatccataccggagagaagcctttcgtctgctctgagtgtggtaaggcctttactcactgcagcacattcattctgcataagagagcccacactggcgagaaaccattcgagtgtaaagagtgcggcaaggctttcagcaacagaaaggacctgatccggcatttttccatccacactggggagaagccatatgagtgcgtggagtgtggtaaagcctttacccgaatgtccggtctaacacgccataaacgcatacacagcggtgagaaaccctatgaatgtgtggagtgtgggaagagcttctgttggagtacaaacttgatacggcatgctataatccatacgggcgaaaagccttataagtgttctgagtgcgggaaagcattctcccggtcttccagcctcacacaacaccagcggatgcacacaggcaaaaatccaatcagcgttaccgacgtcggccgcccctttaccagcgggcagaccagcgtgaccctcagggagctgctgctcggcaaagattttctcaatgtgactaccgaggccaatatactgcccgaggaaacttccagcagtgcgtcagatcagccatatcagcgggaaacaccccaggtctccagtctgtag

SEQ ID NO: 138230 - DNA, 1884 bp, Artificial Sequence
  derived and/or modified sequence
atggctgctgccgtgctgactgatagagcccaggtctccgtgacattcgacgatgtggctgttacctttacaaaggaagaatggggacagctggacttggcccagcggacgttgtatcaggaagtgatgctcgagaactgtggccttctagttagcctcggctgccctgttccaaaagcagagctcatatgccatctggagcatgggcaggagccttggacccgcaaggaagacctgagccaagacacatgcccaggcgataaagggaagccaaagacaacagagcccactacttgtgagccggctttatcagaaggtatctcactccagggacaagtaactcaagggaattccgtcgacagccaactcggccaggctgaggatcaagatggactgtcagagatgcaggaaggacactttcgccctggcattgatccccaagaaaagagtcccggaaagatgtccccagagtgcgacggccttggaacagcagacggtgtctgctcacggattgggcaagaacaggtcagtccgggagatcgggtgcgatcgcataacagctgcgagagcggtaaggatcccatgattcaagaagaggagaataactttaagtgttcggagtgcgggaaggtcttcaacaagaaacacctcctcgccggacacgagaagatccattcaggggtgaagccgtacgagtgtaccgaatgcggcaagacttttattaaatcaacccatttgcttcagcatcatatgatccacaccggcgaacgcccttacgagtgtatggaatgcgggaaggcctttaatcgcaagtcatatctgacccagcaccaacgcatacacagcggagaaaagccctataagtgtaacgaatgtgggaaagcatttacccataggagtaatttcgtgctccataaccgccgccacacaggagaaaagtctttcgtttgcacggaatgcggccaggtgttccggcacaggccgggctttctacgacactatgtggtacattccggcgaaaacccttatgagtgtctggagtgtggaaaagtcttcaagcataggagttacctgatgtggcaccagcagacccacactggcgaaaagccatacgagtgcagcgagtgcggtaaggtatttctcgagagcgctgcactaatccaccactatgtgattcacaccggggagaagcccttcgaatgtctggagtgtggaaaggcatttaatcaccgtagctacctgaagcggcatcagcggatccatacaggcgaaaagcccttcgtctgtagcgaatgtggcaaggcgtttacccattgcagcacattcatcctgcacaagcgggcccatacaggcgagaagccctttgaatgtaaagaatgtgggaaggccttttccaaccgaaaggatttgattagacatttttccattcacaccggagagaaaccctacgaatgtgtagagtgcgggaaggctttcacacggatgtccgggttaacccgccacaagagaatccattctggagaaaaaccatacgaatgtgtggagtgcggaaaatctttctgctggtctacaaacctgatcaggcatgctattattcatacaggagaaaaaccatacaaatgcagcgaatgcggtaaagcctttagccgcagcagttcactgacgcagcatcagcgcatgcacactggtaagaaccctataagcgtgacagacgttggccgcccttttacttccgggcagacatctgtgaccctacgtgagctgctcctgggtaaggacttcctgaatgtgacgactgaagccaacattctgcctgaagagacttcttccagcgcatcagaccagccatatcaacgcgaaacgccacaggtcagctcactgtag

SEQ ID NO: 138231 - DNA, 1884 bp, Artificial Sequence
  derived and/or modified sequence
atggctgctgctgtgctgacagaccgggcccaggtgtctgtgacctttgatgatgtggccgtgaccttcaccaaggaggagtggggccagctggacctggcccagaggaccctgtaccaggaggtgatgctggagaactgtggcctgctggtgtccctgggctgccctgtgcccaaggccgagctgatctgccacctggagcacggccaggagccctggaccaggaaagaagacctgagccaggacacctgccctggggacaagggcaagcccaagaccacagagcccaccacctgtgagcccgccctgtctgagggcatcagcctgcagggccaggtgacccagggcaacagcgtggacagccagctgggccaggccgaggaccaggacggcctgtctgagatgcaggagggccacttccggcccggcatcgacccccaggagaagagccctgggaagatgagcccagaatgtgatggcctgggcacagcagatggagtgtgcagcagaattggccaggagcaggtgtcccctggggacagagtgcgcagccacaacagctgtgagagcggcaaggaccccatgatccaggaggaggagaacaacttcaagtgcagtgaatgtgggaaggtgttcaacaagaagcacctgctggccggccacgagaagatccacagcggcgtgaagccctatgagtgcacagaatgtgggaagaccttcatcaagagcacccacctgctgcagcaccacatgatccacactggagagcggccctatgagtgcatggagtgtgggaaggccttcaacaggaagagctacctgacccagcaccagaggatccacagcggggagaagccctacaagtgcaatgaatgtgggaaggccttcacccacaggagcaactttgtgctgcacaacagaagacacactggagagaagagctttgtgtgcacagaatgtggccaggtgttccgccaccggcccggcttcctgcggcactacgtggtgcacagcggggagaacccctatgagtgcctggagtgtgggaaggtgttcaagcacaggagctacctgatgtggcaccagcagacccacactggagagaagccctatgagtgcagtgaatgtgggaaggtgttcctggagagcgctgccctgatccaccactacgtgatccacactggagagaagccctttgagtgcctggagtgtgggaaggccttcaaccacaggagctacctgaagaggcaccagaggatccacactggagagaagccctttgtgtgcagtgaatgtgggaaggccttcacccactgcagcaccttcatcctgcacaagagggcccacactggagagaagccctttgagtgcaaggaatgtgggaaggccttcagcaacaggaaggacctgatccgccacttcagcatccacactggagagaagccctatgaatgtgtggagtgtgggaaggccttcaccaggatgagcggcctgaccaggcacaagaggatccacagcggggagaagccctatgaatgtgtggagtgtgggaagagcttctgctggagcaccaacctgatcagacatgccatcatccacactggagagaagccctacaagtgcagtgaatgtgggaaggccttcagccgcagcagcagcctgacccagcaccagaggatgcacacaggcaagaaccccatctctgtgacagatgtgggccggcccttcaccagcggccagacctctgtgaccctgcgggagctgctgctgggcaaggacttcctgaatgtgaccacagaggccaacatcctgcctgaggagaccagcagcagcgccagtgaccagccctaccagcgggagaccccccaggtgagcagcctgtag

SEQ ID NO: 138232 - DNA, 1884 bp, Artificial Sequence
  derived and/or modified sequence
atggccgccgccgtgctgaccgaccgggcccaggtgagcgtgaccttcgacgacgtcgcagtgaccttcaccaaagaagagtgggggcaactggacctggcccagaggaccctgtaccaagaggtgatgctagaaaactgtggactattagtgagcctcggatgtccagtgcctaaggccgaactgatttgccatttggagcatgggcaagaaccctggactcggaaggaggacttgtctcaagacacatgtcctggagataagggtaagccaaagacgacagagcccaccacttgtgagccagctctgagcgaagggatatctctccaagggcaagtgacgcaggggaacagcgtagacagccagctaggccaggccgaggatcaggacgggttatcagagatgcaagagggacattttagacccggcatcgaccctcaggaaaaatccccagggaagatgtcacctgagtgcgatggccttgggactgcggacggggtctgcagccggatcggccaagagcaagttagtccgggcgaccgagtgaggtcccataacagttgtgagtcagggaaagatcctatgattcaggaagaagagaataattttaagtgcagcgagtgcgggaaagttttcaataaaaagcacctgctagcgggacatgaaaagattcattctggcgtgaagccctacgagtgcactgaatgcgggaaaacatttattaagagcacccacctgctccaacaccatatgatccataccggcgaacggccctatgaatgcatggaatgtgggaaggcatttaaccggaagtcttatttaacacagcatcagcgcatccattcgggagaaaaaccttacaagtgcaacgagtgtgggaaagcgtttacccaccgcagtaacttcgtcctgcataaccggcgccacacaggggaaaagagctttgtgtgcacagagtgtggccaggttttcaggcatagacctggattcctaaggcattatgtggtccactctggcgagaacccctacgagtgtctcgaatgcggaaaggtgttcaagcatcggagttatcttatgtggcatcaacagacacacacaggcgagaagccttacgaatgctctgaatgtggaaaggtgttcctggaatctgcagcgctgatccaccactacgtgatccatacgggcgagaaaccgttcgaatgtctggagtgtggtaaggccttcaaccaccgttcttacttaaagaggcaccagcggattcataccggtgagaagcccttcgtgtgttctgagtgcggtaaggccttcactcactgctcaaccttcattctccacaagcgcgcacataccggggagaaaccattcgaatgtaaagaatgcggcaaagcgttttcaaataggaaagatctcatccggcatttcagtatacataccggagagaagccatatgagtgcgtggagtgtggcaaggcctttacaagaatgtctgggttaactcgacacaaacgcatacacagcggagaaaagccctacgaatgcgtggagtgtggaaaatccttttgttggagtaccaatctcattcggcatgccatcatacacactggcgaaaaaccctacaagtgctccgagtgtggaaaggcattcagcaggtcctcaagcttgacccaacatcaaagaatgcataccgggaaaaaccctattagtgttacggacgtggggaggccattcacttcagggcaaacttctgtgaccctccgggaactgctgttgggaaaagatttccttaatgttacaacagaggctaatatacttcctgaagagaccagctcaagtgcctcagatcagccttaccagagagaaacccctcaagtttcatctctgtag

SEQ ID NO: 138233 - DNA, 1884 bp, Artificial Sequence
  derived and/or modified sequence
atggccgccgccgtgctgaccgaccgggcccaggtgagcgtgaccttcgatgacgtggctgtaacattcactaaagaggaatggggtcagctggacctggcccagcgcaccctatatcaggaggtcatgttggaaaattgcgggctgctggtgagcctgggctgcccagtgccaaaggcagagctgatctgccatcttgaacatgggcaggaaccctggacgaggaaggaagacttgtcacaggatacctgccctggggataagggaaaacctaaaactactgagcccacaacttgcgagccggcactctccgaggggatttctctacaaggacaggttactcagggcaacagtgtggactcccagctgggccaagctgaagatcaggacggtctgagtgagatgcaagagggccatttcagacccggaattgacccccaggaaaaatcacctgggaaaatgtctcccgaatgcgacggtctgggaaccgctgacggcgtgtgcagcagaattggccaggaacaggtgtcgcccggagaccgtgtacggagccacaactcttgcgagtccggcaaggatccaatgatacaggaagaagaaaataactttaaatgctctgaatgcggaaaggtattcaataagaagcacctgctggcaggtcatgagaagattcattccggagttaagccgtatgagtgcacagaatgtggaaaaacattcatcaaatcgacacacctgctacaacatcacatgattcacacgggcgagcgcccttatgagtgtatggagtgtggcaaagcatttaatagaaagtcttacctaacacagcatcagaggattcatagcggtgagaaaccctacaaatgtaatgaatgcggaaaggcctttactcataggtcaaatttcgtcttacacaataggcggcacaccggtgagaagtccttcgtgtgtacagagtgcggacaggtttttagacatagaccagggttcctccgccattacgtcgtacactccggcgaaaatccttatgaatgcctcgagtgtgggaaagtttttaaacataggtcttatcttatgtggcatcagcagacccatactggcgagaagccttatgaatgcagcgagtgcggcaaagtgttcctcgagtccgccgccctgatccaccactatgtgatccatacaggggaaaagccattcgaatgtctcgagtgtggaaaggcattcaaccaccggtcctacctgaaacggcatcaacgaattcatactggagagaaacctttcgtgtgctccgagtgcggtaaggccttcacacactgttccaccttcattcttcacaagcgggctcataccggagagaagccattcgagtgcaaggagtgcgggaaagctttcagtaacagaaaagacctaattcgccacttctccatacacacgggcgaaaagccatacgaatgtgttgaatgcggaaaggccttcacccggatgtcaggccttacgcggcataagagaattcactcgggggaaaaaccctatgaatgtgtcgagtgcggcaaaagcttttgctggagtaccaacttgatacgtcacgctatcatacacaccggggagaagccatataaatgcagcgagtgcggaaaagcattcagccggtcctcctccttgacacaacatcaacggatgcacaccgggaaaaatcctatcagtgtgacagacgtcggaaggcctttcacctccggacagacctccgtcacactaagggaattactgctgggcaaggactttctgaacgtaactactgaagctaatatactgccggaggagacctcctcatcggcctctgatcagccataccagcgggaaacaccacaggtgtccagtctgtag

SEQ ID NO: 138234 - DNA, 1884 bp, Artificial Sequence
  derived and/or modified sequence
atggcagccgctgtgttgactgaccgagctcaggtaagtgtgacattcgatgacgtcgccgttaccttcactaaggaggagtggggccagttagacctggcacagaggaccttgtaccaagaggtgatgctcgaaaactgtggattgctggttagtttgggatgcccagttcctaaagcagagctcatatgtcatcttgaacacggacaggaaccttggacacgcaaggaagacctctcgcaagacacgtgccccggtgataaaggcaaacctaaaaccacagagcccacaacatgcgagcctgccctttctgagggcatctctctccaagggcaggtcacgcagggtaattcggtggatagccagctgggccaggcggaggaccaggacggcctgtccgagatgcaagagggccacttccggccaggcatagatccccaggaaaaaagccccggaaagatgagcccagaatgtgacgggctcggcaccgccgacggagtgtgtagtagaattgggcaggagcaagtgagcccaggagaccgcgttagatctcacaacagctgcgaatctggtaaagaccctatgattcaggaggaagaaaacaactttaaatgtagcgagtgtgggaaggtctttaacaagaaacacctcctggccggtcatgagaagatccattcaggtgtcaagccttacgagtgtactgaatgtggcaaaacatttattaagtctactcatcttttacaacatcacatgattcatacaggagagagaccctacgaatgtatggaatgcggaaaggccttcaatagaaagtcctatctcactcagcaccagcggatccatagcggggaaaagccttataagtgcaacgagtgtggcaaggcattcacgcacagaagcaatttcgtattacacaatcgcagacacactggagagaagagctttgtgtgtacagaatgtggacaggtctttcgacacagacccggatttctccgacactacgttgtccacagtggtgagaatccctacgagtgcttagagtgcggtaaggtgtttaaacatagatcctacctaatgtggcaccagcagacccatactggggagaagccctatgagtgttccgagtgcggcaaagtattcctggaatccgcagcactaattcaccattatgtgatacacacaggtgaaaagccgtttgagtgtttggaatgcggaaaggcatttaaccataggagctatctgaaacgacaccaacggattcacactggcgagaagccatttgtgtgttctgagtgcgggaaagcctttacgcattgcagcacattcatcctccataaaagagcccacaccggagagaagccatttgaatgcaaagagtgcggcaaggcgttctctaatcgcaaggacttgatccgtcatttttcaatccacaccggggagaagccctacgaatgtgtagagtgcgggaaagccttcactcgcatgagtgggctcacacggcacaagaggatccactcgggcgaaaagccttatgaatgtgtagaatgcgggaagagtttttgttggagcaccaacttgatccgccatgcaattatccataccggtgagaaaccttataaatgttccgagtgtggtaaggccttctcccgtagcagtagcttgacacaacaccagcgaatgcacacgggaaagaaccctatcagcgtcactgatgtggggcgaccattcacaagtgggcagacctctgtgactctgagggagctccttttaggcaaagattttcttaatgtaacgacggaggcaaatatcctgcctgaagagacatccagtagcgcatcagaccagccctaccagcgcgagactccgcaggtgtcttccctgtag

SEQ ID NO: 138235 - DNA, 1884 bp, Artificial Sequence
  derived and/or modified sequence
atggcggcagccgtgctcacggacagggcccaggtctcggtgacgtttgacgacgtggctgttacttttactaaggaggagtggggccagttggatttagcgcagcgaacgctgtaccaggaggtcatgctggagaactgcgggctcctggtgagcttaggatgccctgtgcctaaggctgagcttatctgccaccttgagcacggccaagagccatggactagaaaagaggacctgtcacaggacacgtgcccaggagataaaggtaagcccaaaaccactgagccgacaacctgcgaacccgctcttagtgaaggaatctcactacaaggtcaggtcacacaaggcaattctgtggatagccagctaggccaggcagaagaccaggatggcctctctgaaatgcaggaggggcacttccgcccaggcatcgaccctcaggaaaagagccccggtaagatgtcccccgagtgtgacgggctgggaaccgcagatggagtgtgttcacgcatcgggcaggagcaagtcagccctggagaccgggtgcgctctcacaattcttgtgaatccgggaaagatcctatgatccaagaggaggaaaataatttcaagtgctcagagtgcggaaaggtctttaataaaaagcatctgctggctggacacgaaaagattcattcgggggtgaagccttacgagtgtactgagtgtgggaaaacgtttattaagagcacgcatctgctgcaacaccatatgatccatacaggtgagcggccatacgaatgcatggagtgcggcaaggcttttaaccgtaagagctacctgacacaacaccagaggatacacagcggcgaaaagccctataagtgtaatgagtgtgggaaagccttcacccacagatccaactttgtcctgcacaataggcggcatacaggcgaaaagagcttcgtctgcaccgaatgtggccaggtgtttaggcatcggccagggtttctcaggcactacgttgtacactctggcgagaatccctatgaatgcctggaatgcggaaaggtgtttaaacaccgcagctatctgatgtggcaccagcaaacacacacaggcgagaaaccatatgagtgtagcgaatgtggcaaagtatttctggaatccgcagcactgatccatcactacgtgatccacaccggggaaaaaccatttgagtgccttgagtgcgggaaagcctttaaccatcgctcctatctgaagaggcaccagcgaatacacacgggggaaaagccctttgtatgttctgaatgcggaaaagcatttacccattgctccacatttattctacacaagagagcccacacgggggaaaagcctttcgagtgtaaagaatgtggcaaggcattttctaatagaaaggacctgattcggcatttttccatccacaccggggagaaaccatatgagtgtgtggagtgcgggaaggcatttactcgtatgtctgggttgacgagacacaaacgaatccattcaggagagaagccctacgagtgcgtggagtgtggaaaaagtttctgttggtctaccaatttgatccgccatgcgattatacatacaggcgaaaagccttacaagtgctcagagtgtgggaaagccttctcacggagctcatctctgacacagcaccagagaatgcacacaggaaaaaacccaatatctgtgaccgacgttgggaggccatttaccagtggtcagaccagtgtgacgctaagggagctgctgcttggtaaggattttctgaatgtaaccacagaagccaacatcctgccagaagagacttcatcatctgcctcagaccaaccatatcaacgcgagaccccccaggttagctccctgtag

SEQ ID NO: 138236 - DNA, 12161 bp, Artificial Sequence
  derived and/or modified sequence
attttcttctgcacttctgtctggagaggtctgtagccactgagggccccggtcggggccgctttgcaggtccctagtcaggaccgagcaggggagtaggataggaatccccgccgcacctttgtacgagcctgaccccttccgtgggtttgttcctgggtcgccgtcaagctgcggtctctcctcccccgcccttcagccccgcggtctccaggggcggcgccctgggtctggaacgcggttgccaccgaggaggcggcggccctgcgtctggaacgccgttgccaccgaggaggcggcggccccgagcgcgcctggaagccccgggcaaccggccagggtcgggcacaggtggggtccgtcaggccgcccggggctcctctgtcccagctctgcggcccagggggtgacgtgatggcggcagcggtgctgacggaccgggcccaggtgtctgtgacctttgatgatgtggctgtgactttcaccaaggaggagtgggggcagctggacctagctcagcggaccctgtaccaggaggtgatgctggaaaactgtgggctcctggtgtctctggggtgtcctgttcccaaagctgagctgatctgccacctagagcatgggcaggagccatggaccaggaaggaagacctctcccaagacacctgtccaggcgacaaaggaaaacctaagaccacagaacctaccacttgtgagccagccttgtcagagggaatctcacttcagggacaagtgacacaaggaaactcagtggactcacagttggggcaagccgaggatcaggatgggctatcagaaatgcaggaaggacacttcagaccaggaatagatccccaggagaagtctcctgggaagatgagccctgaatgtgatggtttagggacagctgatggtgtgtgttcaaggattggacaggagcaagtctctccaggagatagagtccgtagccataactcatgtgagtcaggtaaagatcccatgattcaggaagaggaaaataactttaaatgcagtgaatgtggaaaagtatttaacaagaaacacctccttgctggacatgagaaaattcactctggagttaagccctatgaatgcacagaatgtgggaaaacctttattaagagcacacatctcctgcaacatcacatgatccacactggggagaggccctatgagtgcatggagtgtggaaaggccttcaaccgcaagtcataccttacccagcaccagcggattcacagtggagagaagccttacaagtgcaatgaatgcggaaaggccttcacccaccgctccaattttgtcttgcataacaggagacacactggagaaaaatcctttgtgtgcacagaatgtggccaagtctttcgacataggccaggctttctccggcactatgttgtccacagtggtgagaatccctatgagtgcttggagtgtggcaaggtcttcaaacacaggtcatatctcatgtggcaccagcagactcataccggggagaagccctatgagtgcagtgaatgtgggaaggtcttcttggagagtgcagccctgattcaccactatgtcatccacactggagagaagccctttgagtgcctcgagtgtgggaaggctttcaaccaccgatcctacctcaagaggcaccagcggattcacactggggagaagcccttcgtgtgcagtgaatgtggaaaggccttcacccactgctctacttttatcttgcataaaagggcccacactggagaaaagcctttcgagtgcaaagagtgtgggaaagcctttagcaatcggaaggacctcattcgccacttcagcatccacactggagagaagccctatgagtgcgtggagtgtggaaaggccttcacccgcatgtcgggcctcacgaggcacaagcggattcatagtggagagaagccctatgaatgtgttgagtgtgggaaatcgttttgctggagcacaaacctcattcgacatgccattatccacactggagagaagccctataaatgtagtgaatgtggaaaggccttcagtcgcagctcgtccctcactcagcatcaaaggatgcatactgggaaaaatcccatcagtgtaacagatgtgggaagaccttttacaagtggacaaacctcagttacccttcgagaacttcttttagggaaggactttttgaatgtaaccactgaggcaaatattttgccagaggaaacatcttcctctgcatctgatcaaccataccaaagagaaaccccacaagtgtcttcactgtgagaaaaccttctgttgctgaatattacttgtcatctgaagagtcatattagaaattcgttcagtctagagccttattctccatctgataatttatcctggagagagacccagtggttattgtgcacataggagaaccttcagctgcatctttctccttagtttacagtgcaattttatctcaggaattatttttaaaaggaggaggggacatagaaaaaatgaaatgcaagcacacatcttttcaggcttctctgccaagcctatggcgctttgtcatggatttcttagtgtatttgggggaagggaaatgtttcaaggtaaagaaccttgaccctttatgtgcttgtatgtacatttattgctatccagtgtcagaacagttagtttaggaaaagtatgcaaactttaatcgcacatcttctgtattccacaatagtacttactcttgagaagcataactttatgacaacttagggggcttgagccatgaaatactcacgtttaagtcagtaaggatacacatgttaacattcaggcttttgtcttgatgcccgtcttttggtttacgtcatcattgtagccatatggtaaatttttatttgttaaatttttaaaaattacttagctcaaaatgtcagtggtaaatttttaaattgagtaaagtgattcttctttgctcttatttaaaatcgacagcatttctagttcctttgacattccatataatttttaggattagtttgtacttatttacaaaacagtcttgttcagatttttacagaaattgagttaagtctgtggattaatctgttaagaattggtatctttactatgttgggtcttgtagttcatgagtgcaggagtaggcctcttaatttataatagttaagcattccttaaagtatttcattaatgttaaaaattttcagcgtatagatccctatgcatttttgttagaatttgcatcctagggtgcttttttgtttgtgtgtgtgtgtaatttgagtgattgtaaatggcattgatgtttgaactttgaattgcacacaatttttggtagtatacagaaatataatatttttggacattgttttgctaccctgcaaccttattgagttcacttattatttttagctatttctttcgacagaatccttggaattttctatatagaaatgtcatctgcaaatacagaccattttttatctttcatcttacctgtaatataccttttatttcctttttgtttgtcttattgcattgcacaagctgggacttccattatagcgttgaataggaatagtgagaaaggccatccttacctggttcctgatagtaggggggacaatgttcagttttttgtttttttgttttttgtttgagacagggtctcgctctgtcacccaggctggagtgcagtggcacgatcttgtctcaccatagccttaagttcctgggctcaagtgatccccccacctcagccctcaccaccccccagtagctggtactacaagcatgcaccaccagtcccagctaatttttgtattttttggtagagacagggtttcaccatggtgcccaggctggtcttgaactcctgggctcaagcaacctgcttgcctgggtctcccaaagtgctgggattacaggcgtgagccacagtgcacagcatgttcagtttttcatcatgaagtataatgtaagttttataaaacatatgtcctctataagggtaaaaaatttcctctgttcccagttttctgagactctgtgttgctatgaataagtgtggaattttgttcagtactttttctccaccagttgatgtcattatgctattttccttctacatcctattgatggaatgtattgctttgatcaagttttgaatattgagccagccttgcatccttagaataaaccatacttgtttgtagagtataattgtttttatatatcatttgacatcattccctttgtttgtattttgttgaggaaatattcctctaatttattggctaataatgtgtagttcttttttcttttgtttcttatgttctaaatgtcttatgtgtggttttgatgtctaggtgatcttgacctttcaacatgaattggaaggagttctcttctaatttttggaagactgtgtagaattggtgttatttgttcttgtcatgtttgatgacctctagtcaaccattgggccagagatttttcttctggaggcttttaaattacatatttattttattggataggtagaactattcgaagtatctatttcttgtgtaataaattttgatagtctgtcctgttgaaggaatatttcatctgtatttgtagcactcccttattcttttgatagcaggatctgcacttctttttatttttaatatttaaaatgtgcatactcattttatgattgagtcttcttagacatttatcagttttattgcgcatcatgctgaaagatgtaatttttgcttcatctctcacttcagagaactagcactttatattaatgatttgtctctattcttgatttctttgatttctgctctgatcggtattatattccacttgctttggttgtatttggctctttctaacttttcaaggtggggttttagattattgatttgagatttttttgcttttttaatgtaagcattacattgtataaatttacctcatatcactattggtttgatcccacaagttttaatgttttcattacattttaattctaatagtttttattttttgagacattctctcttagccatgaattatttaatagtatgcttaattttctggtgtttggcatatttgttactgatttctaatttgttccatgtttgatctgactgtttaaatgtgttaacatttttttatgacccaggatagggtctatcttgtttcgtatagctgcttgaaaagaatgggtgttctgctgttactgggtggagtttctataaatgtctctatgatcctgctcattgttattcaagtcagctatgtccttgctgattttctgtccagcatttctgtcagttgctgagaggggtgttgaagtcctgaacataggccgggtgcagtggctcacgcctgtaatcctagcactttgagaccactaaggcaggtggatcacctgaggccaggagttcgagaccagcctggccaacatggcaaaaccctgtctactaaaaatacaaaaattagccaggcatggtggcgtgtgcctgtaatcccagctgctggggggctgaggcaggaggatcagttgaacgtgggaggcagaggttgcagtgagctgagatctcaccactgcactccagcctgggcaacagagcgagactctgtctcaacaacaacaacaaaaagtcctgaacatgattgtggaagtgtgttgctctttcaagttctatcactttttgtttgcaaagttcaaagctgtattgtttggtacatatacatgtaggtttgccaagtctttgtggtgaattgactcttctgtcattatgtgatgtcatttttttgccttttaatagtcttgtcaatactttacctgatgttctcatagtgactcctgcatattttgattaatgtttgcatggttaatatttcttcattttattttaaagcttacctgtatcattacttatgaagtcagtttctttgaacagcatatactcaggccatgctttttttattcattctgcatatgtctctcttaattggtatgttgaaatgatttacattaaaataattattgatattttagggcttaagtgtgcccttaaatgatttttgtgttcttttttattgttcctctgttatttggggttgtttactagtcttcctataggttacttcaccttttttttttttaataatttgatttgatacatatgtagtgttttttagtatagatcctccttgacttatgatggggttatgtcacaataaacccattgcaagttgaaaatactatgtcaaatatgcatttaatacacctaccctgctgaacatcatagccgatcttgccttcagaatgctcagaaaatttacattagcctgcagttgggcaaaatcatctaacacaaggcctactttataataaagttactgcaaagaattttaaataaaaattcaagtgtggtttctactgaatgcatgtcgcattcgcaccattgtaaagtcaagtagtaagtcgaaccatcctaagtcagggactgtctgtatatatctgcattttttagtgattgttctactattacagtgtaaatatataacttatgacagtttaataagttatcagcaatttagcactttacttccattaggttcctttagcttacctactaatgtaactatcttaagtaatagtaattcctcttcaaaaattgagcgctatgttgcaagatgtaatttttcttttccttttttttgagaccaagtctcactctgtcacccacgctggagtgctgtgatgcgatctcggctctctgcaacctctgcctcccgggttcaagcaattaactgcctcagcttccctagtaatggattacaggcgcccgccaccacgcctggctaatttttgtatttttagtagagacggggtttcaccatcttggccaggttggtcttgaactcttgacctcatgatccacccgcctcggccccccaaagtgctggggttacaggtgtgagccactgcacccggccacaagatgtaatttttactttatctctcacacgtattttacaaaacgtcatgagaaacattgtctcttgaccttttttttttttttttttttttaaagagacagagtctcactctgtcacccaggctggagtgcagtggcacgatcttggctcactgcaacctccgcctcctgggttcaagcgattctcctgcctcagcctcctgagtagctgggattacaggtgtgcgccgccacacccagctaattttgtatttttagtagagacggggtttcaccatgttgctcaggctggtctcaaactcctgaccttgtgatccgccaaccttggcctgtcgacctctttacccattccattgttcattcttctttcttgaaatcccaaaccttctattaacatttcttttcagttatacactgaactttactgtagcctttcttctagagtaacaaatgttctttgttttccttcctctaaagatgtctttatgtttccttcattcccaaagaatatttttgtggaatataagattcagagttggcagttgttttcttttagacttcagagatgtatctctctgttctgtacattattgtttaatataagaaacctactagcattcaaataatcattccctattttacaatgcatcagttctgtcaagcttcattcaaagtgtttttcattgtctctagtgttcagaagtttggctgtgatgtgcgtggcatggaagtttttgggtgtattctatttggcgctccctggtgcttgcccagctttttgatctgtaggattatgccttttgcaaaatttggggaactttcaactattatttcttcaaatattttttcaccccccagtcttgtcttttttagggacttcaataacatgagtggcagatcttgttttacactcccatgggtccttcaggctctcatcttttttctttttccagtctattttctgtcttgttaatattgattaatttttattgaccttccatggtcctcactgattgttttctttgtcatacctaatctgttgagtttgtgcagtgagttttcattttggttttgtattttccagttgtttaatttccattgggtgggttcttttgtacaccttctgtttctttgcttattttttaacgccaaagaaagactctcagagaatagacaactatattccaaagtcatggttctctggtggtttgtcttgacatttgaatagaaatgttaaactatctgggggaatagaaagcccacagtcttctgagttgtgctacaccaatatttctatgaacagatcttacaactgagagtgatctgcagatttttcagagtcatgttctccatggaatgtttgtaaaattccctagctctctgcactgagctgagatcgtgccactgcactccagcctgggcaacagagcgagactccatctcaaaaaaaaaaaaaattctctagctctctatgccttgttgtatcctcaggaaggagtcacctctcttccaggatcactcttgccttttgttattggacacattttcctacctcctgcccagtcttttttaggctctctgtcatacttcctcgcctagtctttaacttgtctctgataaccagatttttcccccataatctgtatctgtattcaagtctctatcctcatccccaaatggatttcaccccgcttgtccatcagtctctgcccatttcttctgtctcccacagacatggtctgtgtagttgttctgcacactacccgtcctcgccccttctcatttccctcactccacggacagctacaggagggcttccatcatttgtcctcttacttccttgttagaactttgtgctgctgaccaccactctgaaccaaaacttctttcttggttcttgaaagttgctgtctttctcctccagagggtctgtgtcttccttccaactcttaaacatttttgtttcccagaatccatcattggccattgctttttcacttgccatgagctctgtgaatgagatggttcctgctgaagacatttactttcaatgatctacagaatttcccaaatctatgtctccagactggatgtttctcacgtctgtggcccactgggcatcttctgcactttctctgcatttgtaaacactgagcctgtatgcgtgtctatgtggccatggccctggccgtggggatgcacccataattataatgagagcaggtgaatgtcatgtggctatgtatgagacattgttgtgaatgttttacatgcatcagctctttcaacatttacagcatctgtgtgtggtaggtaatgttgtttccttcattttgcagagcagaatatagataggctcaggttaagaatttgcccaaggttacacagttatgaagtttggatttaggaatgggaggccacgtagactggcttcagaattcatgtctttaaccactttattgcttctcatgttggggggtttgttttctggtcactatttttactaaagttgattcaacaatgctataatctgttactctcattcgacaatacatcttgactgtttcttcaacttgaggaaggtaaaccaaagccactctttaatgggtgcaaatatctgttgtaactatgtagaagatacagtgtctgggtttgaggacaggggagtgggaaaactgagtagggaagcggtaagacatgcatctggctttaggagtgtttgaagtgcctaaagatcagggtgaatttcccaaatttgaatcttgttgcccaagccacattgcaaccacctctttttctcttacctcgtccccacatccaggcactgccccattctgttcattccacctttttttttagtagaccctccatatatgtgtgtgttttggtgaatggccacacacagcaaagttatttttattgcaattttgttgttgttgtttgagacacagagtctcatactctgccacccagactgaagtgcagtggtgcgatctcagttcactgcaacctccatccccccatgttcaagcaattctcctgcctcagcctcccaagtagctgggattacaggcatgggccaccatgcccggctaatttttgtattttttgtagacacggggtttcaccatgttggccaggctggtctcacactcctgacctcaggtgatccacccgcctcggcctcccgaagtgctggcattacaggcatgagccaccacacccagcctttattgcaatttttggttccctcacagaatgtttaccatgaagctgtgcgtataggtggtaccatgtatgacataccttgacctcaaagataatctacctgggctttttttgtttgtttgttttgagatggagtctcactctgtcacccatgctggtgtgcagtggcgtgatcttggctcacagcagcctctgcctcccgggttcaagcgattctcctgcctcagcctcctgagtagctgggactacaggtgcctgcgaccacacccagctaatttttgtatttttagtagtagtgggatttcaccatgttggccaggatggcctccacctcctgacttcatgatccacccgcctcggcctcccaaagtgctgggattacaggcgtgagccaccgcacctggcctacctgggcttttttggacagatgtacatgattttagaaattgttatgaatgactgtcttgggatcctcaagaacacccccaggtttgacgatttgctgagaagactcaggtctcagcattctgtcatactcaacagctatgatttactgcagcaaaaaaatacaaagcaaatagtaaagggaaaaagccaaaattcagagaaaaccaggcacaatcttctgagtcttgtttcagtgaagtcacaggatgtgccttatttaagttccatctggtacttatgacaacacatgctatatgtccactgggaagcttattagagactcagtgccagggtttttattgggcatgttttctagcacatcccacaattctggacttccagaaggttagcaggggttcagcttttcagctgaaaacgttatccccctttcagctggggggaaaaaaaggcaccgaaaaacagggcagtgagctactcctgttttgggtgggtggagcagtagtaagcctcccaaaatctaaggtcccacactccagcaagggtgaaccttgcaaactcaaaaggatagcagtctccaacctgctgttttatacagtgacttaagtggtactaaaatgctatataagtcaaatttacgtaacattaagcaaataattttttttcagcaaaaaaataatggtcatgactttgtggtgaaggcttatgtaatgattgtaataaattcaggtggctcacgcctgtgataccagcacttttgggaggctgaggcgggtggatcacttgaggtcaggagtttgagaccagcctagccaacatggtgaaatcccatctctacaaaaatgaaaaattagccgggcgtagtggtacatgcatttagtcctagctacttgggaggctgaggcaggaaaatcgcttgaacctgggaggcagaggttgcagtgagccgagatcatgccactgcactccagcctgggtgacagagtgagactgtgtctcaaaaaaaaaaaaaaaaaaaaaatgcctcagttttgttaagaggaaaaagcaaatcctaagttacagtggaacttatgaacaccctagcctagagatttaatttagtgatgaaaaggtacagagagagtctttcaagaaaggacctagtctgctcgcgttctctctctctctctctctatatatatatatgtatatgtgtgtgtacatatggaccacttcaagctacacacacacacacacatatacacgtgtatgaatatatatatatggctataagtggtgcgacttgcaggtactccctttgttcacctttgtaaagatgttattgccagttcagtgtgtatttctatagtatatatgtaaacaatttgtcatccttttgttgctgcttttgaaactagttcatggcttcagtgggggagagatttaaataatatgggtttataatttctgcattattaaatgcagataacttgtgattaaagagtatgttattgg

SEQ ID NO: 138237 - DNA, 2078 bp, Artificial Sequence
  derived and/or modified sequence
acgccgttgccaccgaggctcctctgtcccagctctgcggcccagggggtgacgtgatggcggcagcggtgctgacggaccgggcccaggtgtctgtgacctttgatgatgtggctgtgactttcaccaaggaggagtgggggcagctggacctagctcagcggaccctgtaccaggaggtgatgctggaaaactgtgggctcctggtgtctctggggtgtcctgttcccaaagctgagctgatctgccacctagagcatgggcaggagccatggaccaggaaggaagacctctcccaagacacctgtccaggcgacaaaggaaaacctaagaccacagaacctaccacttgtgagccagccttgtcagagggaatctcacttcagggacaagtgacacaaggaaactcagtggactcacagttggggcaagccgaggatcaggatgggctatcagaaatgcaggaaggacacttcagaccaggaatagatccccaggagaagtctcctgggaagatgagccctgaatgtgatggtttagggacagctgatggtgtgtgttcaaggattggacaggagcaagtctctccaggagatagagtccgtagccataactcatgtgagtcaggtaaagatcccatgattcaggaagaggaaaataactttaaatgcagtgaatgtggaaaagtatttaacaagaaacacctccttgctggacatgagaaaattcactctggagttaagccctatgaatgcacagaatgtgggaaaacctttattaagagcacacatctcctgcaacatcacatgatccacactggggagaggccctatgagtgcatggagtgtggaaaggccttcaaccgcaagtcataccttacccagcaccagcggattcacagtggagagaagccttacaagtgcaatgaatgcggaaaggccttcacccaccgctccaattttgtcttgcataacaggagacacactggagaaaaatcctttgtgtgcacagaatgtggccaagtctttcgacataggccaggctttctccggcactatgttgtccacagtggtgagaatccctatgagtgcttggagtgtggcaaggtcttcaaacacaggtcatatctcatgtggcaccagcagactcataccggggagaagccctatgagtgcagtgaatgtgggaaggtcttcttggagagtgcagccctgattcaccactatgtcatccacactggagagaagccctttgagtgcctcgagtgtgggaaggctttcaaccaccgatcctacctcaagaggcaccagcggattcacactggggagaagcccttcgtgtgcagtgaatgtggaaaggccttcacccactgctctacttttatcttgcataaaagggcccacactggagaaaagcctttcgagtgcaaagagtgtgggaaagcctttagcaatcggaaggacctcattcgccacttcagcatccacactggagagaagccctatgagtgcgtggagtgtggaaaggccttcacccgcatgtcgggcctcacgaggcacaagcggattcatagtggagagaagccctatgaatgtgttgagtgtgggaaatcgttttgctggagcacaaacctcattcgacatgccattatccacactggagagaagccctataaatgtagtgaatgtggaaaggccttcagtcgcagctcgtccctcactcagcatcaaaggatgcatactgggaaaaatcccatcagtgtaacagatgtgggaagaccttttacaagtggacaaacctcagttacccttcgagaacttcttttagggaaggactttttgaatgtaaccactgaggcaaatattttgccagaggaaacatcttcctctgcatctgatcaaccataccaaagagaaaccccacaagtgtcttcactgtgagaaaaccttctgttgctgaatattacttgtcatctgaagagtcatattagaaattcgttcagtctagagccttattctccatctgataatttatcctggagagagacccagtggttattgtgcacataggagaacctt

SEQ ID NO: 138238 - protein, 177 aa, Artificial Sequence
  derived and/or modified sequence
MSSNECFKCGRSGHWARECPTGGGRGRGMRSRGRGGFTSDRGFQFVSSSLPDICYRCGESGHLAKDCDLQEDACYNCGRGGHIAKDCKEPKREREQCCYNCGKPGHLARDCDHADEQKCYSCGEFGHIQKDCTKVKCYRCGETGHVAINCSKTSEVNCYRCGESGHLARECTIEATA

SEQ ID NO: 138239 - protein, 167 aa, Artificial Sequence
  derived and/or modified sequence
MSSNECFKCGRSGHWARECPTGGGRGRGMRSRGRGGFTSDRDICYRCGESGHLAKDCDLQEDACYNCGRGGHIAKDCKEPKREREQCCYNCGKPGHLARDCDHADEQKCYSCGEFGHIQKDCTKVKCYRCGETGHVAINCSKTSEVNCYRCGESGHLARECTIEATA

SEQ ID NO: 138240 - DNA, 3393 bp, Artificial Sequence
  derived and/or modified sequence
aaccccgcgcgctgattggccgcgtgggcgaggcggaggagagccgtgcgcagcggcgtatgtggggccgtgtgcagacccgcgtgtggcgcaggcaaggaccctcaaaataaacagcctctaccttgcgagccgtcttccccaggcctgcgtccgagtctccgccgctgcgggcccgctccgacgcggaagatctgactgcagccatgagcagcaatgagtgcttcaagtgtggacgatctggccactgggcccgggaatgtcctactggtggaggccgtggtcgtggaatgagaagccgtggcagaggtggttttacctcggatagaggtttccagtttgtttcctcgtctcttccagacatttgttatcgctgtggtgagtctggtcatcttgccaaggattgtgatcttcaggaggatgcctgctataactgcggtagaggtggccacattgccaaggactgcaaggagcccaagagagagcgagagcaatgctgctacaactgtggcaaaccaggccatctggctcgtgactgcgaccatgcagatgagcagaaatgctattcttgtggagaattcggacacattcaaaaagactgcaccaaagtgaagtgctataggtgtggtgaaactggtcatgtagccatcaactgcagcaagacaagtgaagtcaactgttaccgctgtggcgagtcagggcaccttgcacgggaatgcacaattgaggctacagcctaattattttcctttgtcgcccctcctttttctgattgatggttgtattattttctctgaatcctcttcactggccaaaggttggcagatagaggcaactcccaggccagtgagctttacttgccgtgtaaaaggaggaaaggggtggaaaaaaaccgactttctgcatttaactacaaaaaaagtttatgtttagtttggtagaggtgttatgtataatgctttgttaaagaaccccctttccgtgccactggtgaatagggattgatgaatgggaagagttgagtcagaccagtaagcccgtcctgggttccttgaacatgttcccatgtaggaggtaaaaccaattctggaagtgtctatgaacttccataaataactttaattttagtataatgatggtcttggattgtctgacctcagtagctattaaataacatcaagtaacatctgtatcaggccctacatagaacatacagttgagtgggagtaaacaaaaagataaacatgcgtgttaatggctgttcgagagaaatcggaataaaagcctaaacaggaacaacttcatcacagtgttgatgttggacacatagatggtgatggcaaaggtttagaacacattattttcaaagactaaatctaaaacccagagtaaacatcaatgctcagagttagcataatttggagctattcaggaattgcagagaaatgcattttcacagaaatcaagatgttatttttgtatactatatcacttagacaactgtgtttcatttgctgtaatcagtttttaaaagtcagatggaaagagcaactgaagtcctagaaaatagaaatgtaattttaaactattccaataaagctggaggaggaaggggagtttgactaaagttctttttgtttgtttcaaattttcattaatgtatatagtgcaaaataccatattaaagaggggaatgtggaggactgaaagctgacagtttggacttttctttttgtacttaagtcatgtcttcaataatgaaaattgctgttaaaaggatgtatgggatttagatacttttgcaaagctatagaaaattcactttgtaatctgttataataatgcccttgagttctgtgttcagtctgaacaggttttttggtggtggtggttttgttttgttttggagacggagtctcactcttgtcgcccaggctggagtgcaggcttggctcactgcaacctccacctcccgggttcaagcaattctcctgcctcagcctcctgagtagctgggattacaggcacccgccaccaccccccgctaattttttgtatttttatttttattttatttttttatttttttttgagacagagtgtcgctctgttgcccaggctggagtgtagtggtgcgatctcggctcactgcaagctccgcctcctgggttcgtgccattctcctgcctcagcctcctgagtagctggggctacaggtacccgccaccgcgcccagctaattttttttttttgtatttttagtaaagacggggtttcacggtgttagccaggatggtctcaatctcctgacctcgtgatccgcccgccttggcctcccaaagtgctgggatcacaggcgtgagccaccgcgcccggcctattttttgtatttttagtagagactgggtttcatcatgttggtcgggctggtctccaactcctgacctcaggtgatccacctgccccgccccccaaagtgctagtgttacaggtgcgagccaccgtgtctggccgattctgaacagttttaataccattgctatttttgtgtttttcctgggccttttttttttttttttttttttttgagacagtctcgctctgttgcccaggctagagtgcaatggtgcaatctcagctcactgcaacctccaccccccacccccacaccccgttcaagtaattctcctgcctcagcctcccaaatagctgggattacaggtgtccgccaccacacccagctaatttttgttatttttagtagagatggggtttcactgtgttggtcaggctggtctccaactgttgccctcaggtgagccactgtgccccaccttttcctgggtttcataaggatctgaagtggtggattccttgtttttgctagtgtctcatttagagttgagatggaccttaaaactcatctgttttaactcactttttaatagatgagttaaacttaatttacttaaggatgtacagttagagcctggaacttcaaccattattcactccccatgccctgtttccccccacttcgaaattaaatgcggttagcatcatatagttcattttccccctccatgctgctgtgtgattcttgactttgggtatgagtttttcatccttcatgcagggttctgtcagttcatggtatagtgattcagtgttaaaatggtggtgtctcagctgtgctgtgcacattccaaccttgtcaaattaatagtcctgagcaagcaagaaaaagaggtaataacatacccatttctttatgaatataagcttataatattttttcatgtgctatttttactgagcaaattgtatgtctcacatgttaacacaataaatatcttgacaattttattttctaccataaaaaaaaaaaaaaaa

SEQ ID NO: 138241 - DNA, 534 bp, Artificial Sequence
  derived and/or modified sequence
atgagcagcaacgagtgcttcaagtgcggcagaagcggccactgggccagagagtgccccaccggcggcggcagaggcagaggcatgagaagcagaggcagaggcggcttcaccagcgacagaggcttccagttcgtgagcagcagcctgcccgacatctgctacagatgcggcgagagcggccacctggccaaggactgcgacctgcaggaggacgcctgctacaactgcggcagaggcggccacatcgccaaggactgcaaggagcccaagagagagagagagcagtgctgctacaactgcggcaagcccggccacctggccagagactgcgaccacgccgacgagcagaagtgctacagctgcggcgagttcggccacatccagaaggactgcaccaaggtgaagtgctacagatgcggcgagaccggccacgtggccatcaactgcagcaagaccagcgaggtgaactgctacagatgcggcgagagcggccacctggccagagagtgcaccatcgaggccaccgcctag

SEQ ID NO: 138242 - DNA, 504 bp, Artificial Sequence
  derived and/or modified sequence
atgagcagcaacgagtgcttcaagtgcggcagaagcggccactgggccagagagtgccccaccggcggcggcagaggcagaggcatgagaagcagaggcagaggcggcttcaccagcgacagagacatctgctacagatgcggcgagagcggccacctggccaaggactgcgacctgcaggaggacgcctgctacaactgcggcagaggcggccacatcgccaaggactgcaaggagcccaagagagagagagagcagtgctgctacaactgcggcaagcccggccacctggccagagactgcgaccacgccgacgagcagaagtgctacagctgcggcgagttcggccacatccagaaggactgcaccaaggtgaagtgctacagatgcggcgagaccggccacgtggccatcaactgcagcaagaccagcgaggtgaactgctacagatgcggcgagagcggccacctggccagagagtgcaccatcgaggccaccgcctag

SEQ ID NO: 138243 - DNA, 534 bp, Artificial Sequence
  derived and/or modified sequence
atgtctagcaatgaatgcttcaagtgcggacgctccgggcattgggcccgggagtgccccactggaggtggacgcggccggggcatgcgtagtcgggggaggggcggatttacgtctgacagggggtttcagttcgtaagtagtagcttaccagatatttgttatcgctgtggggaatcggggcacctggccaaagactgtgatctgcaggaggacgcctgctataactgcggacgcggtggccatatcgcaaaagattgtaaggagcccaaacgggagagagaacaatgttgctacaactgcgggaaacccggccatctggcgagggattgcgatcatgctgacgaacagaagtgctacagttgcggtgagtttggccatatccagaaagattgcaccaaggtcaaatgctacagatgcggcgaaaccggccacgtggccataaactgcagtaagacctcagaggtgaattgttatcgttgtggggagtccggccatttagcacgggaatgcactatcgaggcaactgcttag

SEQ ID NO: 138244 - DNA, 504 bp, Artificial Sequence
  derived and/or modified sequence
atgagctctaatgagtgctttaaatgcgggagaagcggccattgggccagggaatgtccaactggggggggacgaggccgcggcatgagatcccgcggaaggggaggatttaccagcgacagggacatttgctacaggtgtggtgaaagtggccacctcgcaaaggattgcgatttgcaggaagatgcgtgctacaattgtggacgaggaggacatattgccaaggactgtaaagagcctaaacgggaaagagagcagtgttgttacaactgtggcaagcctggccatcttgctcgggattgcgaccatgcagacgagcaaaaatgttacagctgtggggagttcgggcacatccagaaggactgtacaaaggtgaagtgctatcgctgcggggagaccgggcacgtggccatcaattgctctaaaacctctgaggtgaactgctacaggtgcggtgaatcagggcacctggctcgtgaatgtaccattgaagctactgcatag

SEQ ID NO: 138245 - DNA, 534 bp, Artificial Sequence
  derived and/or modified sequence
atgagcagcaatgaatgcttcaagtgtggccgcagcggccactgggcccgggagtgccccactggaggcggccggggccggggcatgaggagccggggccggggcggcttcaccagtgaccggggcttccagtttgtgagcagcagcctgcctgacatctgctaccgctgtggggagagcggccacctggccaaggactgtgacctgcaggaggatgcctgctacaactgtggccggggcggccacatcgccaaggactgcaaggagcccaagcgggagcgggagcagtgctgctacaactgtgggaagccaggccacctggcccgggactgtgaccacgcagatgagcagaagtgctacagctgtggggagtttggccacatccagaaggactgcaccaaggtgaagtgctaccgctgtggggagactggacatgtggccatcaactgcagcaagaccagcgaggtgaactgctaccgctgtggggagagcggccacctggcccgggagtgcaccatcgaggccacagcctag

SEQ ID NO: 138246 - DNA, 504 bp, Artificial Sequence
  derived and/or modified sequence
atgagcagcaatgaatgcttcaagtgtggccgcagcggccactgggcccgggagtgccccactggaggcggccggggccggggcatgaggagccggggccggggcggcttcaccagtgaccgggacatctgctaccgctgtggggagagcggccacctggccaaggactgtgacctgcaggaggatgcctgctacaactgtggccggggcggccacatcgccaaggactgcaaggagcccaagcgggagcgggagcagtgctgctacaactgtgggaagccaggccacctggcccgggactgtgaccacgcagatgagcagaagtgctacagctgtggggagtttggccacatccagaaggactgcaccaaggtgaagtgctaccgctgtggggagactggacatgtggccatcaactgcagcaagaccagcgaggtgaactgctaccgctgtggggagagcggccacctggcccgggagtgcaccatcgaggccacagcctag

SEQ ID NO: 138247 - DNA, 534 bp, Artificial Sequence
  derived and/or modified sequence
atgagcagcaacgagtgcttcaagtgcggccggagcggccactgggcccgtgagtgtccgactgggggaggtcgggggcggggcatgcgctccaggggtcggggaggatttacgagtgaccgcgggttccagttcgtttcttcaagccttccggacatctgttatcgatgcggcgagagtgggcatctcgcgaaagactgcgatctacaagaagatgcctgttacaactgcgggcggggtggccacatcgctaaagactgcaaggagcctaaaagagaaagagaacagtgttgttataattgcggtaagcctggccatctggctcgggactgtgatcatgccgacgaacagaagtgttattcatgtggcgaatttggccacatacagaaggactgcactaaggtgaaatgttatcggtgcggggaaacgggacacgtcgctatcaactgctccaaaacctcagaagtaaattgctaccggtgtggagaaagcggtcaccttgcaagagaatgtactattgaggccacagcatag

SEQ ID NO: 138248 - DNA, 504 bp, Artificial Sequence
  derived and/or modified sequence
atgagcagcaacgagtgcttcaagtgcggccggagcggccactgggcacgcgagtgcccgacaggaggtggacgcggaagaggcatgcgatctagaggaaggggtggtttcacatcagacagagacatttgctaccgatgcggtgaatcaggccacttagctaaggattgtgatctccaggaagacgcctgctacaactgtgggcggggaggtcacatcgcaaaagattgtaaggaacccaagcgggagcgcgagcagtgctgttacaattgcggcaagcctggtcatctggcccgtgactgtgatcacgccgatgaacagaaatgctactcgtgtggggaattcggccacatccaaaaggattgtaccaaagtcaaatgttatcgctgtggagagaccgggcacgtcgcgatcaactgctctaagacctccgaggtgaactgttaccgatgcggtgaatctgggcacctcgcacgagagtgtactattgaggccaccgcatag

SEQ ID NO: 138249 - DNA, 1664 bp, Artificial Sequence
  derived and/or modified sequence
gtgcgcagcggcgtatgtggggccgtgtgcagacccgcgtgtggcgcaggcaaggaccctcaaaataaacagcctctaccttgcgagccgtcttccccaggcctgcgtccgagtctccgccgctgcgggcccgctccgacgcggaagatctgactgcagccatgagcagcaatgagtgcttcaagtgtggacgatctggccactgggcccgggaatgtcctactggtggaggccgtggtcgtggaatgagaagccgtggcagaggtggttttacctcggatagaggtttccagtttgtttcctcgtctcttccagacatttgttatcgctgtggtgagtctggtcatcttgccaaggattgtgatcttcaggaggatgcctgctataactgcggtagaggtggccacattgccaaggactgcaaggagcccaagagagagcgagagcaatgctgctacaactgtggcaaaccaggccatctggctcgtgactgcgaccatgcagatgagcagaaatgctattcttgtggagaattcggacacattcaaaaagactgcaccaaagtgaagtgctataggtgtggtgaaactggtcatgtagccatcaactgcagcaagacaagtgaagtcaactgttaccgctgtggcgagtcagggcaccttgcacgggaatgcacaattgaggctacagcctaattattttcctttgtcgcccctcctttttctgattgatggttgtattattttctctgaatcctcttcactggccaaaggttggcagatagaggcaactcccaggccagtgagctttacttgccgtgtaaaaggaggaaaggggtggaaaaaaaccgactttctgcatttaactacaaaaaaagtttatgtttagtttggtagaggtgttatgtataatgctttgttaaagaaccccctttccgtgccactggtgaatagggattgatgaatgggaagagttgagtcagaccagtaagcccgtcctgggttccttgaacatgttcccatgtaggaggtaaaaccaattctggaagtgtctatgaacttccataaataactttaattttagtataatgatggtcttggattgtctgacctcagtagctattaaataacatcaagtaacatctgtatcaggccctacatagaacatacagttgagtgggagtaaacaaaaagataaacatgcgtgttaatggctgttcgagagaaatcggaataaaagcctaaacaggaacaacttcatcacagtgttgatgttggacacatagatggtgatggcaaaggtttagaacacattattttcaaagactaaatctaaaacccagagtaaacatcaatgctcagagttagcataatttggagctattcaggaattgcagagaaatgcattttcacagaaatcaagatgttatttttgtatactatatcacttagacaactgtgtttcatttgctgtaatcagtttttaaaagtcagatggaaagagcaactgaagtcctagaaaatagaaatgtaattttaaactattccaataaagctggaggaggaaggggagtttgactaaagttctttttgtttgtttcaaattttcattaatgtatatagtgcaaaataccatattaaagaggggaatgtggaggactgaaa

SEQ ID NO: 138250 - DNA, 534 bp, Artificial Sequence
  derived and/or modified sequence
atgtcctccaacgaatgttttaaatgcgggaggagcggtcactgggccagagagtgtcctacaggcggagggaggggcagagggatgcgctccagaggcagggggggattcactagcgacaggggatttcagtttgtgtcgagctccctgccagatatctgttatcgatgcggagagtccggacatctcgcaaaggattgcgacctgcaagaggacgcatgctacaactgtgggaggggaggtcacatcgccaaggattgcaaggagccgaagcgcgagagggagcaatgctgttacaattgtggaaaaccaggacatctcgcccgagactgtgatcatgcagacgaacagaaatgctactcttgcggagagtttgggcatatccagaaagactgcaccaaggtcaaatgttatagatgtggcgaaacaggccatgtggccattaattgtagcaaaacgtcagaggttaactgctatagatgtggagagtcaggccatctcgctagagaatgtactatcgaggcgaccgcttag

SEQ ID NO: 138251 - DNA, 504 bp, Artificial Sequence
  derived and/or modified sequence
atgagcagcaacgagtgcttcaagtgcgggagaagcgggcactgggctcgagagtgtcccaccggaggaggacgaggaagaggcatgcggtctcggggaagagggggatttacaagtgacagagatatatgctatcggtgtggcgagtccggtcacctggcaaaagactgtgacttgcaagaggacgcttgttataactgcgggagaggcggacacatcgctaaggattgtaaggaacctaaaagggagcgtgaacaatgctgctataactgtggcaagcctggccacctggccagggattgcgatcacgctgatgaacaaaaatgttattcttgtggcgaatttggccacatccagaaggattgcactaaggtgaaatgttaccggtgcggcgagactggccatgtggccatcaattgtagcaaaacctcggaggtgaactgctatcggtgcggcgagtccggccatttggccagggaatgcactatcgaagccaccgcttag

SEQ ID NO: 138252 - DNA, 1549 bp, Artificial Sequence
  derived and/or modified sequence
gtgcgcagcggcgtatgtggggccgtgtgcagacccgcgtgtggcgcaggcaaggaccctcaaaataaacagcctctaccttgcgagccgtcttccccaggcctgcgtccgagtctccgccgctgcgggcccgctccgacgcggaagatctgactgcagccatgagcagcaatgagtgcttcaagtgtggacgatctggccactgggcccgggaatgtcctactggtggaggccgtggtcgtggaatgagaagccgtggcagaggtggttttacctcggatagagacatttgttatcgctgtggtgagtctggtcatcttgccaaggattgtgatcttcaggaggatgcctgctataactgcggtagaggtggccacattgccaaggactgcaaggagcccaagagagagcgagagcaatgctgctacaactgtggcaaaccaggccatctggctcgtgactgcgaccatgcagatgagcagaaatgctattcttgtggagaattcggacacattcaaaaagactgcaccaaagtgaagtgctataggtgtggtgaaactggtcatgtagccatcaactgcagcaagacaagtgaagtcaactgttaccgctgtggcgagtcagggcaccttgcacgggaatgcacaattgaggctacagcctaattattttcctttgtcgcccctcctttttctgattgatggttgtattattttctctgaatcctcttcactggccaaaggttggcagatagaggcaactcccaggccagtgagctttacttgccgtgtaaaaggaggaaaggggtggaaaaaaaccgactttctgcatttaactacaaaaaaagtttatgtttagtttggtagaggtgttatgtataatgctttgttaaagaaccccctttccgtgccactggtgaatagggattgatgaatgggaagagttgagtcagaccagtaagcccgtcctgggttccttgaacatgttcccatgtaggaggtaaaaccaattctggaagtgtctatgaacttccataaataactttaattttagtataatgatggtcttggattgtctgacctcagtagctattaaataacatcaagtaacatctgtatcaggccctacatagaacatacagttgagtgggagtaaacaaaaagataaacatgcgtgttaatggctgttcgagagaaatcggaataaaagcctaaacaggaacaacttcatcacagtgttgatgttggacacatagatggtgatggcaaaggtttagaacacattattttcaaagactaaatctaaaacccagagtaaacatcaatgctcagagttagcataatttggagctattcaggaattgcagagaaatgcattttcacagaaatcaagatgttatttttgtatactatatcacttagacaactgtgtttcatttgctgtaatcagtttttaaaagtcagatggaaagagcaactgaagtcctagaaaatagaaatgtaattttaaactattccaataaagctggaggaggaaggggagtttgact

SEQ ID NO: 138253 - protein, 527 aa, Artificial Sequence
  derived and/or modified sequence
MTAELREAMALAPWGPVKVKKEEEEEENFPGQASSQQVHSENIKVWAPVQGLQTGLDGSEEEEKGQNISWDMAVVLKATQEAPAASTLGSYSLPGTLAKSEILETHGTMNFLGAETKNLQLLVPKTEICEEAEKPLIISERIQKADPQGPELGEACEKGNMLKRQRIKREKKDFRQVIVNDCHLPESFKEEENQKCKKSGGKYSLNSGAVKNPKTQLGQKPFTCSVCGKGFSQSANLVVHQRIHTGEKPFECHECGKAFIQSANLVVHQRIHTGQKPYVCSKCGKAFTQSSNLTVHQKIHSLEKTFKCNECEKAFSYSSQLARHQKVHITEKCYECNECGKTFTRSSNLIVHQRIHTGEKPFACNDCGKAFTQSANLIVHQRSHTGEKPYECKECGKAFSCFSHLIVHQRIHTAEKPYDCSECGKAFSQLSCLIVHQRIHSGDLPYVCNECGKAFTCSSYLLIHQRIHNGEKPYTCNECGKAFRQRSSLTVHQRTHTGEKPYECEKCGAAFISNSHLMRHHRTHLVE

SEQ ID NO: 138254 - protein, 134 aa, Artificial Sequence
  derived and/or modified sequence
MTAELREAMALAPWGPVKVKKEEEEEENFPGQASSQQVHSENIKVWAPVQGLQTGLDGSEEEEKGQNISWDMAVVLKATQEAPAASTLGSYSLPGTLAKSEILETHGTMNFLGAETKNLQLLVPKTEICEEAEK

SEQ ID NO: 138255 - protein, 112 aa, Artificial Sequence
  derived and/or modified sequence
MTAELREAMALAPWGPVKVKKEEEEEENFPGQASSQQVHSENIKVWAPVQGLQTGLDGSEEEEKGQNISWDMAVVLKATQEAPAASTLGSYSLPGTLAKSEILETHGTMNFL

SEQ ID NO: 138256 - protein, 367 aa, Artificial Sequence [sequence omitted]

SEQ ID NO: 138257 - DNA, 2664 bp, Artificial Sequence
  derived and/or modified sequence
cattgttctcgtgccggtagaagctgaagtaccggtcagccagcctcctgctgcagagccagtgaactcaggtcgggcttctcagctgcgcacataggcagtactcatcttggccctgggaagaaactcaagaagaagcttttgaaacataaagcttggatggggtttgacctctgcagggcagcgcccagctataggagttcccctgctgagcagagaagatgactgcagaattgagagaagccatggccctagccccatggggcccagtgaaggtgaaaaaggaggaggaagaagaagaaaacttcccaggtcaggcatccagccaacaagtgcactccgagaacatcaaagtctgggccccagtgcagggtcttcagacaggccttgatggatcagaagaggaagaaaagggtcagaacatatcctgggatatggcggtagtcctgaaagcaactcaggaggcacctgctgcttcaacccttggcagctactcattaccagggactctggccaagagtgagatactggagactcatgggaccatgaactttctaggtgctgaaaccaagaacctacagttactggttccaaaaactgagatatgtgaggaagctgaaaaacccctcatcatatcagaaagaatccagaaagctgatcctcaaggacctgagttaggagaagcttgtgaaaagggaaacatgttaaagaggcagagaataaagagagaaaagaaagatttcagacaagtgatagtgaatgactgtcacttacctgaaagcttcaaagaagaggaaaaccagaaatgtaagaaatctggaggaaaatatagccttaattctggcgctgttaaaaatccaaaaacccagcttggacaaaagccttttacgtgtagcgtgtgtgggaaaggatttagtcagagtgcaaacctcgttgtgcatcagcgaatccacactggagagaaaccctttgaatgtcatgagtgtgggaaggccttcattcagagtgcaaacctcgttgtgcatcagagaatccacactggacagaaaccttatgtttgctcaaaatgtgggaaagccttcactcagagttcaaatctgactgtacatcaaaaaatccactccttagaaaaaacttttaagtgcaatgaatgtgagaaagcctttagttacagctcacaacttgctcggcaccagaaagtccacattacggaaaaatgctatgaatgtaatgaatgtgggaaaacatttactaggagctcaaacctcattgtccaccagaggatccacactggggagaagccctttgcctgtaacgactgtggcaaagcctttacccagagtgcaaatcttattgtacatcagcgaagccatactggtgagaagccatatgagtgtaaagagtgtgggaaagcctttagttgtttttcacaccttattgtgcaccagagaattcacactgcagagaaaccttacgactgcagcgaatgtgggaaagccttcagtcagctctcttgccttattgtccaccagagaattcacagtggagatcttccttacgtgtgtaatgaatgtgggaaggccttcacatgtagctcatacctacttattcatcagagaattcataatggagaaaaaccttacacatgtaatgagtgtgggaaggccttcagacagaggtcgagcctcaccgtgcaccagagaacccacactggggagaagccctatgaatgtgagaagtgtggtgcagctttcatttccaactcacacctcatgcgacaccatagaacccatcttgttgaataacaagtaaggaagaggaagacctccagcattggtcataaccttctgcctccctaatgagacacctctttgctgttttcttcctcctctataaaagtgagggctgtgtccttaaaagttatagttttcaggaatgcagcagaagacacaagaaaagcatttcagaggctaatttaaaacaaaaagtaagcacctaaaggcaaggactttgttttaactgtaccttaagcggtcatgttctctgaagtggaatgtggctttcctaggaatgggtcgtacaaagctaagtggtaatgatgctatttggggaaaggtcttttttgcttaattttgttttttaaaactctgatgattgcttgagcaacaggcaggttatctgcctggttgaattctggttgaaccgtgtattctaatatttctggttaagtggtgactgggtaaggaaaccacttggggtagcagttcaacaattcacttacgaatgtttataagctttccatttcctaggtaattttttaaaagccagtcaaaacaaaaactttactgaaaatggacagaaataggaaatggactttttccttactgtctatacctcctgaaccttggtattgtaaagatctggggacctctgggtctgttctgaccattccctagtctccatggccaagcactcaaggattgatggacaccacacaccagctatattcatttgccaagatcaacagctccttctccaaacaactcaagcccccaattcccatcgcattccatttgggtgagatgcaactaacagccccttcctggatgaaggagtcaaagaataaagcttgcctagaggcatgccccaaaaaaaaaaaaaaaa

SEQ ID NO: 138258 - DNA, 1584 bp, Artificial Sequence
  derived and/or modified sequence
atgaccgccgagctgagagaggccatggccctggccccctggggccccgtgaaggtgaagaaggaggaggaggaggaggagaacttccccggccaggccagcagccagcaggtgcacagcgagaacatcaaggtgtgggcccccgtgcagggcctgcagaccggcctggacggcagcgaggaggaggagaagggccagaacatcagctgggacatggccgtggtgctgaaggccacccaggaggcccccgccgccagcaccctgggcagctacagcctgcccggcaccctggccaagagcgagatcctggagacccacggcaccatgaacttcctgggcgccgagaccaagaacctgcagctgctggtgcccaagaccgagatctgcgaggaggccgagaagcccctgatcatcagcgagagaatccagaaggccgacccccagggccccgagctgggcgaggcctgcgagaagggcaacatgctgaagagacagagaatcaagagagagaagaaggacttcagacaggtgatcgtgaacgactgccacctgcccgagagcttcaaggaggaggagaaccagaagtgcaagaagagcggcggcaagtacagcctgaacagcggcgccgtgaagaaccccaagacccagctgggccagaagcccttcacctgcagcgtgtgcggcaagggcttcagccagagcgccaacctggtggtgcaccagagaatccacaccggcgagaagcccttcgagtgccacgagtgcggcaaggccttcatccagagcgccaacctggtggtgcaccagagaatccacaccggccagaagccctacgtgtgcagcaagtgcggcaaggccttcacccagagcagcaacctgaccgtgcaccagaagatccacagcctggagaagaccttcaagtgcaacgagtgcgagaaggccttcagctacagcagccagctggccagacaccagaaggtgcacatcaccgagaagtgctacgagtgcaacgagtgcggcaagaccttcaccagaagcagcaacctgatcgtgcaccagagaatccacaccggcgagaagcccttcgcctgcaacgactgcggcaaggccttcacccagagcgccaacctgatcgtgcaccagagaagccacaccggcgagaagccctacgagtgcaaggagtgcggcaaggccttcagctgcttcagccacctgatcgtgcaccagagaatccacaccgccgagaagccctacgactgcagcgagtgcggcaaggccttcagccagctgagctgcctgatcgtgcaccagagaatccacagcggcgacctgccctacgtgtgcaacgagtgcggcaaggccttcacctgcagcagctacctgctgatccaccagagaatccacaacggcgagaagccctacacctgcaacgagtgcggcaaggccttcagacagagaagcagcctgaccgtgcaccagagaacccacaccggcgagaagccctacgagtgcgagaagtgcggcgccgccttcatcagcaacagccacctgatgagacaccacagaacccacctggtggagtag

SEQ ID NO: 138259 - DNA, 405 bp, Artificial Sequence
  derived and/or modified sequence
atgaccgccgagctgagagaggccatggccctggccccctggggccccgtgaaggtgaagaaggaggaggaggaggaggagaacttccccggccaggccagcagccagcaggtgcacagcgagaacatcaaggtgtgggcccccgtgcagggcctgcagaccggcctggacggcagcgaggaggaggagaagggccagaacatcagctgggacatggccgtggtgctgaaggccacccaggaggcccccgccgccagcaccctgggcagctacagcctgcccggcaccctggccaagagcgagatcctggagacccacggcaccatgaacttcctgggcgccgagaccaagaacctgcagctgctggtgcccaagaccgagatctgcgaggaggccgagaagtag

SEQ ID NO: 138260 - DNA, 339 bp, Artificial Sequence
  derived and/or modified sequence
atgaccgccgagctgagagaggccatggccctggccccctggggccccgtgaaggtgaagaaggaggaggaggaggaggagaacttccccggccaggccagcagccagcaggtgcacagcgagaacatcaaggtgtgggcccccgtgcagggcctgcagaccggcctggacggcagcgaggaggaggagaagggccagaacatcagctgggacatggccgtggtgctgaaggccacccaggaggcccccgccgccagcaccctgggcagctacagcctgcccggcaccctggccaagagcgagatcctggagacccacggcaccatgaacttcctgtag

SEQ ID NO: 138261 - DNA, 1104 bp, Artificial Sequence
  derived and/or modified sequence
atgctgaagagacagagaatcaagagagagaagaaggacttcagacaggtgatcgtgaacgactgccacctgcccgagagcttcaaggaggaggagaaccagaagtgcaagaagagcggcggcaagtacagcctgaacagcggcgccgtgaagaaccccaagacccagctgggccagaagcccttcacctgcagcgtgtgcggcaagggcttcagccagagcgccaacctggtggtgcaccagagaatccacaccggcgagaagcccttcgagtgccacgagtgcggcaaggccttcatccagagcgccaacctggtggtgcaccagagaatccacaccggccagaagccctacgtgtgcagcaagtgcggcaaggccttcacccagagcagcaacctgaccgtgcaccagaagatccacagcctggagaagaccttcaagtgcaacgagtgcgagaaggccttcagctacagcagccagctggccagacaccagaaggtgcacatcaccgagaagtgctacgagtgcaacgagtgcggcaagaccttcaccagaagcagcaacctgatcgtgcaccagagaatccacaccggcgagaagcccttcgcctgcaacgactgcggcaaggccttcacccagagcgccaacctgatcgtgcaccagagaagccacaccggcgagaagccctacgagtgcaaggagtgcggcaaggccttcagctgcttcagccacctgatcgtgcaccagagaatccacaccgccgagaagccctacgactgcagcgagtgcggcaaggccttcagccagctgagctgcctgatcgtgcaccagagaatccacagcggcgacctgccctacgtgtgcaacgagtgcggcaaggccttcacctgcagcagctacctgctgatccaccagagaatccacaacggcgagaagccctacacctgcaacgagtgcggcaaggccttcagacagagaagcagcctgaccgtgcaccagagaacccacaccggcgagaagccctacgagtgcgagaagtgcggcgccgccttcatcagcaacagccacctgatgagacaccacagaacccacctggtggagtag

SEQ ID NO: 138262 - DNA, 1584 bp, Artificial Sequence
  derived and/or modified sequence
atgaccgccgagctgagagaagccatggctcttgccccatgggggcccgtgaaggtaaagaaggaagaggaagaagaagaaaacttccccggtcaagcttctagtcagcaggtccactccgaaaacatcaaggtctgggccccagtacaaggattgcaaaccggtctggatggtagtgaggaggaggagaaaggccagaatattagttgggacatggctgtggttctgaaggcaactcaagaggctcctgcagccagtaccctgggcagctacagcctgccaggcactttagcgaaaagtgagattctagaaacccatggcaccatgaactttttgggcgccgaaacaaagaacctgcaacttctggttcccaagaccgaaatttgcgaagaagctgaaaaacccttgattatttccgaacgaattcagaaggcagatccccaggggcccgagttgggggaggcctgcgagaagggaaacatgttgaaaaggcagaggatcaaacgggaaaagaaggattttcgtcaagtgattgtgaatgattgtcatcttcctgaaagcttcaaagaagaggagaatcagaaatgtaagaagtcaggtggcaagtacagccttaattcgggggcagttaaaaaccccaagactcagctgggccagaagccctttacctgttcagtttgcggcaaaggcttctcacagtcagccaaccttgtcgttcatcagcggatacatacaggagaaaagccattcgagtgtcatgagtgcggcaaagcatttattcagtctgcgaaccttgtggtccatcaaagaatacataccggacagaaaccatacgtatgctctaaatgcggtaaagcctttacacagtcgagtaacctcacagtccatcagaagatacattcccttgaaaagactttcaagtgcaacgagtgtgaaaaggctttttcatattcgtcacagctggcccgtcatcaaaaagtccatattacggagaagtgttatgagtgtaacgagtgcggcaagacctttaccagatcgtccaacctcatcgtgcaccaaagaattcatacaggcgagaagccattcgcttgcaacgattgtggaaaggccttcactcagagcgccaatctcattgtacaccagaggtcccacaccggcgagaagccttatgagtgtaaagagtgtggcaaagcattttcctgcttttctcacctgattgtacaccaacgcatccacactgccgaaaaaccctatgattgctctgagtgtgggaaggcattctcccaactgtcttgtctcatcgttcaccaaaggatccattctggggatctcccttatgtttgtaatgagtgcgggaaggccttcacttgtagctcctatctgcttatccaccagcgcatccacaacggagagaaaccctatacctgcaacgaatgcgggaaggctttcaggcagcgatcctcccttaccgtgcaccagagaacccatactggagagaagccatatgaatgtgagaagtgtggagcagcttttatcagcaatagccatctgatgcgtcatcaccgcacgcatcttgtggagtag

SEQ ID NO: 138263 - DNA, 405 bp, Artificial Sequence
  derived and/or modified sequence
atgacagcagagctgagagaagcaatggcactcgccccgtggggccccgtcaaagtgaagaaggaggaggaggaagaagaaaactttcccggacaggcttcttcgcagcaggtccacagcgaaaatatcaaggtatgggcacctgtccagggcctgcaaactgggctggacgggtccgaggaggaagaaaaagggcagaacattagctgggatatggccgtcgtacttaaggcgacgcaagaggcacccgccgcatcgacactggggagctattccctacccgggacattagccaaaagcgagatcctggagacccacggcacgatgaacttcctgggcgccgagaccaaaaatctgcagctgctggtgccaaaaaccgagatctgcgaggaagccgagaaatag

SEQ ID NO: 138264 - DNA, 339 bp, Artificial Sequence
  derived and/or modified sequence
atgacagccgagctccgggaagcgatggccctggccccttggggcccggttaaagttaagaaggaggaagaggaagaggagaacttccccggccaggcttcctctcagcaagtccattctgagaatataaaagtgtgggctcccgtgcagggtctccagaccggcctggacggctcggaggaagaggaaaaagggcagaatatttcatgggacatggccgtggtgctgaaggcgacacaagaagcacccgccgcctcgaccttaggttcgtactccctgcccggtaccctagctaaaagcgagatcttagaaactcacggaactatgaattttttgtag

SEQ ID NO: 138265 - DNA, 1104 bp, Artificial Sequence
  derived and/or modified sequence
atgttaaagcgtcagcggatcaagcgcgaaaagaaggacttcaggcaggttattgtgaatgattgccacttaccggaaagtttcaaggaggaggagaaccagaaatgcaaaaagagcggaggtaagtattctctgaactctggggccgtcaaaaacccaaaaactcagttaggccagaaaccatttacttgttctgtttgtggaaaggggttttctcagtccgccaatctggttgtacatcagagaattcacaccggcgaaaagccgttcgagtgccacgaatgtggcaaggcgtttattcagtccgccaacctggtggtgcaccagaggatacacaccgggcaaaaaccctatgtgtgtagcaagtgcgggaaggcctttactcagagtagcaatctgactgtgcaccagaaaattcactcacttgagaaaaccttcaaatgcaacgagtgtgagaaagcctttagttattcaagccagctcgcaagacaccagaaagtgcatattaccgaaaagtgttacgaatgcaacgagtgtggcaaaacattcacacgaagctcaaatctcatcgtgcatcagcgcattcacactggagagaaaccttttgcctgtaacgattgcggcaaggcttttacacagtcggccaatctgatagtccaccagcgaagtcatacgggcgaaaagccatatgaatgtaaggagtgcggaaaggctttcagctgtttttcacaccttatcgtacaccagcgcattcatactgccgaaaaaccatatgattgcagcgagtgtggcaaggctttctcccagttgagctgtctgatcgtacatcagcgcatacacagtggcgatctgccctacgtttgcaacgaatgtggtaaagcctttacttgctcctcctacctcctaatacaccagaggatccataacggagaaaagccctacacgtgtaacgaatgtggcaaggcgttccggcaaagaagttcactgaccgttcaccaacggacccacacaggggaaaagccgtacgagtgcgaaaaatgtggtgccgcctttatatccaattcacaccttatgagacaccacaggacacacttggtggagtag

SEQ ID NO: 138266 - DNA, 1584 bp, Artificial Sequence
  derived and/or modified sequence
atgacagctgagctgcgggaggccatggccctggccccctggggccctgtgaaggtgaagaaggaggaggaggaggaggagaacttccctggccaggccagcagccagcaggtgcacagcgagaacatcaaggtgtgggcccctgtgcagggcctgcagacaggcctggatggcagcgaggaggaggagaagggccagaacatctcctgggacatggctgtggtgctgaaggccacccaggaggccccagctgccagcaccctgggcagctacagcctgcccggcaccctggccaagtctgagatcctggagacccacggcaccatgaacttcctgggcgctgagaccaagaacctgcagctgctggtgcccaagacagagatctgtgaggaggccgagaagcccctcatcatcagcgagcgcatccagaaggctgacccccagggccctgagctgggggaggcctgtgagaagggcaacatgctgaagaggcagaggatcaagcgggagaagaaggacttccggcaggtgattgtgaatgactgccacctgcctgagagcttcaaggaggaggagaaccagaagtgcaagaagagcggcggcaagtacagcctgaacagcggggctgtgaagaaccccaagacccagctgggccagaagcccttcacctgcagcgtgtgtgggaagggcttcagccagagcgccaacctggtggtgcaccagaggatccacactggagagaagccctttgaatgtcatgaatgtgggaaggccttcatccagagcgccaacctggtggtgcaccagaggatccacacaggccagaagccctacgtgtgcagcaaatgtgggaaggccttcacccagagcagcaacctgactgtgcaccagaagatccacagcctggagaagaccttcaagtgcaatgaatgtgagaaggccttctcctacagcagccagctggcccggcaccagaaggtgcacatcacagagaagtgctatgaatgtaatgaatgtgggaagaccttcaccaggagcagcaacctgattgtgcaccagaggatccacactggagagaagccctttgcctgcaatgactgtgggaaggccttcacccagagcgccaacctgattgtgcaccagaggagccacactggagagaagccctatgagtgcaaggaatgtgggaaggccttcagctgcttcagccacctgattgtgcaccagaggatccacacagctgagaagccctatgactgcagtgaatgtgggaaggccttcagccagctgagctgcctgattgtgcaccagaggatccacagcggggacctgccctacgtgtgcaatgaatgtgggaaggccttcacctgcagcagctacctgctgatccaccagaggatccacaatggagagaagccctacacctgcaatgaatgtgggaaggccttccggcagaggagcagcctgactgtgcaccagaggacccacactggagagaagccctatgaatgtgagaagtgtggggccgccttcatcagcaacagccacctgatgaggcaccacaggacccacctggtggagtag

SEQ ID NO: 138267 - DNA, 405 bp, Artificial Sequence
  derived and/or modified sequence
atgacagctgagctgcgggaggccatggccctggccccctggggccctgtgaaggtgaagaaggaggaggaggaggaggagaacttccctggccaggccagcagccagcaggtgcacagcgagaacatcaaggtgtgggcccctgtgcagggcctgcagacaggcctggatggcagcgaggaggaggagaagggccagaacatctcctgggacatggctgtggtgctgaaggccacccaggaggccccagctgccagcaccctgggcagctacagcctgcccggcaccctggccaagtctgagatcctggagacccacggcaccatgaacttcctgggcgctgagaccaagaacctgcagctgctggtgcccaagacagagatctgtgaggaggccgagaagtag

SEQ ID NO: 138268 - DNA, 339 bp, Artificial Sequence
  derived and/or modified sequence
atgacagctgagctgcgggaggccatggccctggccccctggggccctgtgaaggtgaagaaggaggaggaggaggaggagaacttccctggccaggccagcagccagcaggtgcacagcgagaacatcaaggtgtgggcccctgtgcagggcctgcagacaggcctggatggcagcgaggaggaggagaagggccagaacatctcctgggacatggctgtggtgctgaaggccacccaggaggccccagctgccagcaccctgggcagctacagcctgcccggcaccctggccaagtctgagatcctggagacccacggcaccatgaacttcctgtag

SEQ ID NO: 138269 - DNA, 1104 bp, Artificial Sequence
  derived and/or modified sequence
atgctgaagaggcagaggatcaagcgggagaagaaggacttccggcaggtgattgtgaatgactgccacctgcctgagagcttcaaggaggaggagaaccagaagtgcaagaagagcggcggcaagtacagcctgaacagcggggctgtgaagaaccccaagacccagctgggccagaagcccttcacctgcagcgtgtgtgggaagggcttcagccagagcgccaacctggtggtgcaccagaggatccacactggagagaagccctttgaatgtcatgaatgtgggaaggccttcatccagagcgccaacctggtggtgcaccagaggatccacacaggccagaagccctacgtgtgcagcaaatgtgggaaggccttcacccagagcagcaacctgactgtgcaccagaagatccacagcctggagaagaccttcaagtgcaatgaatgtgagaaggccttctcctacagcagccagctggcccggcaccagaaggtgcacatcacagagaagtgctatgaatgtaatgaatgtgggaagaccttcaccaggagcagcaacctgattgtgcaccagaggatccacactggagagaagccctttgcctgcaatgactgtgggaaggccttcacccagagcgccaacctgattgtgcaccagaggagccacactggagagaagccctatgagtgcaaggaatgtgggaaggccttcagctgcttcagccacctgattgtgcaccagaggatccacacagctgagaagccctatgactgcagtgaatgtgggaaggccttcagccagctgagctgcctgattgtgcaccagaggatccacagcggggacctgccctacgtgtgcaatgaatgtgggaaggccttcacctgcagcagctacctgctgatccaccagaggatccacaatggagagaagccctacacctgcaatgaatgtgggaaggccttccggcagaggagcagcctgactgtgcaccagaggacccacactggagagaagccctatgaatgtgagaagtgtggggccgccttcatcagcaacagccacctgatgaggcaccacaggacccacctggtggagtag

SEQ ID NO: 138270 - DNA, 1584 bp, Artificial Sequence
  derived and/or modified sequence
atgaccgccgagctgcgggaggccatggccctggccccctggggccctgtgaaagtgaagaaggaggaggaagaagaggaaaatttccccggccaagcgagttctcaacaggtccattctgagaatatcaaggtgtgggcccctgtgcagggtctccagaccggacttgacggatccgaagaggaagaaaagggtcagaacatctcgtgggatatggctgtggttctgaaagcgactcaggaggccccggccgcgtctaccctggggtcctatagtctgcccggtacactagctaagagtgaaattctcgaaacacatggtactatgaattttcttggggcagagacgaaaaatctgcagctgctcgtacctaagactgaaatctgcgaggaagccgagaagcccctgatcatctccgaacgcattcaaaaggccgacccccagggacccgagcttggggaagcttgcgagaaggggaacatgctcaaacgccagcgcatcaagcgcgaaaaaaaggatttccgtcaggtgatagtcaacgattgccacctccccgaatcattcaaagaagaagaaaaccagaaatgcaagaagagtgggggtaagtacagcctcaattcaggcgccgtgaaaaatcctaagacacagctcgggcagaagcctttcacttgttccgtgtgtggcaagggatttagccaaagcgccaacttagttgtgcatcagcgcattcatacgggtgagaagcctttcgaatgccacgagtgcgggaaagccttcatacaatcagcaaacctggtggtgcatcagcggatccatactggacagaaaccctacgtttgcagtaaatgtggcaaggccttcactcaatcatccaatctgaccgtgcaccagaaaatacacagtctagaaaagaccttcaagtgcaacgagtgtgaaaaggccttctcttattcatctcagctggcgcgtcaccagaaagtgcacatcaccgagaaatgttatgagtgtaatgagtgtgggaagacgttcactagaagttcaaatctcattgttcatcagcgtatacacactggggaaaagccattcgcatgtaacgactgtggcaaggcttttacacagtctgccaacttgatagtgcatcagcgttctcacactggggagaagccctacgaatgtaaggagtgcggaaaagcttttagttgtttcagccacctgattgtgcaccagcgcattcatactgctgagaagccttacgattgctcagaatgtggcaaggcattctcccagctctcctgtcttatagtccatcaacggattcactctggagacctgccatatgtttgcaatgaatgcgggaaggcttttacctgttccagttatctgttgatccatcaacgcattcataacggggagaaaccttacacctgcaatgaatgtggaaaggccttcaggcagcgaagcagtttaaccgtgcaccaaagaactcacacaggagagaaaccttacgaatgcgaaaagtgtggggcagcttttatcagcaattctcacttaatgcggcatcatcgtactcaccttgtggagtag

SEQ ID NO: 138271 - DNA, 405 bp, Artificial Sequence
  derived and/or modified sequence
atgaccgccgagctgcgggaggccatggccctggccccctggggccctgtgaaggtgaaaaaggaggaggaggaggaggagaactttcccggccaggctagtagccagcaagttcacagcgagaatatcaaggtgtgggcccccgtgcaggggctacaaacagggctggacggcagtgaggaggaggagaagggccaaaacatctcctgggatatggccgtcgtgctgaaagcgactcaggaagcccctgcggcgagcacgctgggttcctactccttgcctggaactctggcgaagagtgaaattctggagacccacgggaccatgaatttcctcggcgccgagaccaagaatctccagctgctagtccccaagaccgagatctgcgaggaggccgagaagtag

SEQ ID NO: 138272 - DNA, 339 bp, Artificial Sequence
  derived and/or modified sequence
atgaccgccgagctgcgggaggccatggccctggccccctggggccctgttaaggttaagaaggaagaggaggaagaggaaaatttcccaggccaagcaagctctcaacaggtccactcagagaacatcaaagtatgggcacctgttcagggcctccagacagggttggacgggtccgaagaggaagagaaaggacagaatataagctgggatatggccgtggtcctcaaagcaactcaggaggctcctgctgcatcaacactggggagctacagcttgccaggtactcttgccaaaagcgagatcctggagactcatggcactatgaacttcctgtag

SEQ ID NO: 138273 - DNA, 1104 bp, Artificial Sequence
  derived and/or modified sequence
atgctgaagcggcagcggatcaagcgggagaagaaggacttccggcaggtcattgtgaatgattgtcacctacctgagtcattcaaagaggaggaaaatcagaaatgcaaaaaatccggcggaaagtacagcctgaatagtggcgcagtgaaaaaccctaagactcaactaggacagaagccctttacatgctcagtctgtgggaagggctttagccagagcgccaaccttgtcgttcatcagcgtatccacacaggagagaagccattcgagtgtcatgaatgcgggaaggcctttattcaatccgctaatctggtagttcatcaaagaatccatacgggccaaaagccatatgtttgcagcaagtgcggaaaggcattcactcagtcaagtaatctgacagtccatcaaaaaatccattcactggaaaagacatttaaatgtaacgagtgtgagaaggccttcagctactcatctcagcttgctagacaccagaaggtgcacatcacagagaaatgttacgagtgtaatgagtgcggcaagactttcacccgtagctccaatctcatagtgcaccagcgtattcacaccggcgagaagccattcgcttgcaatgactgtggcaaggcctttacacaaagcgctaatctgattgtgcaccagaggagccacaccggagaaaagccctacgagtgcaaagagtgcggcaaggctttctcttgctttagccatcttatcgtgcaccagcggatacacaccgccgagaaaccgtatgactgcagcgaatgcgggaaggccttctcccagctaagctgtctgattgtccaccagcgtatacatagtggcgatttaccctatgtctgtaatgaatgcgggaaggcttttacttgttcatcatatctcttgatccaccaacggatccacaatggtgagaaaccctacacatgcaatgaatgcggcaaagcttttagacaacgctcttcccttactgtgcaccagcggacgcataccggtgagaaaccttacgagtgtgagaagtgtggcgctgcctttatttccaactctcacctgatgcgccaccacagaactcacctggtagaatag

SEQ ID NO: 138274 - DNA, 1584 bp, Artificial Sequence
  derived and/or modified sequence
atgaccgcagaactgagagaggctatggctctcgctccctggggccctgttaaagtcaaaaaggaggaggaggaggaagagaacttcccaggccaggcgagtagtcagcaggtgcacagcgagaacatcaaagtgtgggcaccagtgcagggattacagactggactcgacggctcagaggaggaggaaaagggccagaacataagttgggatatggctgtggtattgaaggcgactcaggaggcaccagcagccagcaccctgggatcgtacagcctcccaggcacactcgccaagagtgaaatccttgagacccacggtactatgaacttcctcggagctgaaacaaaaaacctgcagctcttggtccccaagacagagatttgcgaggaggcagaaaagccgcttatcataagcgagagaatccaaaaggccgacccgcagggtcccgagctgggagaggcctgtgaaaaggggaatatgttgaagagacagaggatcaagagagaaaaaaaggatttccggcaggtcatcgtaaatgactgccatttgccggagtctttcaaggaggaagagaaccagaagtgtaaaaaaagcggcggaaaatacagtctgaactctggggctgtcaaaaatcccaaaacccaactgggacaaaaaccgttcacttgttctgtgtgcggcaagggattcagccagagcgccaacctcgtcgtccaccagcggattcacaccggggagaaaccctttgagtgccacgagtgcgggaaggcattcattcagagtgctaatcttgtcgtgcatcagagaattcacacaggccagaagccctacgtctgctctaaatgtggtaaggcatttactcagtcaagtaacttgactgtgcaccagaagatccattcactggagaaaacgttcaaatgcaatgagtgtgaaaaggccttctcatacagtagccaacttgctaggcaccaaaaggtacatattacagagaagtgctatgaatgcaatgagtgcgggaaaacttttacccgtagttccaacctcatcgtgcatcagagaatccacaccggggaaaaaccctttgcctgcaacgactgcggcaaagcattcactcagagtgctaatcttatcgtacaccagcgctctcacacaggggaaaaaccctatgaatgcaaagagtgtggaaaagcattcagctgcttctctcatcttatcgtacaccaaaggattcacaccgctgagaagccttacgattgcagtgagtgcggaaaagccttttcacaactctcttgtctaatcgtacaccagcggatccactctggtgatttaccgtacgtctgtaacgaatgcgggaaggccttcacttgcagttcttacctcctcatccaccaaaggatccataatggtgagaaaccatatacctgtaatgaatgcgggaaggccttccgccagcgctcctctcttactgtccaccaaagaacccacactggagaaaagccctacgagtgtgagaagtgtggggctgctttcatctccaactcacaccttatgcgccatcaccgaacccacctggtggaatag

SEQ ID NO: 138275 - DNA, 405 bp, Artificial Sequence
  derived and/or modified sequence
atgacagccgagctacgggaggcaatggcactggcaccctgggggcctgtgaaagtgaagaaagaagaggaggaggaggagaattttcctggccaggcttccagccaacaagtgcattccgaaaacatcaaggtgtgggcgcctgtgcagggtttacagaccggactcgacgggtctgaggaagaagagaagggacagaatattagctgggacatggcggttgtgctgaaggctacgcaggaggccccagccgcttcaactctcgggtcctacagcctgcccggaaccctcgcaaagtccgagattcttgaaacccacggaaccatgaactttctcggtgcagagactaaaaatttacagcttttggtgccgaaaaccgaaatctgcgaggaagccgagaagtag

SEQ ID NO: 138276 - DNA, 339 bp, Artificial Sequence
  derived and/or modified sequence
atgaccgctgaactcagggaagccatggcgttggcaccgtggggccctgtgaaagttaaaaaggaggaggaagaggaagagaattttccagggcaagcctcctctcagcaggtccacagcgagaatattaaagtgtgggccccagtgcagggtttgcagaccggactggatggatcggaggaggaagagaagggacaaaatattagttgggacatggcagtcgtactgaaagcgacgcaggaggcacccgctgcctcaacgttaggaagttactctctgccaggtacactggctaagagtgagattctggagacacacggcacaatgaattttctgtag

SEQ ID NO: 138277 - DNA, 1104 bp, Artificial Sequence
  derived and/or modified sequence
atgctgaaacgccagcgaatcaagcgtgaaaagaaggactttagacaggtcatagtcaacgattgccaccttccagagtcctttaaggaggaagagaatcagaagtgcaagaagtctggtggtaaatactccctgaattccggggcagtcaaaaacccaaaaactcagcttggccagaagcccttcacttgtagcgtatgtgggaagggatttagccagagcgccaatctggtggtgcatcagcggatccatactggcgaaaaacctttcgaatgccatgagtgtgggaaggcattcatccaaagcgctaatctggtcgttcatcagagaatacacacaggacagaaaccctacgtgtgcagcaaatgtggcaaagcgttcacgcagagctccaatctcacagtgcaccagaagatccatagtctggagaagactttcaaatgtaacgaatgcgagaaagcattttcatacagcagccaactggctcggcaccaaaaggtacacatcaccgaaaagtgttatgaatgcaacgaatgtggtaagaccttcacgcgctcctctaatcttatcgtgcaccagcgcatacatacgggggagaaacccttcgcctgtaacgattgcggcaaagcctttacacagagcgccaatttgatcgtgcatcaacgcagtcatactggtgagaaaccctacgagtgcaaagaatgcggaaaggcattctcttgtttctcacatctgattgttcatcaacgcattcatacggcagaaaaaccttatgattgctctgagtgtggcaaagctttctctcagctgtcatgccttatcgttcaccaacgaattcattccggtgatttaccttacgtctgcaacgaatgtggaaaagcattcacatgcagtagttacttgctaatccatcagcgcatccacaatggggagaagccttacacttgcaatgaatgtgggaaggcatttaggcagagatcttctctaactgttcaccagagaacacatactggcgaaaaaccctacgagtgtgaaaagtgcggcgctgccttcatttctaactcccacctgatgcgccaccacagaacccacctggttgagtag

SEQ ID NO: 138278 - DNA, 2661 bp, Artificial Sequence
  derived and/or modified sequence
acttcctgtccggtcattgttctcgtgccggtagaagctgaagtaccggtcagccagcctcctgctgcagagccagtgaactcaggtcgggcttctcagctgcgcacataggcagtactcatcttggccctgggaagaaactcaagaagaagcttttgaaacataaagcttggatggggtttgacctctgcagggcagcgcccagctataggagttcccctgctgagcagagaagatgactgcagaattgagagaagccatggccctagccccatggggcccagtgaaggtgaaaaaggaggaggaagaagaagaaaacttcccaggtcaggcatccagccaacaagtgcactccgagaacatcaaagtctgggccccagtgcagggtcttcagacaggccttgatggatcagaagaggaagaaaagggtcagaacatatcctgggatatggcggtagtcctgaaagcaactcaggaggcacctgctgcttcaacccttggcagctactcattaccagggactctggccaagagtgagatactggagactcatgggaccatgaactttctaggtgctgaaaccaagaacctacagttactggttccaaaaactgagatatgtgaggaagctgaaaaacccctcatcatatcagaaagaatccagaaagctgatcctcaaggacctgagttaggagaagcttgtgaaaagggaaacatgttaaagaggcagagaataaagagagaaaagaaagatttcagacaagtgatagtgaatgactgtcacttacctgaaagcttcaaagaagaggaaaaccagaaatgtaagaaatctggaggaaaatatagccttaattctggcgctgttaaaaatccaaaaacccagcttggacaaaagccttttacgtgtagcgtgtgtgggaaaggatttagtcagagtgcaaacctcgttgtgcatcagcgaatccacactggagagaaaccctttgaatgtcatgagtgtgggaaggccttcattcagagtgcaaacctcgttgtgcatcagagaatccacactggacagaaaccttatgtttgctcaaaatgtgggaaagccttcactcagagttcaaatctgactgtacatcaaaaaatccactccttagaaaaaacttttaagtgcaatgaatgtgagaaagcctttagttacagctcacaacttgctcggcaccagaaagtccacattacggaaaaatgctatgaatgtaatgaatgtgggaaaacatttactaggagctcaaacctcattgtccaccagaggatccacactggggagaagccctttgcctgtaacgactgtggcaaagcctttacccagagtgcaaatcttattgtacatcagcgaagccatactggtgagaagccatatgagtgtaaagagtgtgggaaagcctttagttgtttttcacaccttattgtgcaccagagaattcacactgcagagaaaccttacgactgcagcgaatgtgggaaagccttcagtcagctctcttgccttattgtccaccagagaattcacagtggagatcttccttacgtgtgtaatgaatgtgggaaggccttcacatgtagctcatacctacttattcatcagagaattcataatggagaaaaaccttacacatgtaatgagtgtgggaaggccttcagacagaggtcgagcctcaccgtgcaccagagaacccacactggggagaagccctatgaatgtgagaagtgtggtgcagctttcatttccaactcacacctcatgcgacaccatagaacccatcttgttgaataacaagtaaggaagaggaagacctccagcattggtcataaccttctgcctccctaatgagacacctctttgctgttttcttcctcctctataaaagtgagggctgtgtccttaaaagttatagttttcaggaatgcagcagaagacacaagaaaagcatttcagaggctaatttaaaacaaaaagtaagcacctaaaggcaaggactttgttttaactgtaccttaagcggtcatgttctctgaagtggaatgtggctttcctaggaatgggtcgtacaaagctaagtggtaatgatgctatttggggaaaggtcttttttgcttaattttgttttttaaaactctgatgattgcttgagcaacaggcaggttatctgcctggttgaattctggttgaaccgtgtattctaatatttctggttaagtggtgactgggtaaggaaaccacttggggtagcagttcaacaattcacttacgaatgtttataagctttccatttcctaggtaattttttaaaagccagtcaaaacaaaaactttactgaaaatggacagaaataggaaatggactttttccttactgtctatacctcctgaaccttggtattgtaaagatctggggacctctgggtctgttctgaccattccctagtctccatggccaagcactcaaggattgatggacaccacacaccagctatattcatttgccaagatcaacagctccttctccaaacaactcaagcccccaattcccatcgcattccatttgggtgagatgcaactaacagccccttcctggatgaaggagtcaaagaataaagcttgcctagaggcatgccc

SEQ ID NO: 138279 - DNA, 620 bp, Artificial Sequence
  derived and/or modified sequence
cattgttctcgtgccggtagaagctgaagtaccggtcagccagcctcctgctgcagagccagtgaactcaggtcgggcttctcagctgcgcacagcagtactcatcttggccctgggaagaaactcaagaagaagcttttgaaacataaagcttggatggggtttgacctctgcagggcagcgcccagctataggagttcccctgctgagcagagaagatgactgcagaattgagagaagccatggccctagccccatggggcccagtgaaggtgaaaaaggaggaggaagaagaagaaaacttcccaggtcaggcatccagccaacaagtgcactccgagaacatcaaagtctgggccccagtgcagggtcttcagacaggccttgatggatcagaagaggaagaaaagggtcagaacatatcctgggatatggcggtagtcctgaaagcaactcaggaggcacctgctgcttcaacccttggcagctactcattaccagggactctggccaagagtgagatactggagactcatgggaccatgaactttctaggtgctgaaaccaagaacctacagttactggttccaaaaactgagatatgtgaggaagctgaaaaa

SEQ ID NO: 138280 - DNA, 532 bp, Artificial Sequence
  derived and/or modified sequence
cattgttctcgtgccggtagaagctgaagtaccggtcagccagcctcctgctgcagagccagtgaactcaggcagtactcatcttggccctgggaagaaactcaagaagaagcttttgaaacataaagcttggatggggtttgacctctgcagggcagcgcccagctataggagttcccctgctgagcagagaagatgactgcagaattgagagaagccatggccctagccccatggggcccagtgaaggtgaaaaaggaggaggaagaagaagaaaacttcccaggtcaggcatccagccaacaagtgcactccgagaacatcaaagtctgggccccagtgcagggtcttcagacaggccttgatggatcagaagaggaagaaaagggtcagaacatatcctgggatatggcggtagtcctgaaagcaactcaggaggcacctgctgcttcaacccttggcagctactcattaccagggactctggccaagagtgagatactggagactcatgggaccatgaactttctag

SEQ ID NO: 138281 - DNA, 1790 bp, Artificial Sequence
  derived and/or modified sequence
attgttctcgtgccggtagaagctgaagtaccggtcagccagcctcctgctgcagagccagtgaactcaggtcgggcttctcagctgcgcacataggcagtactcatcttggccctgggaagaaactcaagaagaagcttttgaaacataaagcttggatggggtttgacctctgcagggcagcgcccagctataggagttcccctgctgagcagagaagatgactgcagaattgagagaagccatggccctagccccatggggcccagtgaaggtgaaaaaggaggaggaagaagaagaaaacttcccaggtcaggcatccagccaacaagtgcactccgagaacatcaaagtctgggccccagtgcagggtcttcagacaggccttgatggatcagaagaggaagaaaaggtgctgaaaccaagaacctacagttactggttccaaaaactgagatatgtgaggaagctgaaaaacccctcatcatatcagaaagaatccagaaagctgatcctcaaggacctgagttaggagaagcttgtgaaaagggaaacatgttaaagaggcagagaataaagagagaaaagaaagatttcagacaagtgatagtgaatgactgtcacttacctgaaagcttcaaagaagaggaaaaccagaaatgtaagaaatctggaggaaaatatagccttaattctggcgctgttaaaaatccaaaaacccagcttggacaaaagccttttacgtgtagcgtgtgtgggaaaggatttagtcagagtgcaaacctcgttgtgcatcagcgaatccacactggagagaaaccctttgaatgtcatgagtgtgggaaggccttcattcagagtgcaaacctcgttgtgcatcagagaatccacactggacagaaaccttatgtttgctcaaaatgtgggaaagccttcactcagagttcaaatctgactgtacatcaaaaaatccactccttagaaaaaacttttaagtgcaatgaatgtgagaaagcctttagttacagctcacaacttgctcggcaccagaaagtccacattacggaaaaatgctatgaatgtaatgaatgtgggaaaacatttactaggagctcaaacctcattgtccaccagaggatccacactggggagaagccctttgcctgtaacgactgtggcaaagcctttacccagagtgcaaatcttattgtacatcagcgaagccatactggtgagaagccatatgagtgtaaagagtgtgggaaagcctttagttgtttttcacaccttattgtgcaccagagaattcacactgcagagaaaccttacgactgcagcgaatgtgggaaagccttcagtcagctctcttgccttattgtccaccagagaattcacagtggagatcttccttacgtgtgtaatgaatgtgggaaggccttcacatgtagctcatacctacttattcatcagagaattcataatggagaaaaaccttacacatgtaatgagtgtgggaaggccttcagacagaggtcgagcctcaccgtgcaccagagaacccacactggggagaagccctatgaatgtgagaagtgtggtgcagctttcatttccaactcacacctcatgcgacaccatagaacccatcttgttgaataacaagtaaggaagaggaagacctccagcattggtcataaccttctgcctccctaatgagacacctctttgctgttttcttcctcctctataaaagtgagggctgtgtccttaaaagttatagttttcaggaa

SEQ ID NO: 138282 - protein, 682 aa, Artificial Sequence
  derived and/or modified sequence
MTKSKEAVTFKDVAVVFSEEELQLLDLAQRKLYRDVMLENFRNVVSVGHQSTPDGLPQLEREEKLWMMKMATQRDNSSGAKNLKEMETLQEVGLRYLPHEELFCSQIWQQITRELIKYQDSVVNIQRTGCQLEKRDDLHYKDEGFSNQSSHLQVHRVHTGEKPYKGEHCVKSFSWSSHLQINQRAHAGEKPYKCEKCDNAFRRFSSLQAHQRVHSRAKSYTNDASYRSFSQRSHLPHHQRVPTGENPYKYEECGRNVGKSSHCQAPLIVHTGEKPYKCEECGVGFSQRSYLQVHLKVHTGKKPYKCEECGKSFSWRSRLQAHERIHTGEKPYKCNACGKSFSYSSHLNIHCRIHTGEKPYKCEECGKGFSVGSHLQAHQISHTGEKPYKCEECGKGFCRASNLLDHQRGHTGEKPYQCDACGKGFSRSSDFNIHFRVHTGEKPYKCEECGKGFSQASNLLAHQRGHTGEKPYKCGTCGKGFSRSSDLNVHCRIHTGEKPYKCERCGKAFSQFSSLQVHQRVHTGEKPYQCAECGKGFSVGSQLQAHQRCHTGEKPYQCEECGKGFCRASNFLAHRGVHTGEKPYRCDVCGKRFRQRSYLQAHQRVHTGERPYKCEECGKVFSWSSYLQAHQRVHTGEKPYKCEECGKGFSWSSSLIIHQRVHADDEGDKDFPSSEDSHRKTR

SEQ ID NO: 138283 - protein, 538 aa, Artificial Sequence
  derived and/or modified sequence
MTKSKEAVTFKDVAVVFSEEELQLLDLAQRKLYRDVMLENFRNVVSVGHQSTPDGLPQLEREEKLWMMKMATQRDNSSGAKNLKEMETLQEVGLRYLPHEELFCSQIWQQITRELIKYQDSVVNIQRTGCQLEKRDDLHYKDEGFSNQSSHLQVHRVHTGEKPYKGEHCVKSFSWSSHLQINQRAHAGEKPYKCEKCDNAFRRFSSLQAHQRVHSRAKSYTNDASYRSFSQRSHLPHHQRVPTGENPYKYEECGRNVGKSSHCQAPLIVHTGEKPYKCEECGVGFSQRSYLQVHLKVHTGKKPYKCEECGKSFSWRSRLQAHERIHTGEKPYKCNACGKSFSYSSHLNIHCRIHTGEKPYKCEECGKGFSVGSHLQAHQISHTGEKPYKCEECGKGFCRASNLLDHQRGHTGEKPYQCDACGKGFSRSSDFNIHFRVHTGKNPINVRSVARASARPQIFWPIKEATLERNPTNVVHVGRASVGAQILMYTVESTQERNPINARGVVRPSVSSPAFRCIREFTLERNHISVQSVGRASV

SEQ ID NO: 138284 - DNA, 3903 bp, Artificial Sequence
  derived and/or modified sequence
gagagcgcggccttcattcctctcgtggaagtgagtgagtcctgggaccccgcgacctgttttaacttttatggtttggtcgtaggatcagcagggctcgcacttcggtcagcaggaaaagacgctgcggcgagcagcggagggcggagttgaatggctgggcagctgattgccttactgtatccggagctgctgcgttcggggcggttcgggagtcccctggttggaagtggacctgaatggggaggcgtctgaggatctcctgggctctcagcggcccgacccgccttcccccacctcccacagctctgtagcttcctagcggtgtaacgttgggaaaggaggctgttcttggactatgcctgacccgttttttaagaaagagtgcatcactcaacaggtggcgtctggagttatcctctgtggattttccaggatctcagacaagatcgtgcaatctcccagcctcctttccttcccctgccctgacttctgaaagaatgctgcgggagaggaggaaggagagcatcctggcttctggcagcagagccccactgtgacaggacctagcattcaccttcctcttctgttccgagtgcgagaagacttcagggacctctgtttcatggacattatcatattcttctcaagagtacccagcaagaggtttgcaaagaggagttattcagtgaaatcagaatcataccctgagagctacaagaactccatttttcactgtgcagaggctctctgctgaagggtcaagtggaatctggaatccagcccatgtttccccatcatcaagccatgtgaagctgcagactccaagcaacagagagacaagatttagaatactggctctggtatgaaagctggattcaggtactgttcctgcctcttgacctcaccaagcctcagcttcctcgcctgttaaatggatacaattgtcgtcattatcatctgttgagaactccctaaaatgccagctgagcataggcacagaagtttaggtgtttggaccaaggtcacacaactgatacaacagtagcttcttcacagacttggcacttctccagaaggaggaggacaaaatgacgaagtctaaggaggcagtgacattcaaggacgtggctgtggtcttctctgaggaggagctgcaactgctggaccttgcccagaggaagctgtaccgagatgtgatgctggagaacttcaggaatgtggtctcagtggggcatcagtccacaccagatggcctaccacagttagagagagaagaaaagctgtggatgatgaagatggcaacccagagagataactcctcaggagccaagaatctaaaagagatggagactcttcaagaagtaggattaaggtacctgcctcatgaagagcttttctgctcccagatctggcaacagattacaagagagttaatcaagtatcaagattctgtggtaaatattcaaagaacaggctgccagttggaaaaacgagatgatttgcactataaagatgagggattcagtaatcagagttcccatcttcaagttcacagagtccacactggtgaaaaaccctacaaaggagaacattgtgtgaaaagtttcagctggagctctcatcttcaaattaaccaaagggctcatgcaggagagaagccctacaaatgtgaaaaatgtgataatgccttccgtcggttttcaagtcttcaagcccatcagagagtccacagtagagcaaaatcatacacaaatgatgcaagttacaggagttttagtcagaggtcacatcttccccatcatcagagagttcccactggagagaatccatacaaatatgaagagtgtgggaggaatgttgggaaaagctcacattgtcaagctcctctgatagttcatacgggagagaaaccctataaatgtgaggagtgtggggtgggcttcagtcagagatcatatcttcaagttcatctgaaagttcacactggaaagaaaccatataagtgtgaagagtgtgggaagagcttcagttggcgttcacgactgcaggctcatgagcgaatccacactggcgagaaaccatacaaatgcaatgcatgtggcaagagctttagttacagctcacaccttaatattcattgtagaatccacacaggagagaaaccctataagtgtgaggagtgtgggaaaggtttcagtgtgggttcacaccttcaggcccatcagataagccacactggagagaagccatacaaatgtgaggagtgtgggaaaggcttctgccgggcctcaaatctgctggaccatcaaagaggccatactggagagaaaccgtatcagtgtgatgcatgtggtaagggcttcagtcgtagctcagattttaacattcattttagagtccatacaggggaaaaaccctataaatgtgaggagtgtggcaagggcttcagccaggcctcaaatcttctggcccatcaaagaggccacactggagagaaaccctacaaatgtggtacatgtgggaagggcttcagtcggagctcagatcttaatgtacactgtagaatccacacaggagagaaaccctataaatgcgagaggtgtggtaaggccttcagtcagttctccagccttcaggtgcatcagagagttcacactggagagaaaccatatcagtgtgcagagtgtgggaagggcttcagtgtaggttcacagcttcaagcccatcagaggtgccacactggagagaaaccctatcaatgtgaggagtgtgggaagggcttctgtcgggcctccaattttctggcacatcgtggagtccacacaggagaaaaaccataccgatgtgatgtgtgtggtaagcgcttcagacagagatcctaccttcaagcccaccagagggtccacacaggagagagaccatacaaatgtgaggaatgtgggaaagtcttcagctggagctcataccttcaagcccatcaaagagttcacaccggagaaaaaccatacaaatgtgaggagtgtgggaagggcttcagttggagctcaagtcttatcattcatcagcgagtccatgctgatgatgagggtgacaaggactttccttcatcagaggattcacacaggaaaactcgataaaatatgttttactatctcagatgggtgctgaaatattttaataatcagagctatcatagacaaaacatttgttttatagagtcagtagttcagccaagtgattgggagaccacacagcagagaagcctcacaagagtggagacatatggactgcattcagaacattgaccattagctgatacatgcagacaagaggatcaggaaggatgagtctgatctggagtaaatcagaagtactaagatagaaatgctgaattctgttccactagaatataagatccaagagggcagggactttgttgactgccaaatctactctgccttttcagtgcctaatacgttgtaatttttcagtagtatttgaaattactgtcatatttgaaattcagtaatatttgacatttttatttatctctagaagtttctctaaaattgtactcagaagaattctgcaaggcttggaggatatataagttagtcatatggcctgattttcccatttttgcagatctcgtggacaagtgtttatcaaactgaaggttgcagcttgttagtgggttcagaaatcagtttctggctagcaactagaagttttgtatgttaacagtactttattgaggtgtaatctgcatgcagtaacatgcacaagtctcaagttcatggctttctgaattttgacaaatgtaatcatcaccaagatcaatgtatacaatatgtctattaaaccaaaaagttttcttgtgcccatttccagtcaatccca

SEQ ID NO: 138285 - DNA, 2049 bp, Artificial Sequence
  derived and/or modified sequence
atgaccaagagcaaggaggccgtgaccttcaaggacgtggccgtggtgttcagcgaggaggagctgcagctgctggacctggcccagagaaagctgtacagagacgtgatgctggagaacttcagaaacgtggtgagcgtgggccaccagagcacccccgacggcctgccccagctggagagagaggagaagctgtggatgatgaagatggccacccagagagacaacagcagcggcgccaagaacctgaaggagatggagaccctgcaggaggtgggcctgagatacctgccccacgaggagctgttctgcagccagatctggcagcagatcaccagagagctgatcaagtaccaggacagcgtggtgaacatccagagaaccggctgccagctggagaagagagacgacctgcactacaaggacgagggcttcagcaaccagagcagccacctgcaggtgcacagagtgcacaccggcgagaagccctacaagggcgagcactgcgtgaagagcttcagctggagcagccacctgcagatcaaccagagagcccacgccggcgagaagccctacaagtgcgagaagtgcgacaacgccttcagaagattcagcagcctgcaggcccaccagagagtgcacagcagagccaagagctacaccaacgacgccagctacagaagcttcagccagagaagccacctgccccaccaccagagagtgcccaccggcgagaacccctacaagtacgaggagtgcggcagaaacgtgggcaagagcagccactgccaggcccccctgatcgtgcacaccggcgagaagccctacaagtgcgaggagtgcggcgtgggcttcagccagagaagctacctgcaggtgcacctgaaggtgcacaccggcaagaagccctacaagtgcgaggagtgcggcaagagcttcagctggagaagcagactgcaggcccacgagagaatccacaccggcgagaagccctacaagtgcaacgcctgcggcaagagcttcagctacagcagccacctgaacatccactgcagaatccacaccggcgagaagccctacaagtgcgaggagtgcggcaagggcttcagcgtgggcagccacctgcaggcccaccagatcagccacaccggcgagaagccctacaagtgcgaggagtgcggcaagggcttctgcagagccagcaacctgctggaccaccagagaggccacaccggcgagaagccctaccagtgcgacgcctgcggcaagggcttcagcagaagcagcgacttcaacatccacttcagagtgcacaccggcgagaagccctacaagtgcgaggagtgcggcaagggcttcagccaggccagcaacctgctggcccaccagagaggccacaccggcgagaagccctacaagtgcggcacctgcggcaagggcttcagcagaagcagcgacctgaacgtgcactgcagaatccacaccggcgagaagccctacaagtgcgagagatgcggcaaggccttcagccagttcagcagcctgcaggtgcaccagagagtgcacaccggcgagaagccctaccagtgcgccgagtgcggcaagggcttcagcgtgggcagccagctgcaggcccaccagagatgccacaccggcgagaagccctaccagtgcgaggagtgcggcaagggcttctgcagagccagcaacttcctggcccacagaggcgtgcacaccggcgagaagccctacagatgcgacgtgtgcggcaagagattcagacagagaagctacctgcaggcccaccagagagtgcacaccggcgagagaccctacaagtgcgaggagtgcggcaaggtgttcagctggagcagctacctgcaggcccaccagagagtgcacaccggcgagaagccctacaagtgcgaggagtgcggcaagggcttcagctggagcagcagcctgatcatccaccagagagtgcacgccgacgacgagggcgacaaggacttccccagcagcgaggacagccacagaaagaccagatag

SEQ ID NO: 138286 - DNA, 1617 bp, Artificial Sequence
  derived and/or modified sequence
atgaccaagagcaaggaggccgtgaccttcaaggacgtggccgtggtgttcagcgaggaggagctgcagctgctggacctggcccagagaaagctgtacagagacgtgatgctggagaacttcagaaacgtggtgagcgtgggccaccagagcacccccgacggcctgccccagctggagagagaggagaagctgtggatgatgaagatggccacccagagagacaacagcagcggcgccaagaacctgaaggagatggagaccctgcaggaggtgggcctgagatacctgccccacgaggagctgttctgcagccagatctggcagcagatcaccagagagctgatcaagtaccaggacagcgtggtgaacatccagagaaccggctgccagctggagaagagagacgacctgcactacaaggacgagggcttcagcaaccagagcagccacctgcaggtgcacagagtgcacaccggcgagaagccctacaagggcgagcactgcgtgaagagcttcagctggagcagccacctgcagatcaaccagagagcccacgccggcgagaagccctacaagtgcgagaagtgcgacaacgccttcagaagattcagcagcctgcaggcccaccagagagtgcacagcagagccaagagctacaccaacgacgccagctacagaagcttcagccagagaagccacctgccccaccaccagagagtgcccaccggcgagaacccctacaagtacgaggagtgcggcagaaacgtgggcaagagcagccactgccaggcccccctgatcgtgcacaccggcgagaagccctacaagtgcgaggagtgcggcgtgggcttcagccagagaagctacctgcaggtgcacctgaaggtgcacaccggcaagaagccctacaagtgcgaggagtgcggcaagagcttcagctggagaagcagactgcaggcccacgagagaatccacaccggcgagaagccctacaagtgcaacgcctgcggcaagagcttcagctacagcagccacctgaacatccactgcagaatccacaccggcgagaagccctacaagtgcgaggagtgcggcaagggcttcagcgtgggcagccacctgcaggcccaccagatcagccacaccggcgagaagccctacaagtgcgaggagtgcggcaagggcttctgcagagccagcaacctgctggaccaccagagaggccacaccggcgagaagccctaccagtgcgacgcctgcggcaagggcttcagcagaagcagcgacttcaacatccacttcagagtgcacaccggcaagaaccccatcaacgtgagaagcgtggccagagccagcgccagaccccagatcttctggcccatcaaggaggccaccctggagagaaaccccaccaacgtggtgcacgtgggcagagccagcgtgggcgcccagatcctgatgtacaccgtggagagcacccaggagagaaaccccatcaacgccagaggcgtggtgagacccagcgtgagcagccccgccttcagatgcatcagagagttcaccctggagagaaaccacatcagcgtgcagagcgtgggcagagccagcgtgtag

SEQ ID NO: 138287 - DNA, 2049 bp, Artificial Sequence
  derived and/or modified sequence
atgaccaagagcaaggaagctgtgacgttcaaggatgtggctgttgtcttttctgaagaggaattacaacttctcgatctagctcaacgaaaactgtatagggacgtaatgctggagaactttcggaacgtagttagcgtggggcatcagagcacaccagacggactgcctcagctcgagagggaagagaagctgtggatgatgaagatggcgacacaacgcgataacagctctggggccaaaaatctcaaagaaatggagactctccaggaggtcggtctgcgctacttgccccacgaggaacttttttgttcacagatttggcagcagattacccgagagcttattaagtaccaggacagtgtcgtgaatatccagcgaactggctgtcagctagaaaagagagacgatctccattataaggacgaaggtttctccaatcagtccagtcacctccaggtgcaccgcgttcacacgggggagaaaccctataagggggagcattgcgtcaaaagtttttcctggagctcacatctgcagattaatcaacgggcgcacgccggagagaagccgtacaagtgtgaaaagtgcgataacgcattcagacgattctcatctctccaggcccaccagagagtccacagccgggctaagtcttacacaaacgatgcgtcctacagaagtttcagccagagatcccatttaccccaccatcaaagggttcctactggggaaaatccgtacaaatacgaagaatgcgggcgcaacgtgggcaaaagcagccactgtcaggcacccctcattgtccatacaggggaaaagccgtacaaatgcgaggaatgtggagtaggatttagtcaacgaagctacctgcaggttcatctgaaggtccacaccgggaagaagccctataagtgtgaggagtgtggaaagagcttctcatggagatccaggctgcaggcacatgagaggatccataccggcgagaagccctataagtgtaacgcttgtggcaagagttttagttactcctcacatctgaatatccactgccgcatccatacaggagagaaaccttacaaatgcgaagagtgtggcaagggattctctgtgggctctcatttgcaggcacatcagatatcgcacacgggcgaaaaaccgtataagtgcgaggagtgcgggaaaggtttctgccgggccagcaacctcttagaccaccagagagggcacacaggcgagaaaccttaccagtgtgacgcctgcgggaaaggttttagcaggagtagcgattttaatattcactttcgcgttcacacgggggagaagccctataagtgcgaagaatgtggtaagggattctcccaggccagcaatctgctggcgcatcaacgtggtcacacgggcgagaaaccttataagtgcggcacatgcgggaaagggttcagcaggtctagcgatctgaatgtccattgccgcatccacacaggagagaaaccatataagtgcgaaaggtgtggaaaggccttctcacagttttctagcttgcaggtgcaccagcgggtgcacaccggtgaaaagccatatcagtgcgcggaatgtggcaaaggattctccgtgggaagccagttgcaggcacaccaaagatgccataccggcgagaaaccatatcagtgtgaggagtgcgggaagggattctgtagagcatcaaactttctggcccaccgcggagtgcatacgggagaaaagccctatagatgtgacgtgtgcggcaaaaggttccgccagaggtcttatctgcaggcccaccagcgcgtgcatacaggggagagaccatacaaatgcgaggagtgtgggaaagtattctcctggagctcttacttgcaggcacaccagcgcgttcacaccggggaaaaaccctacaagtgcgaagagtgtggtaaaggctttagctggtcatctagcttaatcattcaccaacgcgttcatgcagatgacgaaggcgataaggatttccccagctccgaggactcacatcgaaagaccaggtag

SEQ ID NO: 138288 - DNA, 1617 bp, Artificial Sequence
  derived and/or modified sequence
atgaccaagtcaaaggaggcagtgactttcaaggacgtggccgtggtttttagtgaagaagagctgcagctcctagacctcgctcaaagaaaactttatcgcgacgtcatgctggagaatttcaggaacgtggtctcagttggtcaccaatcaacacccgacggtctgcctcagttggaaagggaggagaagctgtggatgatgaaaatggcaactcagcgagacaacagttcaggagctaaaaatctgaaggagatggaaaccctgcaggaggttggcttgcggtatcttccccacgaggaactcttttgttcccagatctggcagcagataactagagaactgattaagtaccaagactccgtggttaatattcagcggacggggtgccaattagaaaaaagggatgatctgcactataaggatgaggggtttagcaaccagagctcacacttgcaggtacatcgcgtgcacacaggcgagaagccttataaaggcgaacactgtgtgaaaagttttagctggagctctcacctgcagattaaccagagggctcatgctggggagaagccctacaagtgtgaaaagtgcgacaatgcttttcggcggttcagcagcctccaggctcaccaaagggttcactccagggctaaaagttacacaaacgatgccagttataggtccttttcccagagatcacatctgcctcaccatcagcgcgtgcccactggtgaaaatccctacaagtatgaagagtgtggtcgcaacgtaggaaagtcttcgcactgtcaggcaccattgatcgtgcatactggggagaaaccctataagtgtgaggagtgcggggtcggcttctcccagaggtcctacttgcaggtgcacctgaaagtccacacaggtaaaaagccttacaagtgcgaggagtgcgggaagagcttctcatggaggagtcgcctccaggcccacgaaaggatccacaccggtgagaagccatataaatgtaacgcatgcggcaagtccttttcctatagctcacatctcaacattcactgccgcatacacactggggaaaagccttacaagtgtgaagagtgcggaaagggcttctccgtggggtcccatttacaggcacaccaaatttcccataccggagagaagccctataaatgtgaggaatgtgggaagggtttctgtagagcttcaaacctgttggaccatcagcgcgggcacactggcgaaaagccttaccagtgcgatgcctgcggcaagggcttttctcgctcttctgacttcaatatacactttcgggtgcatacaggaaaaaaccccatcaacgtaaggagcgtggcccgggccagcgcccgtcctcagattttttggcctatcaaggaggccacactagaaaggaatcccaccaatgtggtccatgtcgggcgggctagtgtgggagctcagattcttatgtataccgtggaaagcacgcaggaacggaaccctataaacgcaaggggggtggtcaggccgtcagtgtccagccccgcgtttcggtgcatccgcgaatttacactggagaggaatcacattagcgtacagagtgtgggtagggcctcagtatag

SEQ ID NO: 138289 - DNA, 2049 bp, Artificial Sequence
  derived and/or modified sequence
atgaccaagagcaaggaggccgtgaccttcaaggatgtggccgtggtgttcagcgaggaggagctgcagctgctggacctggcccagaggaagctgtacagagatgtgatgctggagaacttcagaaatgtggtgtctgtgggccaccagagcaccccagatggcctgccccagctggagcgggaggagaagctgtggatgatgaagatggccacccagagggacaacagcagcggggccaagaacctgaaggagatggagaccctgcaggaggtgggcctgcgctacctgccccatgaggagctgttctgcagccagatctggcagcagatcacccgggagctgatcaagtaccaggacagcgtggtgaacatccagaggacaggctgccagctggagaagagagatgacctgcactacaaggatgagggcttcagcaaccagagcagccacctgcaggtgcaccgggtgcacactggagagaagccctacaagggggagcactgtgtgaagagcttctcctggagcagccacctgcagatcaaccagagggcccatgctggggagaagccctacaagtgtgagaagtgtgacaatgccttccgccgcttcagcagcctgcaggcccaccagagggtgcacagccgggccaagagctacaccaatgatgccagctaccgctccttcagccagaggagccacctgccccaccaccagagggtgcccactggagagaacccctacaagtatgaggagtgtggcagaaatgtgggcaagagcagccactgccaggcccccctcatcgtgcacactggagagaagccctacaagtgtgaggagtgtggggtgggcttcagccagaggagctacctgcaggtgcacctgaaggtgcacacaggcaagaagccctacaagtgtgaggagtgtgggaagagcttctcctggaggagccggctgcaggcccacgagcgcatccacactggagagaagccctacaagtgcaatgcctgtgggaagagcttctcctacagcagccacctgaacatccactgccgcatccacactggagagaagccctacaagtgtgaggagtgtgggaagggcttctctgtgggcagccacctgcaggcccaccagatcagccacactggagagaagccctacaagtgtgaggagtgtgggaagggcttctgccgggccagcaacctgctggaccaccagaggggccacactggagagaagccctaccagtgtgatgcctgtgggaagggcttcagccgcagcagtgacttcaacatccacttccgggtgcacactggagagaagccctacaagtgtgaggagtgtgggaagggcttcagccaggccagcaacctgctggcccaccagaggggccacactggagagaagccctacaagtgtggcacctgtgggaagggcttcagccgcagcagtgacctgaatgtgcactgccgcatccacactggagagaagccctacaagtgtgagcgctgtgggaaggccttcagccagttcagcagcctgcaggtgcaccagagggtgcacactggagagaagccctaccagtgtgccgagtgtgggaagggcttctctgtgggcagccagctgcaggcccaccagcgctgccacactggagagaagccctaccagtgtgaggagtgtgggaagggcttctgccgggccagcaacttcctggcccaccggggcgtgcacactggagagaagccctaccgctgtgatgtgtgtgggaagcgcttccggcagaggagctacctgcaggcccaccagagggtgcacactggagagcggccctacaagtgtgaggagtgtgggaaggtgttctcctggagcagctacctgcaggcccaccagagggtgcacactggagagaagccctacaagtgtgaggagtgtgggaagggcttctcctggagcagcagcctcatcatccaccagagggtgcatgctgatgatgaaggagacaaggacttccccagcagcgaggacagccacaggaagaccaggtag

SEQ ID NO: 138290 - DNA, 1617 bp, Artificial Sequence
  derived and/or modified sequence
atgaccaagagcaaggaggccgtgaccttcaaggatgtggccgtggtgttcagcgaggaggagctgcagctgctggacctggcccagaggaagctgtacagagatgtgatgctggagaacttcagaaatgtggtgtctgtgggccaccagagcaccccagatggcctgccccagctggagcgggaggagaagctgtggatgatgaagatggccacccagagggacaacagcagcggggccaagaacctgaaggagatggagaccctgcaggaggtgggcctgcgctacctgccccatgaggagctgttctgcagccagatctggcagcagatcacccgggagctgatcaagtaccaggacagcgtggtgaacatccagaggacaggctgccagctggagaagagagatgacctgcactacaaggatgagggcttcagcaaccagagcagccacctgcaggtgcaccgggtgcacactggagagaagccctacaagggggagcactgtgtgaagagcttctcctggagcagccacctgcagatcaaccagagggcccatgctggggagaagccctacaagtgtgagaagtgtgacaatgccttccgccgcttcagcagcctgcaggcccaccagagggtgcacagccgggccaagagctacaccaatgatgccagctaccgctccttcagccagaggagccacctgccccaccaccagagggtgcccactggagagaacccctacaagtatgaggagtgtggcagaaatgtgggcaagagcagccactgccaggcccccctcatcgtgcacactggagagaagccctacaagtgtgaggagtgtggggtgggcttcagccagaggagctacctgcaggtgcacctgaaggtgcacacaggcaagaagccctacaagtgtgaggagtgtgggaagagcttctcctggaggagccggctgcaggcccacgagcgcatccacactggagagaagccctacaagtgcaatgcctgtgggaagagcttctcctacagcagccacctgaacatccactgccgcatccacactggagagaagccctacaagtgtgaggagtgtgggaagggcttctctgtgggcagccacctgcaggcccaccagatcagccacactggagagaagccctacaagtgtgaggagtgtgggaagggcttctgccgggccagcaacctgctggaccaccagaggggccacactggagagaagccctaccagtgtgatgcctgtgggaagggcttcagccgcagcagtgacttcaacatccacttccgggtgcacacaggcaagaaccccatcaacgtgcgctctgtggcccgggccagcgcccggccccagatcttctggcccatcaaggaggccaccctggagaggaaccccaccaacgtggtgcacgtgggccgggcctctgtgggcgcccagatcctgatgtacacagtggagagcacccaggagaggaaccccatcaatgcccggggcgtggtgcggcccagcgtgagcagccctgccttccgctgcatccgggagttcaccctggagaggaaccacatctctgtgcagagcgtgggccgggcctctgtgtag

SEQ ID NO: 138291 - DNA, 2049 bp, Artificial Sequence
  derived and/or modified sequence
atgaccaagagcaaggaggccgtgaccttcaaggacgtggccgtggtgttctctgaagaagaattacagttattggatctggcccagcggaaactttatcgggacgtgatgctcgaaaacttcaggaacgtggtatccgtcggacaccagtccacacctgatgggttgccacagcttgaacgggaagaaaagctgtggatgatgaagatggcaacacagagggataattcttctggagcaaagaatctgaaagagatggaaaccctgcaggaagtggggttgagatacctgccacacgaggagctcttttgttctcagatttggcagcaaattacccgagaattgataaagtatcaagactccgtggtgaacatccagcgcacaggatgccagttggagaaacgcgacgatctgcattataaggacgaagggttttctaaccagtccagccatttgcaggtccaccgggtccacactggggaaaagccttataaaggggaacattgtgtgaaatctttttcttggtcttcgcatctgcaaatcaaccagagagctcacgctggggagaagccttataaatgcgagaagtgtgataatgcatttcggcgattttccagcctgcaggcccaccagcgagtgcactcacgggcgaagagctacaccaatgacgcatcctatcggtcgtttagccagcgaagccacctccctcatcaccagcgcgtacctactggtgagaacccatacaaatatgaagagtgtgggaggaatgtcgggaagtcttcgcattgccaggcacccctgatagtccatacgggggaaaagccttacaagtgcgaagaatgcggtgttggtttcagccagaggtcttacctgcaggtgcatctgaaggtacacaccggtaaaaagccttataagtgcgaagaatgcgggaaatcattttcgtggaggtcgcgcctgcaggcccacgaacggatacacaccggggagaaaccctacaagtgtaatgcgtgcggcaaatcattcagctatagctcccacttgaacatccactgccgcatacacacgggcgagaagccatataagtgtgaagagtgcggaaaaggtttctctgtcgggagtcatctgcaggcccatcagattagccataccggcgagaaaccgtacaaatgtgaggagtgcgggaagggcttctgccgtgcatctaatttgctagatcaccaacggggacacaccggtgaaaagccttaccagtgcgatgcttgtgggaaggggttttcaaggagcagcgattttaacattcacttccgggtgcacactggggaaaagccgtataagtgcgaggagtgcggcaaaggctttagtcaggcgtctaatctgttggcacaccagagaggccacaccggcgagaagccgtacaaatgtggaacatgtggaaagggcttttctcgatccagtgatctgaacgtgcattgccggatccacaccggggaaaagccgtacaagtgcgaacggtgcggtaaggcattctcccagttctccagcctgcaggtccatcagcgagtgcacacaggagaaaagccataccagtgcgcagagtgcggcaaaggattttccgtgggctctcagttgcaagcacaccaacgatgccacaccggagaaaagccttaccagtgtgaagagtgtggaaagggtttctgccgagcttccaatttcctggcacacagaggggtccacaccggtgagaaaccttatcgctgcgatgtgtgcggtaaacgctttaggcagaggagctacctccaagctcatcaaagggtgcatactggtgagagaccatataagtgcgaagagtgtggtaaggtgttttcttggagctcttatctgcaggctcaccagcgagtacatactggcgagaagccctataaatgcgaagagtgtggaaaagggtttagctggtcatcgtctctcattattcaccaaagagtgcacgctgatgatgagggggataaagacttcccgtcctccgaagacagtcatcgtaagacacgatag

SEQ ID NO: 138292 - DNA, 1617 bp, Artificial Sequence
  derived and/or modified sequence
atgaccaagagcaaggaggccgtgaccttcaaggacgtggccgtggtgttctctgaagaggaattgcaattgctcgatctcgcacagagaaaactgtaccgggatgtgatgcttgaaaactttcggaatgtcgtgtcagttggccatcaaagcaccccggacggcttgccccaactcgaaagagaagagaagctgtggatgatgaaaatggctactcagcgtgacaactccagcggtgctaaaaacttaaaggagatggagactcttcaagaagtagggttgcgatacctcccccacgaggaacttttttgctcacagatttggcagcagattacccgagaactgataaagtatcaagactcggtggtaaacattcagcgcacaggctgccagctggagaagcgggacgacctccattataaggacgaaggtttctctaatcaaagctcccacttacaagtccacagagttcatacaggcgagaagccttacaaaggggagcattgtgtgaaatccttttcgtggagcagccacttacagatcaaccagcgggcccacgccggcgaaaagccatataagtgcgagaagtgtgacaacgccttcaggcgtttctcctctttacaggctcatcagagagttcattctcgcgctaaatcctacactaacgatgccagctaccgctctttcagtcagagaagtcaccttccgcatcaccagcgcgtgccgaccggagagaacccctataagtacgaagaatgtgggcgtaatgtcggcaaaagttcccactgtcaggcacctctgatcgtgcatacaggagagaagccatataagtgtgaagagtgtggagtcggattcagccagcgatcatatctccaggtgcacctgaaggtgcacacaggcaagaagccctacaagtgcgaggaatgtggaaaaagcttctcctggcggtctcgtctgcaggctcatgagaggatccatacaggtgagaaaccctacaaatgcaatgcctgcgggaagtctttttcttattcctcccacctcaatatacactgtagaatccatacaggcgagaaaccctacaagtgcgaggagtgtggtaaaggcttcagcgtcgggtctcatctacaagcccatcagattagccacacaggcgagaagccatataagtgtgaagagtgcggaaaaggcttttgccgagcttccaatttactagaccaccaaaggggccatacaggcgaaaagccatatcaatgcgatgcttgcgggaagggatttagcagatcttccgacttcaacatacactttagggtgcacaccggcaaaaatccaatcaatgtgcggtccgttgcacgggctagcgcacgtccccagattttctggcctattaaggaagccacacttgagcgaaatcctacaaatgtcgtgcacgtagggcgcgcttccgtgggagctcagatcttgatgtatacagtagaatccacacaagaaagaaacccgatcaacgcccgaggcgtggtcagaccatctgtttcatctcccgccttccgctgcatcagagagttcactctggagcgtaatcacatctccgtgcagtccgtgggcagggcctcagtgtag

SEQ ID NO: 138293 - DNA, 2049 bp, Artificial Sequence
  derived and/or modified sequence
atgactaagtcgaaggaggctgtgaccttcaaagacgtagctgtagtattcagcgaagaggagctccagctgttggaccttgctcagagaaaattatatagggatgtcatgctggagaacttccgaaacgtcgtgtcggtgggccaccagtcaacgccagatggattacctcagctcgaaagagaagagaaattatggatgatgaaaatggctacacagcgggacaacagtagcggcgcaaagaatctgaaggagatggaaaccttgcaggaggtaggcctcagatacctgccgcacgaggagctgttttgttcacagatatggcagcaaattaccagggaactcatcaaataccaggacagcgtcgtgaacattcagaggactggctgtcagctagagaagcgggacgatctgcattacaaggatgagggtttttctaaccagtcatcccatttgcaggttcatagggttcatacaggtgaaaaaccttacaaaggggagcattgtgtcaagagcttcagctggtcctcacacttacagatcaaccagcgagcccatgctggagagaaaccctataagtgtgagaaatgcgataacgccttcagaaggttctcatctcttcaggcccatcagcgggtgcactccagggccaaatcctacaccaacgatgcctcttataggtcattcagtcaaagatcacatctacctcatcaccaaagagtgcccaccggcgagaatccttataagtatgaggaatgcggtcggaacgtaggaaagtctagccattgtcaagcgccacttatcgttcacaccggggagaaaccttacaagtgtgaagaatgcggggtgggtttttctcagagatcttatcttcaagtgcacctgaaggtccacacaggaaagaaaccatacaaatgcgaggagtgcgggaagagtttttcttggagaagccgcctgcaagcccatgagaggattcatacaggagagaagccctacaaatgcaatgcttgcggcaagtcattttcctatagtagtcacctgaacatacactgtagaatccacaccggagaaaagccttacaagtgtgaagagtgtgggaagggcttcagcgtggggtctcacctacaggcccatcagattagccatacaggggagaagccttacaaatgtgaggagtgcggcaaggggttctgtcgcgctagtaacctgttagatcaccagcgaggccacactggcgagaagccctaccagtgcgatgcctgcgggaagggctttagtcgctctagcgattttaatattcactttagggtccacacaggggagaaaccttacaaatgtgaagagtgtggcaaaggcttctcccaggccagtaatttacttgcacatcagagggggcacactggtgagaaaccctataaatgcgggacatgcggcaagggtttctccagatcatcggacctcaacgtgcactgccgtatccacactggagagaaaccgtataagtgcgaaagatgcgggaaggctttctctcagtttagctcacttcaggttcaccagcgggtgcataccggcgagaagccatatcagtgtgcagagtgcggtaagggattttccgtcggctctcagcttcaagcccaccagcgttgccacacaggagagaagccataccagtgtgaggagtgtggcaaaggattctgcagagcaagcaatttcctcgcgcatcgcggagttcatacgggcgaaaaaccctatcggtgcgatgtctgcgggaaacgcttccgccaaaggagttacctgcaggcacatcagcgggtgcacacaggtgagcggccttataaatgtgaggaatgcggcaaagttttttcatggtcaagctacctccaagctcatcagcgcgtgcataccggcgaaaagccctataagtgtgaagagtgcggaaaaggtttttcatggtcctcttctctaattattcaccagcgcgtgcatgctgacgatgaaggggacaaggacttcccttccagcgaagattctcatcgcaagactcgctag

SEQ ID NO: 138294 - DNA, 1617 bp, Artificial Sequence
  derived and/or modified sequence
atgacaaagtccaaggaggccgttacatttaaagatgtcgccgtagtgtttagcgaggaggaactgcagctcctggatctggcccagcggaaactgtacagggatgtgatgctggagaacttccggaacgtggtttccgtgggacaccagtcaacccctgacggcctcccacaattagaaagagaggagaagctctggatgatgaaaatggcgacccagcgggacaactcttcaggggctaagaacctcaaagagatggagacacttcaggaggtcgggttgcgttatctcccacacgaagagctattttgcagccagatctggcagcagatcacaagagagttgatcaagtatcaggatagcgtcgtgaatattcaacgcaccggttgccagctggagaagcgggatgatctgcattacaaagacgagggtttctcaaatcagagctcccacctgcaggtgcaccgcgtgcataccggggagaagccgtataagggtgaacactgtgttaagtcattcagttggtcttctcatctccaaatcaaccagcgtgcccatgcaggagagaaaccgtacaagtgtgagaagtgtgacaatgctttccgacgcttcagttcattgcaggcacaccaaagagttcactcaagagccaagagttataccaacgacgcaagttatcggtcattttcccaacgttcccacctgccccaccaccagcgcgttccgaccggagagaacccgtacaaatacgaagaatgtgggagaaatgtcgggaaatcgtctcactgtcaggcacccctgattgtgcacaccggggagaagccatacaaatgcgaggaatgcggcgtgggattctcccagcgcagttacctccaggtgcacctcaaggttcacacgggaaagaagccgtacaagtgtgaagagtgcggcaaatccttctcttggagatccaggctgcaggcccatgagcgcatccacacaggagagaagccatacaagtgtaacgcttgtggaaagagtttcagctattcaagccacctgaatattcattgtaggatacacactggagaaaaaccctataagtgcgaagagtgtggcaagggcttttcagtggggtcccatttacaagcccatcagattagccacacgggcgagaagccatataagtgcgaggagtgtggcaaaggcttttgccgcgcaagtaatctgctggaccaccagcgcggtcatacgggagagaagccctatcagtgtgacgcttgcggaaaaggcttttctcgctcctccgatttcaacattcacttccgggtgcataccgggaagaatcccatcaacgtaaggtccgtggcaagagcctccgccagaccacagattttttggcccatcaaggaggctacactcgaaaggaatccaaccaacgtcgttcacgtgggtagagctagcgtgggcgcacagatactaatgtacaccgtggaaagtacccaggaacgaaatcccattaatgcaagaggggtggtgcgacctagtgtgagcagtcctgccttccgttgcatcagggagtttacccttgagcggaaccacataagcgttcagtctgtcggcagggcgagtgtgtag

SEQ ID NO: 138295 - DNA, 3895 bp, Artificial Sequence
  derived and/or modified sequence
gagagcgcggccttcattcctctcgtggaagtgagtgagtcctgggaccccgcgacctgttttaacttttatggtttggtcgtaggatcagcagggctcgcacttcggtcagcaggaaaagacgctgcggcgagcagcggagggcggagttgaatggctgggcagctgattgccttactgtatccggagctgctgcgttcggggcggttcgggagtcccctggttggaagtggacctgaatggggaggcgtctgaggatctcctgggctctcagcggcccgacccgccttcccccacctcccacagctctgtagcttcctagcggtgtaacgttgggaaaggaggctgttcttggactatgcctgacccgttttttaagaaagagtgcatcactcaacaggtggcgtctggagttatcctctgtggattttccaggatctcagacaagatcgtgcaatctcccagcctcctttccttcccctgccctgacttctgaaagaatgctgcgggagaggaggaaggagagcatcctggcttctggcagcagagccccactgtgacaggacctagcattcaccttcctcttctgttccgagtgcgagaagacttcagggacctctgtttcatggacattatcatattcttctcaagagtacccagcaagaggtttgcaaagaggagttattcagtgaaatcagaatcataccctgagagctacaagaactccatttttcactgtgcagaggctctctgctgaagggtcaagtggaatctggaatccagcccatgtttccccatcatcaagccatgtgaagctgcagactccaagcaacagagagacaagatttagaatactggctctggtatgaaagctggattcaggtactgttcctgcctcttgacctcaccaagcctcagcttcctcgcctgttaaatggatacaattgtcgtcattatcatctgttgagaactccctaaaatgccagctgagcataggcacagaagtttaggtgtttggaccaaggtcacacaactgatacaacagtagcttcttcacagacttggcacttctccagaaggaggaggacaaaatgacgaagtctaaggaggcagtgacattcaaggacgtggctgtggtcttctctgaggaggagctgcaactgctggaccttgcccagaggaagctgtaccgagatgtgatgctggagaacttcaggaatgtggtctcagtggggcatcagtccacaccagatggcctaccacagttagagagagaagaaaagctgtggatgatgaagatggcaacccagagagataactcctcaggagccaagaatctaaaagagatggagactcttcaagaagtaggattaaggtacctgcctcatgaagagcttttctgctcccagatctggcaacagattacaagagagttaatcaagtatcaagattctgtggtaaatattcaaagaacaggctgccagttggaaaaacgagatgatttgcactataaagatgagggattcagtaatcagagttcccatcttcaagttcacagagtccacactggtgaaaaaccctacaaaggagaacattgtgtgaaaagtttcagctggagctctcatcttcaaattaaccaaagggctcatgcaggagagaagccctacaaatgtgaaaaatgtgataatgccttccgtcggttttcaagtcttcaagcccatcagagagtccacagtagagcaaaatcatacacaaatgatgcaagttacaggagttttagtcagaggtcacatcttccccatcatcagagagttcccactggagagaatccatacaaatatgaagagtgtgggaggaatgttgggaaaagctcacattgtcaagctcctctgatagttcatacgggagagaaaccctataaatgtgaggagtgtggggtgggcttcagtcagagatcatatcttcaagttcatctgaaagttcacactggaaagaaaccatataagtgtgaagagtgtgggaagagcttcagttggcgttcacgactgcaggctcatgagcgaatccacactggcgagaaaccatacaaatgcaatgcatgtggcaagagctttagttacagctcacaccttaatattcattgtagaatccacacaggagagaaaccctataagtgtgaggagtgtgggaaaggtttcagtgtgggttcacaccttcaggcccatcagataagccacactggagagaagccatacaaatgtgaggagtgtgggaaaggcttctgccgggcctcaaatctgctggaccatcaaagaggccatactggagagaaaccgtatcagtgtgatgcatgtggtaagggcttcagtcgtagctcagattttaacattcattttagagtccatacagggaaaaaccctataaatgtgaggagtgtggcaagggcttcagccaggcctcaaatcttctggcccatcaaagaggccacactggagagaaaccctacaaatgtggtacatgtgggaagggcttcagtcggagctcagatcttaatgtacactgtagaatccacacaggagagaaaccctataaatgcgagaggtgtggtaaggccttcagtcagttctccagccttcaggtgcatcagagagttcacactggagagaaaccatatcagtgtgcagagtgtgggaagggcttcagtgtaggttcacagcttcaagcccatcagaggtgccacactggagagaaaccctatcaatgtgaggagtgtgggaagggcttctgtcgggcctccaattttctggcacatcgtggagtccacacaggagaaaaaccataccgatgtgatgtgtgtggtaagcgcttcagacagagatcctaccttcaagcccaccagagggtccacacaggagagagaccatacaaatgtgaggaatgtgggaaagtcttcagctggagctcataccttcaagcccatcaaagagttcacaccggagaaaaaccatacaaatgtgaggagtgtgggaagggcttcagttggagctcaagtcttatcattcatcagcgagtccatgctgatgatgagggtgacaaggactttccttcatcagaggattcacacaggaaaactcgataaaatatgttttactatctcagatgggtgctgaaatattttaataatcagagctatcatagacaaaacatttgttttatagagtcagtagttcagccaagtgattgggagaccacacagcagagaagcctcacaagagtggagacatatggactgcattcagaacattgaccattagctgatacatgcagacaagaggatcaggaaggatgagtctgatctggagtaaatcagaagtactaagatagaaatgctgaattctgttccactagaatataagatccaagagggcagggactttgttgactgccaaatctactctgccttttcagtgcctaatacgttgtaatttttcagtagtatttgaaattactgtcatatttgaaattcagtaatatttgacatttttatttatctctagaagtttctctaaaattgtactcagaagaattctgcaaggcttggaggatatataagttagtcatatggcctgattttcccatttttgcagatctcgtggacaagtgtttatcaaactgaaggttgcagcttgttagtgggttcagaaatcagtttctggctagcaactagaagttttgtatgttaacagtactttattgaggtgtaatctgcatgcagtaacatgcacaagtctcaagttcatggctttctgaattttgacaaatgtaatcatcaccaagatcaatgtatacaatatgtctattaaaccaaaaagttttcttgtgcccatttccagtc

SEQ ID NO: 138296 - protein, 570 aa, Artificial Sequence
  derived and/or modified sequence
MESLGLHTVTLSDGTTAYVQQAVKGEKLLEGQVIQLEDGTTAYIHQVTVQKEALSFEDGQPVQLEDGSMAYIHRTPREGYDPSTLEAVQLEDGSTAYIHHPVAVPSESTILAVQTEVGLEDLAAEDDEGFSADAVVALEQYASKVLHDSQIPRNGKGQQVGDRAFRCGYKGCGRLYTTAHHLKVHERAHTGDRPYRCDFPSCGKAFATGYGLKSHVRTHTGEKPYKCPEELCSKAFKTSGDLQKHVRTHTGERPFQCPFEGCGRSFTTSNIRKVHVRTHTGERPYTCPEPHCGRGFTSATNYKNHVRIHTGEKPYVCTVPGCGKRFTEYSSLYKHHVVHTHCKPYTCSTCGKTYRQTSTLAMHKRSAHGELEATEESEQALYEQQQLEAASAAEESPPPKRPRIAYLSEVKEERDDIPAQVAMVTEEDGAPQVALITQDGAQQVSLSPEDLQALGSAISMVTQHGSTTLTIPSPDADLATSGTHTVTMVSADGTQTQPVTIITSGAVVAEDSSVASLRHQQVALLATANGTHIAVQLEEQQTLEEAINVATAAMQQGAVTLETTVSESGC

SEQ ID NO: 138297 - protein, 428 aa, Artificial Sequence
  derived and/or modified sequence
MESLGLHTVTLSDGTTAYVQQAVKGEKLLEGQVIQLEDGTTAYIHQVTVQKEALSFEDGQPVQLEDGSMAYIHRTPREGYDPSTLEAVQLEDGSTAYIHHPVAVPSESTILAVQTEVGLEDLAAEDDEGFSADAVVALEQYASKVLHDSQIPRNGKGQQVGDRAFRCGYKGCGRLYTTAHHLKVHERAHTGDRPYRCDFPSCGKAFATGYGLKSHVRTHTGEKPYKCPEELCSKAFKTSGDLQKHVRTHTGERPFQCPFEGCGRSFTTSNIRKVHVRTHTGERPYTCPEPHCGRGFTSATNYKNHVRIHTGEKPYVCTVPGCGKRFTEYSSLYKHHVVHTHCKPYTCSTCGKTYRQTSTLAMHKRSGHCGHAARGCDPGDNSVGEWLLSPRGLGPTPCWRKCHLHGHSCPQGPRLWLTHRRWPHRSLG

SEQ ID NO: 138298 - protein, 544 aa, Artificial Sequence
  derived and/or modified sequence
MESLGLHTVTLSDGTTAYVQQAVKGEKLLEGQVIQLEDGTTAYIHQVTVQKEGYDPSTLEAVQLEDGSTAYIHHPVAVPSESTILAVQTEVGLEDLAAEDDEGFSADAVVALEQYASKVLHDSQIPRNGKGQQVGDRAFRCGYKGCGRLYTTAHHLKVHERAHTGDRPYRCDFPSCGKAFATGYGLKSHVRTHTGEKPYKCPEELCSKAFKTSGDLQKHVRTHTGERPFQCPFEGCGRSFTTSNIRKVHVRTHTGERPYTCPEPHCGRGFTSATNYKNHVRIHTGEKPYVCTVPGCGKRFTEYSSLYKHHVVHTHCKPYTCSTCGKTYRQTSTLAMHKRSAHGELEATEESEQALYEQQQLEAASAAEESPPPKRPRIAYLSEVKEERDDIPAQVAMVTEEDGAPQVALITQDGAQQVSLSPEDLQALGSAISMVTQHGSTTLTIPSPDADLATSGTHTVTMVSADGTQTQPVTIITSGAVVAEDSSVASLRHQQVALLATANGTHIAVQLEEQQTLEEAINVATAAMQQGAVTLETTVSESGC

SEQ ID NO: 138299 - protein, 402 aa, Artificial Sequence
  derived and/or modified sequence
MESLGLHTVTLSDGTTAYVQQAVKGEKLLEGQVIQLEDGTTAYIHQVTVQKEALSFEDGQPVQLEDGSMAYIHRTPREGYDPSTLEAVQLEDGSTAYIHHPVAVPSESTILAVQTEVGLEDLAAEDDEGFSADAVVALEQYASKVLHDSQIPRNGKGQQVGDRAFRCGYKGCGRLYTTAHHLKVHERAHTGDRPYRCDFPSCGKAFATGYGLKSHVRTHTGEKPYKCPEELCSKAFKTSGDLQKHVRTHTGERPFQCPFEGCGRSFTTSNIRKVHVRTHTGERPYTCPEPHCGRGFTSATNYKNHVRIHTGEKPYVCTVPGCGKRFTEYSSLYKHHVVHTHHCGHAARGCDPGDNSVGEWLLSPRGLGPTPCWRKCHLHGHSCPQGPRLWLTHRRWPHRSLG

SEQ ID NO: 138300 - protein, 340 aa, Artificial Sequence
  derived and/or modified sequence
MESLGLHTVTLSDGTTAYVQQAVKGEKLLEGQVIQLEDGTTAYIHQVTVQKEALSFEDGQPVQLEDGSMAYIHRTPREGYDPSTLEAVQLEDGSTAYIHHPVAVPSESTILAVQTEVGLEDLAAEDDEGFSADAVVALEQYASKVLHDSQIPRNGKGQQVGDRAFRCGYKGCGRLYTTAHHLKVHERAHTGDRPYRCDFPSCGKAFATGYGLKSHVRTHTGEKPYKCPEELCSKAFKTSGDLQKHVRTHTGERPFQCPFEGCGRSFTTSNIRKVHVRTHTGERPYTCPEPHCGRGFTSATNYKNHVRIHTGEKPYVCTVPGCGKRFTEYSSLYKHHVVHT

SEQ ID NO: 138301 - DNA, 2671 bp, Artificial Sequence
  derived and/or modified sequence
ctgcgcgcgggcgggcgggctatggcgcaggcgggttgtggggccggcgctggtggcggggcccggtgcatggcggtctgtcggcggagtcgccctcgggggctgtcagatttgtgacccagaaggaaatctctgacctcagctgtggctcttggtgctggccagaagccaacttcatgtctgagtgcacgagcagcagtttgccatggagagcttggggctgcacacggtgacccttagtgatgggacaacagcctacgtccagcaagctgtcaaaggagagaagcttcttgaagggcaggtgatccagctcgaggatgggaccaccgcatacattcaccaggtgacggtacagaaagaagctctctcctttgaggatggtcagcctgtgcagctggaagatggcagcatggcttacatacaccgcacacccagagaaggctatgaccccagcaccctggaagccgtccaactggaagatggctccactgcctacattcaccaccctgtggctgtgccatcggagagcaccatcctggccgtacagacagaggtgggcttggaggacctggcagcagaggatgatgagggcttcagtgcagacgcagtggtggccctggagcagtatgccagcaaggttcttcatgacagccagattccccgtaatggaaaagggcagcaagttggagacagagcattccgctgtggctacaagggctgtgggcgtctctacaccaccgctcatcacttaaaggtgcatgaacgagctcatacaggtgaccgtccatacagatgtgacttccccagctgtggaaaggcctttgccacaggctatggactgaagagccacgttcgtacccacactggtgagaaaccatacaagtgcccagaggagctgtgcagcaaggccttcaagacctcaggagacctgcagaagcatgtccgtacccacactggtgaacgcccgttccagtgcccttttgagggctgtggccgctccttcaccacatctaacatccgcaaggtacatgtgcgcacccacacaggcgagaggccctacacctgcccggagccccactgtggccgcggcttcaccagcgccaccaactataagaatcacgtgcgcatccacacaggggagaagccatacgtttgcacggtgccaggctgcgggaaacgcttcaccgagtactcgagcttgtataagcaccacgtggtgcacacacactgcaagccctacacctgcagcacctgcggcaagacctaccggcagacctccaccttggccatgcacaagcgcagtgcccatggcgagctggaggccacggaggagagtgagcaggccctctatgagcagcagcaacttgaggccgcctctgcagccgaggagagtccgccacccaaacgaccccggatagcttacctttcggaggtgaaggaagagagagatgacatcccagcccaggtggcgatggtgactgaagaagatggggccccccaggtggctctgatcactcaggatggtgcccagcaggtcagcctgtccccggaagacctgcaggccctggggagtgccatcagtatggtcacccagcacggcagcaccaccctcaccatccccagtcctgatgccgacctggccacatctggcacacatacagtcaccatggtcagcgccgatggcacccagacgcagcccgtcacaatcattacctctggggctgtggtggctgaggactcaagtgtagcatctcttcgtcatcaacaggtggcactgttggccacagccaacggaacgcacattgcagtgcagctggaggaacagcagaccttagaggaggccatcaatgtggccactgcggccatgcagcaaggggctgtgaccctggagacaacagtgtcggagagtggctgctgagtccaagagggctgggtcccacaccatgctggaggaagtgccatctgcatggccactcttgcccccaagggcccaggctgtggctgacacatagaaggtggccacataggtctctggggtgagaagacagcaagaaaactgcctaactgaagggaatgggggccctgctcaagaagggggccaggcagctggaatcaggggagtgcatcatcctcgggagctgacaacagccaggctacaccagggcacccgcctctcaaaatcagctgggcgcccactctcctcctaaagaacacccttctggccctcagtctgttccccttctcaggtagagattggggctgctatggggactggccctgtagggttgagccacagacagctcttcagcccagtagcagtggagcaggccctgtcctgccctcccagcaataaccacctccctggaggccagctgagatgcctggctacttggcaccagggacttcctgacaccacagtcaattaattcctcaggggcctgtggctggagaaaaggtgcccagcccccaccactcctcagctgccccccaacctctctatggcagagaggcagggagtggccctgtacatagactgctggggattgggtttgatttgttttgtttttttaaattccattttgataatttttttcctgctctgggtggtggtggcacatggatgaatgagtatttaataaaagttccaaatttcaaaaaaaaaaaaaaaaaa

SEQ ID NO: 138302 - DNA, 1713 bp, Artificial Sequence
  derived and/or modified sequence
atggagagcctgggcctgcacaccgtgaccctgagcgacggcaccaccgcctacgtgcagcaggccgtgaagggcgagaagctgctggagggccaggtgatccagctggaggacggcaccaccgcctacatccaccaggtgaccgtgcagaaggaggccctgagcttcgaggacggccagcccgtgcagctggaggacggcagcatggcctacatccacagaacccccagagagggctacgaccccagcaccctggaggccgtgcagctggaggacggcagcaccgcctacatccaccaccccgtggccgtgcccagcgagagcaccatcctggccgtgcagaccgaggtgggcctggaggacctggccgccgaggacgacgagggcttcagcgccgacgccgtggtggccctggagcagtacgccagcaaggtgctgcacgacagccagatccccagaaacggcaagggccagcaggtgggcgacagagccttcagatgcggctacaagggctgcggcagactgtacaccaccgcccaccacctgaaggtgcacgagagagcccacaccggcgacagaccctacagatgcgacttccccagctgcggcaaggccttcgccaccggctacggcctgaagagccacgtgagaacccacaccggcgagaagccctacaagtgccccgaggagctgtgcagcaaggccttcaagaccagcggcgacctgcagaagcacgtgagaacccacaccggcgagagacccttccagtgccccttcgagggctgcggcagaagcttcaccaccagcaacatcagaaaggtgcacgtgagaacccacaccggcgagagaccctacacctgccccgagccccactgcggcagaggcttcaccagcgccaccaactacaagaaccacgtgagaatccacaccggcgagaagccctacgtgtgcaccgtgcccggctgcggcaagagattcaccgagtacagcagcctgtacaagcaccacgtggtgcacacccactgcaagccctacacctgcagcacctgcggcaagacctacagacagaccagcaccctggccatgcacaagagaagcgcccacggcgagctggaggccaccgaggagagcgagcaggccctgtacgagcagcagcagctggaggccgccagcgccgccgaggagagccccccccccaagagacccagaatcgcctacctgagcgaggtgaaggaggagagagacgacatccccgcccaggtggccatggtgaccgaggaggacggcgccccccaggtggccctgatcacccaggacggcgcccagcaggtgagcctgagccccgaggacctgcaggccctgggcagcgccatcagcatggtgacccagcacggcagcaccaccctgaccatccccagccccgacgccgacctggccaccagcggcacccacaccgtgaccatggtgagcgccgacggcacccagacccagcccgtgaccatcatcaccagcggcgccgtggtggccgaggacagcagcgtggccagcctgagacaccagcaggtggccctgctggccaccgccaacggcacccacatcgccgtgcagctggaggagcagcagaccctggaggaggccatcaacgtggccaccgccgccatgcagcagggcgccgtgaccctggagaccaccgtgagcgagagcggctgctag

SEQ ID NO: 138303 - DNA, 1635 bp, Artificial Sequence
  derived and/or modified sequence
atggagagcctgggcctgcacaccgtgaccctgagcgacggcaccaccgcctacgtgcagcaggccgtgaagggcgagaagctgctggagggccaggtgatccagctggaggacggcaccaccgcctacatccaccaggtgaccgtgcagaaggagggctacgaccccagcaccctggaggccgtgcagctggaggacggcagcaccgcctacatccaccaccccgtggccgtgcccagcgagagcaccatcctggccgtgcagaccgaggtgggcctggaggacctggccgccgaggacgacgagggcttcagcgccgacgccgtggtggccctggagcagtacgccagcaaggtgctgcacgacagccagatccccagaaacggcaagggccagcaggtgggcgacagagccttcagatgcggctacaagggctgcggcagactgtacaccaccgcccaccacctgaaggtgcacgagagagcccacaccggcgacagaccctacagatgcgacttccccagctgcggcaaggccttcgccaccggctacggcctgaagagccacgtgagaacccacaccggcgagaagccctacaagtgccccgaggagctgtgcagcaaggccttcaagaccagcggcgacctgcagaagcacgtgagaacccacaccggcgagagacccttccagtgccccttcgagggctgcggcagaagcttcaccaccagcaacatcagaaaggtgcacgtgagaacccacaccggcgagagaccctacacctgccccgagccccactgcggcagaggcttcaccagcgccaccaactacaagaaccacgtgagaatccacaccggcgagaagccctacgtgtgcaccgtgcccggctgcggcaagagattcaccgagtacagcagcctgtacaagcaccacgtggtgcacacccactgcaagccctacacctgcagcacctgcggcaagacctacagacagaccagcaccctggccatgcacaagagaagcgcccacggcgagctggaggccaccgaggagagcgagcaggccctgtacgagcagcagcagctggaggccgccagcgccgccgaggagagccccccccccaagagacccagaatcgcctacctgagcgaggtgaaggaggagagagacgacatccccgcccaggtggccatggtgaccgaggaggacggcgccccccaggtggccctgatcacccaggacggcgcccagcaggtgagcctgagccccgaggacctgcaggccctgggcagcgccatcagcatggtgacccagcacggcagcaccaccctgaccatccccagccccgacgccgacctggccaccagcggcacccacaccgtgaccatggtgagcgccgacggcacccagacccagcccgtgaccatcatcaccagcggcgccgtggtggccgaggacagcagcgtggccagcctgagacaccagcaggtggccctgctggccaccgccaacggcacccacatcgccgtgcagctggaggagcagcagaccctggaggaggccatcaacgtggccaccgccgccatgcagcagggcgccgtgaccctggagaccaccgtgagcgagagcggctgctag

SEQ ID NO: 138304 - DNA, 1713 bp, Artificial Sequence
  derived and/or modified sequence
atggagtccctaggcctccatactgtgaccctttcagatggtacgacagcctacgtgcagcaggcggtgaaaggagaaaagctccttgaagggcaggtgattcagcttgaggacggcacgactgcgtatatccaccaggtcaccgtgcagaaggaggctctgagcttcgaggatggccagccagtgcagctcgaggacggtagtatggcctacatacatagaacccctagagagggatatgatccatcgacacttgaggccgttcagctcgaagacggctctacagcttatatccaccatcccgtcgccgttccctccgagagcacaatcctggccgtccaaaccgaggtaggcctagaagacctggccgcagaggacgatgagggattcagcgccgacgctgtggtggccctcgaacagtacgcatcaaaggtcctccatgattcacaaatccccaggaacgggaaggggcaacaggtcggggaccgcgcattccgctgtggctacaaagggtgcggacgcctctacacaaccgctcatcacttgaaagtacacgagcgcgcccacacgggcgatcgaccctataggtgcgacttcccatcgtgcggcaaggccttcgccacaggatacggcttgaaatcgcatgttcgtactcatactggggagaagccatataagtgtcccgaggagttatgcagcaaagctttcaaaacatctggcgatcttcaaaagcacgtgcggactcacacaggcgagcgccctttccagtgccctttcgaaggctgcgggcgatccttcactacaagcaatattaggaaggtgcacgtccggactcacactggcgaacggccttacacttgtcctgaacctcactgtggacgggggtttacctcagctaccaattataagaaccatgtgcgcattcataccggagagaagccgtatgtgtgtacagtccctgggtgtgggaagaggtttacagaatacagttcactctataagcaccacgttgtgcatacccactgtaaaccgtacacctgctccacctgcggaaagacttacaggcagacatctacattggccatgcacaagcgctccgcgcatggcgagctcgaggctactgaggaatctgaacaggctctctacgaacagcagcagctggaggccgccagcgccgccgaggagtccccccctcccaagagaccccgcatcgcatacctgagcgaggtcaaggaggagagggacgatattcctgctcaagtcgctatggtcacagaagaggatggggcacctcaagtggcgctgatcacccaggatggagcgcagcaggtgagcctcagcccggaagacctgcaggcccttggcagcgcaatttccatggttacgcagcacggaagtaccacattaaccatcccatctcctgatgccgaccttgcaacgtcaggaacccacaccgtcacgatggtgtctgcggatggaacccagactcagcctgtgacaattatcacaagtggcgccgtggttgcagaggattccagcgtcgcaagtttacgacaccagcaagtggctcttttagcaaccgctaacgggacccacatcgccgtgcagctggaagagcagcaaacattggaggaggccattaacgtcgcgacagccgcaatgcagcagggcgctgtaactttagaaaccaccgtgtccgagtcaggctgctag

SEQ ID NO: 138305 - DNA, 1635 bp, Artificial Sequence
  derived and/or modified sequence
atggagtccttaggattgcacaccgtaactctgtccgacggaactaccgcctacgtgcagcaagcagttaaaggggagaaactgttggaggggcaggtcattcaactagaggatggcacaaccgcctacatacaccaagtcacggtgcagaaagagggatatgaccccagtacactggaggctgtgcaactagaagacggctctaccgcctatattcatcatcctgtggcagtacctagcgagtctacaatcttagccgttcagactgaggtggggctggaagacctggctgccgaggacgacgaaggctttagcgccgatgctgttgtggctctcgagcagtacgcgtctaaggtgttacatgactctcagatacctcgcaacggcaaaggtcagcaggttggagatagagcattcaggtgtggatacaaaggttgtggtcgtctttatacaacggcccaccatctaaaggtgcacgagcgggctcatactggggacagaccttacagatgtgattttccctcttgcggtaaggcgttcgcaacggggtacggccttaaaagccatgtacgtacccataccggggagaaaccctataaatgtccagaggagctctgtagtaaggcttttaaaacatcaggggatctgcagaagcatgtccgcacacataccggagaacggccttttcagtgtccgtttgaggggtgtgggcgaagtttcaccacctcaaatatcagaaaggtgcacgtgagaacccataccggcgaaaggccctacacttgccctgagccccactgcgggagaggcttcacatcagcgactaactataagaatcatgtgcgtatccatacgggagaaaagccctacgtgtgcactgtcccaggatgtgggaagcgtttcacagagtattccagcctatataagcaccatgtagttcacacccactgcaaaccctatacttgcagtacctgcggtaaaacatatcggcagacctcaaccctagctatgcataagcgtagtgcccatggagaactggaagccaccgaagagtcggaacaggcactttacgagcaacaacagctggaggccgccagcgcggcagaggaatcacccccacctaaaagaccccgtatagcgtatcttagtgaggtgaaggaggagcgggacgacatacccgctcaggtcgccatggtgactgaggaggatggagccccccaagtggctttaatcacccaggacggtgctcagcaggtcagcttgagccccgaggatctccaggccctgggctccgctatttccatggtgacccaacacggatctacaactttaacgatcccctccccagatgctgatttggctactagcgggacacacaccgtgacaatggtgtctgcggacggcacccagacacaacctgtgactataatcacctctggtgctgttgtcgcggaagatagcagtgttgcaagtctccgacatcaacaggttgctctgcttgccacagccaatggcacccatatcgccgtgcagcttgaggaacagcagaccctggaggaggctattaacgttgctacggccgcgatgcagcagggcgcagtgacattggaaaccacggtaagtgagagcgggtgctag

SEQ ID NO: 138306 - DNA, 1713 bp, Artificial Sequence
  derived and/or modified sequence
atggagagcctgggcctgcacacagtgaccctgagtgatggcaccacagcctacgtgcagcaggccgtgaagggggagaagctgctggagggccaggtgatccagctggaggatggcaccacagcctacatccaccaggtgacagtgcagaaggaggccctgagctttgaagatggccagcctgtgcagctggaggatggctccatggcctacatccacaggaccccccgggagggctatgaccccagcaccctggaggccgtgcagctggaggatggcagcacagcctacatccaccaccctgtggccgtgcccagcgagagcaccatcctggccgtgcagacagaggtgggcctggaggacctggccgcagaagatgatgagggcttcagcgcagatgctgtggtggccctggagcagtatgccagcaaggtgctgcatgacagccagatccccagaaatggcaagggccagcaggtgggggaccgggccttccgctgtggctacaagggctgcggccgcctgtacaccacagcccaccacctgaaggtgcatgagcgggcccacactggagaccggccctaccgctgtgacttccccagctgtgggaaggcctttgccaccggctacggcctgaagagccacgtgaggacccacactggagagaagccctacaagtgcccagaggagctgtgcagcaaggccttcaagaccagcggggacctgcagaagcacgtgaggacccacactggagagcggcccttccagtgcccctttgagggctgcggccgctccttcaccaccagcaacatcaggaaggtgcacgtgaggacccacactggagagcggccctacacctgcccagagccccactgcggccggggcttcaccagcgccaccaactacaagaaccacgtgcgcatccacactggagagaagccctacgtgtgcaccgtgcccggctgtgggaagcgcttcacagagtacagcagcctgtacaagcaccacgtggtgcacacccactgcaagccctacacctgcagcacctgtgggaagacctaccggcagaccagcaccctggccatgcacaagaggtctgcccacggggagctggaggccacagaggagagcgagcaggccctgtatgagcagcagcagctggaggccgccagcgctgctgaggagagccccccacccaagaggccccgcatcgcctacctgtctgaggtgaaggaggagagagatgacatcccagcccaggtggccatggtgacagaagaagatggagccccccaggtggccctgatcacccaggatggagcccagcaggtgtccctgagccctgaggacctgcaggccctgggcagcgccatctccatggtgacccagcacggcagcaccaccctgaccatccccagcccagatgctgacctggccaccagcggcacccacacagtgaccatggtgtctgcagatggcacccagacccagcctgtgaccatcatcaccagcggggctgtggtggccgaggacagctctgtggccagcctgcggcaccagcaggtggccctgctggccacagccaacggcacccacatcgctgtgcagctggaggagcagcagaccctggaggaggccatcaacgtggccacagctgccatgcagcagggcgctgtgaccctggagaccaccgtgtctgagagcggctgctag

SEQ ID NO: 138307 - DNA, 1635 bp, Artificial Sequence
  derived and/or modified sequence
atggagagcctgggcctgcacacagtgaccctgagtgatggcaccacagcctacgtgcagcaggccgtgaagggggagaagctgctggagggccaggtgatccagctggaggatggcaccacagcctacatccaccaggtgacagtgcagaaggagggctatgaccccagcaccctggaggccgtgcagctggaggatggcagcacagcctacatccaccaccctgtggccgtgcccagcgagagcaccatcctggccgtgcagacagaggtgggcctggaggacctggccgcagaagatgatgagggcttcagcgcagatgctgtggtggccctggagcagtatgccagcaaggtgctgcatgacagccagatccccagaaatggcaagggccagcaggtgggggaccgggccttccgctgtggctacaagggctgcggccgcctgtacaccacagcccaccacctgaaggtgcatgagcgggcccacactggagaccggccctaccgctgtgacttccccagctgtgggaaggcctttgccaccggctacggcctgaagagccacgtgaggacccacactggagagaagccctacaagtgcccagaggagctgtgcagcaaggccttcaagaccagcggggacctgcagaagcacgtgaggacccacactggagagcggcccttccagtgcccctttgagggctgcggccgctccttcaccaccagcaacatcaggaaggtgcacgtgaggacccacactggagagcggccctacacctgcccagagccccactgcggccggggcttcaccagcgccaccaactacaagaaccacgtgcgcatccacactggagagaagccctacgtgtgcaccgtgcccggctgtgggaagcgcttcacagagtacagcagcctgtacaagcaccacgtggtgcacacccactgcaagccctacacctgcagcacctgtgggaagacctaccggcagaccagcaccctggccatgcacaagaggtctgcccacggggagctggaggccacagaggagagcgagcaggccctgtatgagcagcagcagctggaggccgccagcgctgctgaggagagccccccacccaagaggccccgcatcgcctacctgtctgaggtgaaggaggagagagatgacatcccagcccaggtggccatggtgacagaagaagatggagccccccaggtggccctgatcacccaggatggagcccagcaggtgtccctgagccctgaggacctgcaggccctgggcagcgccatctccatggtgacccagcacggcagcaccaccctgaccatccccagcccagatgctgacctggccaccagcggcacccacacagtgaccatggtgtctgcagatggcacccagacccagcctgtgaccatcatcaccagcggggctgtggtggccgaggacagctctgtggccagcctgcggcaccagcaggtggccctgctggccacagccaacggcacccacatcgctgtgcagctggaggagcagcagaccctggaggaggccatcaacgtggccacagctgccatgcagcagggcgctgtgaccctggagaccaccgtgtctgagagcggctgctag

SEQ ID NO: 138308 - DNA, 1713 bp, Artificial Sequence
  derived and/or modified sequence
atggagagcctgggcctgcacaccgtgaccctgagcgacggcaccaccgcttacgtgcagcaagcagtaaagggagaaaagttgttggaagggcaggtgatccaactcgaggacggcacgaccgcctatatacaccaggtgactgttcaaaaggaagccctgtcttttgaggacggccagcccgttcagctggaagacggcagcatggcgtatattcatcggacccctagagaagggtatgacccttccactctcgaagcagtccaattagaagacggaagcactgcctatatacaccaccctgtggcagtgccctctgagtctacgatcctggccgtgcagaccgaagtgggtctggaagacctcgccgctgaggatgatgaggggtttagcgctgacgcagtggtggccctggagcagtatgcatcaaaggtgctccacgattctcagatacccagaaatgggaaaggccagcaagtcggcgatagagcatttcgctgcggctacaaggggtgcggacgcctgtataccaccgctcatcacctcaaggttcatgagagagcccataccggcgacaggccctaccgatgtgactttccctcctgcggaaaagcgttcgcaacaggatacggactgaagtcacatgtaagaacacacactggggagaaaccatacaaatgtccagaagaactgtgcagcaaagcttttaagaccagcggggatctgcagaagcatgtaaggactcacaccggcgaaaggcctttccagtgccctttcgagggctgcgggcggtcatttaccacctcaaatattcggaaggtacatgtgcgaactcatacaggggagcgcccgtatacctgtcccgaaccccactgtggccgcgggtttacgtctgccaccaattataagaaccacgtgagaattcataccggcgagaaaccctacgtctgcaccgtacccggatgcggcaagcgatttacagaatacagttccttatacaagcaccacgtagtgcacacgcactgtaaaccatacacctgtagcacatgtgggaaaacctatagacaaacatctacgttggccatgcataagcgctccgcccacggcgagcttgaagcaaccgaggaatcagagcaagccttgtatgagcagcaacagcttgaagccgcaagtgctgcggaggagtcacctcctccaaagagacccagaatcgcctacttgtcagaggtgaaggaagaaagggatgacattcctgcccaagtcgccatggtgactgaagaggatggagctccccaagtggcactgataactcaggatggggcccagcaggtgagcctgtctcccgaggaccttcaggccctcggaagcgccatatctatggtgacacagcacgggagcacaacacttacaattcctagcccagatgccgacctggccacctccggcacacacacagtaacaatggtcagtgccgacgggacccagacccagccagttaccatcatcacatcaggtgccgtggtggcagaggatagctcagtggcttccctcagacatcagcaagttgctctccttgcaactgctaatgggacacacattgcggtacagctggaagaacagcagacccttgaggaagccatcaatgtggcgacggccgcaatgcagcagggcgcagtgacattggagactactgtgagcgaatcaggctgctag

SEQ ID NO: 138309 - DNA, 1635 bp, Artificial Sequence
  derived and/or modified sequence
atggagagcctgggcctgcacaccgtgaccctgagcgacggcaccactgcctacgtgcagcaggccgttaagggcgagaagctcctggagggccaggtgattcagcttgaagacggaactacagcctacattcaccaggtgacagtccagaaagaaggttatgatccgtccactctcgaagccgtgcagctcgaggacggctctactgcttacatccaccatcccgtagcggttccctctgagagtacaatactcgctgttcagaccgaagttgggctggaagacctagccgctgaagacgatgagggcttctcggcggacgcagtcgtcgccctagaacagtacgcaagcaaagtgcttcacgacagtcagattcctcgtaacggcaaggggcagcaggtgggtgatcgcgcgtttcgatgcggctataagggatgcgggcgcctgtatactacggcccatcacctgaaagtccacgagcgggcccacactggagataggccctatcgatgtgactttccaagctgcgggaaagcttttgctactggttatggactgaagtctcacgtcaggactcacaccggcgagaaaccttataagtgcccagaagaactttgcagcaaggcattcaaaacctcaggggacttgcaaaaacacgtaagaacccatacaggtgaacgaccgttccagtgcccgttcgaaggatgtggtcgatctttcactacatcaaatatccgcaaggtgcacgttcggacacacactggagagcggccttatacatgccccgagccacattgcggcagagggttcacttctgcaacaaattataaaaaccacgtgagaatccatactggcgagaaaccctatgtttgcacggtgcccggctgtgggaaacgttttaccgaatactcatccctgtacaaacatcacgtggtgcacacccactgcaaaccatacacttgcagtacgtgcggaaagacttacagacagacctctactttggcaatgcataagcgttcagcccacggagaactagaggccacggaagagtccgaacaggccctatatgagcagcaacagctggaagctgcatccgccgcagaggagagcccaccccccaaaagaccaaggatcgcctacttgtcggaggtcaaagaggagcgcgacgatatccccgctcaggtagcaatggtgacggaggaagatggagcgcctcaggtagctctcatcactcaggatggggcccagcaggtcagcttgtcccccgaagacctccaggcactgggatccgcaatcagcatggtcacgcagcacggttccacaactttgacaataccctcgcccgatgccgatcttgcaactagcggcacccatactgtgactatggtgtccgcggatgggactcagacacagcctgtaacaataatcaccagtggggccgtagttgctgaagactcctcagtggcaagtctgcgacaccagcaagtggctctccttgccaccgctaacggtacacacattgcagtccagctggaagagcaacagactctcgaggaggccattaacgtggctaccgccgccatgcagcagggcgcagtgactctagaaacgacggttagcgagagtggatgctag

SEQ ID NO: 138310 - DNA, 1713 bp, Artificial Sequence
  derived and/or modified sequence
atggaatcactgggtctgcacacagttacgctgtccgatggaacaaccgcttacgttcaacaggccgtgaaaggtgagaagcttctggaaggccaggtcattcagcttgaggacggcacgaccgcatatattcaccaggttactgtgcagaaggaggctctgtcgttcgaagacgggcagcctgtgcaattagaggatggcagcatggcttacattcaccgaacacccagagaaggttacgatccaagcacgctggaggctgtgcaattggaggatggatccactgcttatatccaccaccctgttgccgttccctccgagtccactatcctggctgtgcagactgaggtcggcctggaggatctcgcggcagaggatgatgaaggattctccgcagatgctgtagtcgccctggagcagtatgcatccaaggtgctccatgattcccagattccacgaaacggcaaggggcaacaggtgggcgatagagcatttcgttgtggctacaaaggatgcggccgattgtacacaacagcccatcacctgaaagtccacgagcgggctcacaccggtgatcggccatatcggtgtgacttcccctcttgcggtaaggccttcgcaacagggtatgggctgaagagccacgttagaactcataccggagagaaaccgtacaagtgccctgaggagctgtgctcaaaagcctttaaaacaagcggagacttgcaaaagcacgtgagaacccacactggcgagcgccctttccaatgccctttcgagggatgcggacggagcttcactacgagcaacatcaggaaggtgcatgtgaggacccataccggtgagcggccatacacctgtcccgagccgcattgtggcagagggttcacttctgcaactaattacaagaaccatgtccgaatacacactggcgagaagccctatgtgtgtacagtgcccggatgcggaaagcggtttacagagtatagctctctgtacaaacatcacgtggtgcacacacactgcaaaccctacacatgctcaacctgtggcaaaacgtacagacagacaagcaccttggcaatgcataagaggagcgcccacggagagctcgaggccaccgaggaatccgaacaggctctgtacgaacaacaacaactcgaggccgcaagcgcagcagaggaatctcctccacccaaaagacccaggatagcctacctgtcggaagtgaaagaggagcgggacgacatacccgctcaggtggcaatggttaccgaagaagacggcgcaccccaggtcgccctgattacccaggacggagcacagcaagtatccctgagtcccgaagatttgcaagcccttggatctgcaatttctatggtcacacagcatggctctacaaccctgaccatcccttcccccgacgcggaccttgccacatcaggcacgcatactgttaccatggtctcggctgatggaactcagacccaaccggtgactatcattacttccggcgcagtcgttgccgaagacagttccgtagcatccctcagacatcaacaggttgctctgctggcaacggcaaacggcactcatattgcagtccagctggaagagcaacaaaccctcgaggaagcgatcaatgttgccacagctgctatgcagcagggggcagttaccttagagactaccgtatccgagagcggctgttag

SEQ ID NO: 138311 - DNA, 1635 bp, Artificial Sequence
  derived and/or modified sequence
atggagtccttgggactccacaccgtgaccctttcagatggtactacagcctacgtgcagcaagccgtcaagggggagaaattactcgaaggtcaggttatccaactggaagatggtacaacagcgtatatccatcaggttaccgtgcagaaggaaggttatgacccatctaccctcgaagcagttcagctcgaggacggatccacagcatacattcatcaccccgtagctgttcccagtgagtcgacgatcctggctgtccagacagaggtcggtctggaggacctggcggcagaagatgatgaaggattctccgctgatgcggtcgtggctttggagcaatacgcaagcaaagtgctgcatgacagtcagatcccacgcaatggaaaggggcagcaagtgggggatcgggctttcaggtgtggctacaaaggttgcggccgtttgtatactaccgcgcaccatctgaaggttcatgagcgtgctcacacaggcgacaggccatatcgatgtgattttcctagttgcggcaaggctttcgcgactggctacggactgaaatctcatgttagaacacacacaggagaaaagccctacaagtgtccagaggaactgtgctccaaggccttcaagacctctggggaccttcagaagcatgtcagaacccacaccggggaaaggccctttcaatgcccttttgaggggtgcgggcgttccttcacaacatctaacatcagaaaagtccatgtgaggacccacacgggggaacgcccatatacttgccccgaaccccattgcggcaggggtttcacttctgccacaaactacaagaatcacgttcggatccataccggagagaaaccttacgtgtgcactgtgccaggatgtggtaaacgctttaccgagtactctagcctttacaagcatcatgttgtacatacccactgtaagccatacacttgcagtacgtgcggcaagacataccggcagacctctaccctggctatgcacaagagaagtgcacatggggaactggaagcaaccgaggagtccgagcaggctctttatgaacagcagcagctggaagctgcgagtgctgcggaggaaagcccaccacctaagcgaccgaggatcgcttacctgtccgaggttaaggaggaacgcgatgacattcccgcacaggtggcaatggtgacagaggaagatggggctccccaggttgctctgatcacacaggacggtgcccagcaagtgtccctcagccctgaggacctgcaggcactaggctctgctatttctatggtgacacagcacggaagtactactctgaccatcccaagtcccgatgccgacctggctacgtccggcacccataccgttacaatggttagcgcagacgggactcagacccagccagttaccattattacctcgggcgcagtcgtagcggaggacagcagcgtcgctagtttacggcaccaacaggtagcactcttggccactgccaatggaacgcacatcgcagtgcagctagaggagcagcagacgttagaggaggccattaacgttgcaactgctgcaatgcagcagggagccgtgacccttgaaactacagtgtcagagtcgggatgttag

SEQ ID NO: 138312 - DNA, 2716 bp, Artificial Sequence
  derived and/or modified sequence
ggcgcgccaagaggaaaggaaagtgcggcggccctggaacctggatatcgcgcgaggcaagctgcgcgcgggcgggcgggctatggcgcaggcgggttgtggggccggcgctggtggcggggcccggtgcatggcggtctgtcggcggagtcgccctcgggggctgtcagatttgtgacccagaaggaaatctctgacctcagctgtggctcttggtgctggccagaagccaacttcatgtctgagtgcacgagcagcagtttgccatggagagcttggggctgcacacggtgacccttagtgatgggacaacagcctacgtccagcaagctgtcaaaggagagaagcttcttgaagggcaggtgatccagctcgaggatgggaccaccgcatacattcaccaggtgacggtacagaaagaagctctctcctttgaggatggtcagcctgtgcagctggaagatggcagcatggcttacatacaccgcacacccagagaaggctatgaccccagcaccctggaagccgtccaactggaagatggctccactgcctacattcaccaccctgtggctgtgccatcggagagcaccatcctggccgtacagacagaggtgggcttggaggacctggcagcagaggatgatgagggcttcagtgcagacgcagtggtggccctggagcagtatgccagcaaggttcttcatgacagccagattccccgtaatggaaaagggcagcaagttggagacagagcattccgctgtggctacaagggctgtgggcgtctctacaccaccgctcatcacttaaaggtgcatgaacgagctcatacaggtgaccgtccatacagatgtgacttccccagctgtggaaaggcctttgccacaggctatggactgaagagccacgttcgtacccacactggtgagaaaccatacaagtgcccagaggagctgtgcagcaaggccttcaagacctcaggagacctgcagaagcatgtccgtacccacactggtgaacgcccgttccagtgcccttttgagggctgtggccgctccttcaccacatctaacatccgcaaggtacatgtgcgcacccacacaggcgagaggccctacacctgcccggagccccactgtggccgcggcttcaccagcgccaccaactataagaatcacgtgcgcatccacacaggggagaagccatacgtttgcacggtgccaggctgcgggaaacgcttcaccgagtactcgagcttgtataagcaccacgtggtgcacacacactgcaagccctacacctgcagcacctgcggcaagacctaccggcagacctccaccttggccatgcacaagcgcagtgcccacggcgagctggaggccacggaggagagcgagcaggccctctatgagcagcagcaacttgaggccgcctctgcagccgaggagagtccgccacccaaacgaccccggatagcttacctttcggaggtgaaggaagagagagatgacatcccagcccaggtggcgatggtgactgaagaagatggggccccccaggtggctctgatcactcaggatggtgcccagcaggtcagcctgtccccggaagacctgcaggccctggggagtgccatcagtatggtcacccagcacggcagcaccaccctcaccatccccagtcctgatgccgacctggccacatctggcacacatacagtcaccatggtcagcgccgatggcacccagacgcagcccgtcacaatcattacctctggggctgtggtggctgaggactcaagtgtagcatctcttcgtcatcaacaggtggcactgttggccacagccaacggaacgcacattgcagtgcagctggaggaacagcagaccttagaggaggccatcaatgtggccactgcggccatgcagcaaggggctgtgaccctggagacaacagtgtcggagagtggctgctgagtccaagagggctgggtcccacaccatgctggaggaagtgccatctgcatggccactcttgcccccaagggcccaggctgtggctgacacatagaaggtggccacataggtctctggggtgagaagacagcaagaaaactgcctaactgaagggaatgggggccctgctcaagaagggggccaggcagctggaatcaggggagtgcatcatcctcgggagctgacaacagccaggctacaccagggcacccgcctctcaaaatcagctgggcgcccactctcctcctaaagaacacccttctggccctcagtctgttccccttctcaggtagagattggggctgctatggggactggccctgtagggttgagccacagacagctcttcagcccagtagcagtggagcaggccctgtcctgccctcccagcaataaccacctccctggaggccagctgagatgcctggctacttggcaccagggacttcctgacaccacagtcaattaattcctcaggggcctgtggctgaagaaaaggtgcccagcccccaccactcctcagctgccccccaacctctctatggcagagaggcagggagtggccctgtacatagactgctggggattgggtttgatttgttttgttttttttaattccattttgataatttttttcctgctctgggtggtggtggcacatggatgaatgagtatttaataaaagttccaaatttcca

SEQ ID NO: 138313 - DNA, 2575 bp, Artificial Sequence
  derived and/or modified sequence
ctgcgcgcgggcgggcgggctatggcgcaggcgggttgtggggccggcgctggtggcggggcccggtgcatggcggtctgtcggcggagtcgccctcgggggctgtcagatttgtgacccagaaggaaatctctgacctcagctgtggctcttggtgctggccagaagccaacttcatgtctgagtgcacgagcagcagtttgccatggagagcttggggctgcacacggtgacccttagtgatgggacaacagcctacgtccagcaagctgtcaaaggagagaagcttcttgaagggcaggtgatccagctcgaggatgggaccaccgcatacattcaccaggtgacggtacagaaagaaggctatgaccccagcaccctggaagccgtccaactggaagatggctccactgcctacattcaccaccctgtggctgtgccatcggagagcaccatcctggccgtacagacagaggtgggcttggaggacctggcagcagaggatgatgagggcttcagtgcagacgcagtggtggccctggagcagtatgccagcaaggttcttcatgacagccagattccccgtaatggaaaagggcagcaagttggagacagagcattccgctgtggctacaagggctgtgggcgtctctacaccaccgctcatcacttaaaggtgcatgaacgagctcatacaggtgaccgtccatacagatgtgacttccccagctgtggaaaggcctttgccacaggctatggactgaagagccacgttcgtacccacactggtgagaaaccatacaagtgcccagaggagctgtgcagcaaggccttcaagacctcaggagacctgcagaagcatgtccgtacccacactggtgaacgcccgttccagtgcccttttgagggctgtggccgctccttcaccacatctaacatccgcaaggtacatgtgcgcacccacacaggcgagaggccctacacctgcccggagccccactgtggccgcggcttcaccagcgccaccaactataagaatcacgtgcgcatccacacaggggagaagccatacgtttgcacggtgccaggctgcgggaaacgcttcaccgagtactcgagcttgtataagcaccacgtggtgcacacacactgcaagccctacacctgcagcacctgcggcaagacctaccggcagacctccaccttggccatgcacaagcgcagtgcccacggcgagctggaggccacggaggagagcgagcaggccctctatgagcagcagcaacttgaggccgcctctgcagccgaggagagtccgccacccaaacgaccccggatagcttacctttcggaggtgaaggaagagagagatgacatcccagcccaggtggcgatggtgactgaagaagatggggccccccaggtggctctgatcactcaggatggtgcccagcaggtcagcctgtccccggaagacctgcaggccctggggagtgccatcagtatggtcacccagcacggcagcaccaccctcaccatccccagtcctgatgccgacctggccacatctggcacacatacagtcaccatggtcagcgccgatggcacccagacgcagcccgtcacaatcattacctctggggctgtggtggctgaggactcaagtgtagcatctcttcgtcatcaacaggtggcactgttggccacagccaacggaacgcacattgcagtgcagctggaggaacagcagaccttagaggaggccatcaatgtggccactgcggccatgcagcaaggggctgtgaccctggagacaacagtgtcggagagtggctgctgagtccaagagggctgggtcccacaccatgctggaggaagtgccatctgcatggccactcttgcccccaagggcccaggctgtggctgacacatagaaggtggccacataggtctctggggtgagaagacagcaagaaaactgcctaactgaagggaatgggggccctgctcaagaagggggccaggcagctggaatcaggggagtgcatcatcctcgggagctgacaacagccaggctacaccagggcacccgcctctcaaaatcagctgggcgcccactctcctcctaaagaacacccttctggccctcagtctgttccccttctcaggtagagattggggctgctatggggactggccctgtagggttgagccacagacagctcttcagcccagtagcagtggagcaggccctgtcctgccctcccagcaataaccacctccctggaggccagctgagatgcctggctacttggcaccagggacttcctgacaccacagtcaattaattcctcaggggcctgtggctgaagaaaaggtgcccagcccccaccactcctcagctgccccccaacctctctatggcagagaggcagggagtggccctgtacatagactgctggggattgggtttgatttgttttgttttttttaattccattttgataatttttttcctgctctgggtggtggtggcacatggatgaatgagtatttaataaaagttccaaatttc

SEQ ID NO: 138314 - protein, 1191 aa, Artificial Sequence
  derived and/or modified sequence
MPGTPGSLEMGLLTFRDVAIEFSPEEWQCLDTAQQNLYRNVMLENYRNLAFLGIALSKPDLITYLEQGKEPWNMKQHEMVDEPTGICPHFPQDFWPEQSMEDSFQKVLLRKYEKCGHENLQLRKGCKSVDECKVHKEGYNKLNQCLTTAQSKVFQCGKYLKVFYKFLNSNRHTIRHTGKKCFKCKKCVKSFCIRLHKTQHKCVYITEKSCKCKECEKTFHWSSTLTNHKEIHTEDKPYKCEECGKAFKQLSTLTTHKIICAKEKIYKCEECGKAFLWSSTLTRHKRIHTGEKPYKCEECGKAFSHSSTLAKHKRIHTGEKPYKCEECGKAFSRSSTLAKHKRIHTGEKPYKCKECGKAFSNSSTLANHKITHTEEKPYKCKECDKAFKRLSTLTKHKIIHAGEKLYKCEECGKAFNRSSNLTIHKFIHTGEKPYKCEECGKAFNWSSSLTKHKRFHTREKPFKCKECGKAFIWSSTLTRHKRIHTGEKPYKCEECGKAFRQSSTLTKHKIIHTGEKPYKFEECGKAFRQSLTLNKHKIIHSREKPYKCKECGKAFKQFSTLTTHKIIHAGKKLYKCEECGKAFNHSSSLSTHKIIHTGEKSYKCEECGKAFLWSSTLRRHKRIHTGEKPYKCEECGKAFSHSSALAKHKRIHTGEKPYKCKECGKAFSNSSTLANHKITHTEEKPYKCKECDKTFKRLSTLTKHKIIHAGEKLYKCEECGKAFNRSSNLTIHKFIHTGEKPYKCEECGKAFNWSSSLTKHKRIHTREKPFKCKECGKAFIWSSTLTRHKRIHTGEKPYKCEECGKAFSRSSTLTKHKTIHTGEKPYKCKECGKAFKHSSALAKHKIIHAGEKLYKCEECGKAFNQSSNLTTHKIIHTKEKPSKSEECDKAFIWSSTLTEHKRIHTREKTYKCEECGKAFSQPSHLTTHKRMHTGEKPYKCEECGKAFSQSSTLTTHKIIHTGEKPYKCEECGKAFRKSSTLTEHKIIHTGEKPYKCEECGKAFSQSSTLTRHTRMHTGEKPYKCEECGKAFNRSSKLTTHKIIHTGEKPYKCEECGKAFISSSTLNGHKRIHTREKPYKCEECGKAFSQSSTLTRHKRLHTGEKPYKCGECGKAFKESSALTKHKIIHTGEKPYKCEKCGKAFNQSSILTNHKKIHTITPVIPLLWEAEAGGSRGQEMETILANTVKPLLY

SEQ ID NO: 138315 - DNA, 5403 bp, Artificial Sequence
  derived and/or modified sequence
ctcgctgccgccggagtttccaggtctcgacttcactgctctgtgtcctctgctccaggaggcccagcctgtgtggccctgtgacctgcaggtattggagagccacagctaagatgccaggaacccctggaagcctagaaatgggactgttgacatttagggatgtggccatagaattctctccggaggagtggcaatgtctggacactgcacagcagaatttatataggaatgtgatgttagagaactacagaaacctggccttcctgggtattgctctctctaagccagacctgattacttatctggagcaaggaaaagagccctggaatatgaagcaacatgagatggtggatgaacccacaggtatatgtcctcattttcctcaagacttttggccagagcagagcatggaagattcttttcaaaaagtattactgagaaaatatgaaaaatgtggacatgagaatttacagttaagaaaaggttgtaaaagtgtggatgagtgtaaggtgcacaaagaaggttataataaacttaaccagtgtctcacaactgcccagagcaaagtatttcaatgtgggaaatatttgaaagtcttctataaatttttaaattcaaacagacatacgataagacatactggaaagaaatgcttcaaatgtaaaaaatgtgtcaagtcattttgcatccgtttacacaaaacccaacataaatgcgtttatattacagagaagtcctgtaaatgtaaagaatgtgaaaaaacctttcattggtcctcaacccttactaatcataaggaaattcatactgaagataaaccctacaaatgtgaagaatgtggcaaagcttttaagcagctctcaacccttactacacataaaataatctgtgctaaagagaaaatctacaagtgtgaagaatgtggcaaagcatttctatggtcctcaaccctaactagacataagaggatacacactggagagaaaccctacaaatgtgaagaatgtggcaaagcttttagccattcttcaacccttgctaaacataagagaattcatactggagagaaaccctacaaatgtgaagaatgtggcaaagcttttagccgttcttcaacccttgctaaacataagagaattcatactggagagaaaccctacaaatgtaaagaatgtggcaaagcttttagcaattcctcaacccttgctaatcataagataactcatactgaagagaaaccctacaaatgtaaagaatgtgacaaagcttttaagcgactctcaacccttactaaacataaaataatacatgctggagagaaactctacaaatgtgaagaatgtggcaaagcttttaatcgatcttcaaatcttactatacataagtttattcatactggagagaaaccttacaagtgtgaagaatgtggcaaagcatttaactggtcctcaagccttactaaacataaaagatttcatactagagagaaacccttcaaatgtaaagaatgtggcaaagcatttatatggtcttcaaccctaactagacataagaggatacacactggagagaagccctacaaatgtgaagaatgtggcaaagcttttaggcaatcctcaacccttactaaacataagataattcatactggagagaaaccctacaaatttgaagaatgtggcaaagcttttagacaatccttaacccttaataaacataagataattcatagtagagagaaaccctacaaatgtaaagaatgtggcaaagcttttaagcaattctcaacccttactacacataaaataattcatgctggaaagaaactctacaaatgtgaagaatgtggcaaagcttttaatcattcctcaagtctttctacacataagataattcatactggagagaagtcttacaagtgtgaagaatgtggcaaagcatttctatggtcctcaaccctaagaagacataagaggatacacactggagagaaaccctacaaatgtgaagaatgtggcaaagcttttagccattcttcagcccttgctaaacataagagaattcatactggagagaaaccctacaaatgtaaagaatgtggcaaagcttttagcaattcctcaacccttgctaatcataagataactcatactgaagagaaaccctacaaatgtaaagaatgtgacaaaacttttaagcgactctcaacccttactaaacataaaataatacatgctggagagaaactctacaaatgtgaagaatgtggcaaagcttttaatcgatcttcaaatcttactatacataagtttattcatactggagagaaaccttacaagtgtgaagaatgtggcaaagcatttaactggtcctcaagccttactaaacataaaagaattcatactagagagaaacccttcaaatgtaaagaatgtggcaaagcatttatatggtcttcaaccctaactagacataagaggatacacactggagagaagccctacaaatgtgaagaatgtggcaaagcttttagccgttcctcaacccttactaagcataagacaattcatactggagagaaaccctacaaatgtaaagaatgtggcaaagcttttaagcactcctcagcccttgctaaacataaaataatacatgctggagagaaactctacaaatgtgaggaatgtggcaaagcttttaatcaatcttcaaatcttacgacacataagataattcatactaaagagaaaccttccaagagtgaagaatgtgacaaagcatttatctggtcctcaacccttactgaacataagagaattcataccagagagaaaacctacaaatgtgaagaatgtggcaaagcatttagccagccttcacaccttactacacataagaggatgcacactggagagaaaccctacaaatgtgaagaatgtggcaaagcttttagccaatcctcaacccttactacacataagataattcatactggagagaaaccctacaaatgtgaagaatgtggcaaagcttttaggaaatcttcaactcttactgaacataagataattcatactggagagaaaccctacaaatgtgaagaatgtggcaaagcatttagccaatcctcaaccctaactagacatacgaggatgcacactggagagaaaccatacaaatgtgaagaatgtggcaaagcttttaatcgatcctcaaagcttactacacataagataattcatactggagagaaaccttacaagtgtgaagaatgtggcaaagcatttatatcatcctcaaccctaaatggacataagagaattcatactagagagaaaccctacaaatgtgaagaatgtggcaaagcatttagccaatcttcaaccctaactagacataagaggttgcacaccggagagaaaccctacaaatgtggagaatgtggcaaagcctttaaagagtcctcagctcttactaaacataagataattcacactggagagaaaccctacaaatgtgaaaaatgtggcaaagcctttaaccagtcttcaatccttactaaccataagaaaattcatactatcacacctgtaatcccactactttgggaggccgaggcgggcggatcacgaggtcaggagatggagaccatcctggctaacacagtgaaaccccttctctactaaaaaatacaaaaaattagccgggcgtggtggcgggcgcctgtagtcccagctatgcgagaggctgaggcaggagaatggcgtgaacccgggaggcggagcttgcagtgagccgagatcacgccactgcactcaagcctgggcgacagagcgagactccgtctcaaaaaaaaaaaaaagaaaattcatactagagagaaaccctacaaatataaagaatgtggcaaatcttttaaccggtcttcaacctttactaaacataaggtaattcatactggagtaaaactctacaaatgtgaagaatgtggcaaatcctttttctggtcctcagccctaaccagacataagaaaattcatactggacagcaaccctacaaacaggaaaaatttggcaaagcctttaaccagttttcacaccttactacagataagataactcatattggagagaaatcttacaagtgtgaataatgtggtaaagtctataaaaagtcctgaattcttaacagacataatattattcatactggagagaaactctacaaacctgaaagatgtgccaacgcttttgacaagtcaaacttttctaaacatcaagaaaatcatgctgctgagaaatcctagaaatgtgaagaatgtgacaaagcctctaaatgattgtcacacttgatcgtaggtaagataattcatactggagaaaactaccagtgtgaacaatgtggccaagctttgaactaatgctcacaccttaatgcataggaaagcatttatgcttgagaaaaagtgaacaaatatagacaaaaagccattaatacctgctcacatcgtactcaaattcagagcgttcatactaaataagaagtgtaattactgtcaaacgactgatcagaaaatatgtctttaaagtacagaagagtattttgaaaaagcattacaaatatgaagaggcattatttatgaccttttctatggaaaggtaaggacattaaaaatgtaagatgcatgatgaaaatttaagtagagaggatctttatggttaacttataatatcgagtgatgcatgaggtagatgttcagattaatattctgcattattatgaaagaaaaacattcttaattttagttaaagtttagtatgatttattgtatttttatgaaatatatgtagcatatttttaaattataaattgcatgtgaacttttcaaccaaacagttttaacatgttaaatactatcatgaattcaatgaagtgttattatgccagtaactttaacctattccaccttactcaagggtgtaggtaaaagatggtaaaaatacactatttggtaagataatggactgacatctctagtgattttttttgccagtgagttttaattgccattaagttaaagaatattgttcccataggctaaatttttatttttattttctcatttaaatgtatttgacttaatttttgtggatacctaatatgtgtacatattatgccatatgtggcatattttgatacggacacacaatatataacaatcgcattagactaaatgcggtctccattacctctagcatttattctttgtattacaaataattcaattctacagttttagttatttttaaatgtacaattaaattgttgttgactacaggattatttttatggtcataataaaacttatatacaaacataagtaaaatccataaaaaaaa

SEQ ID NO: 138316 - DNA, 3576 bp, Artificial Sequence
  derived and/or modified sequence
atgcccggcacccccggcagcctggagatgggcctgctgaccttcagagacgtggccatcgagttcagccccgaggagtggcagtgcctggacaccgcccagcagaacctgtacagaaacgtgatgctggagaactacagaaacctggccttcctgggcatcgccctgagcaagcccgacctgatcacctacctggagcagggcaaggagccctggaacatgaagcagcacgagatggtggacgagcccaccggcatctgcccccacttcccccaggacttctggcccgagcagagcatggaggacagcttccagaaggtgctgctgagaaagtacgagaagtgcggccacgagaacctgcagctgagaaagggctgcaagagcgtggacgagtgcaaggtgcacaaggagggctacaacaagctgaaccagtgcctgaccaccgcccagagcaaggtgttccagtgcggcaagtacctgaaggtgttctacaagttcctgaacagcaacagacacaccatcagacacaccggcaagaagtgcttcaagtgcaagaagtgcgtgaagagcttctgcatcagactgcacaagacccagcacaagtgcgtgtacatcaccgagaagagctgcaagtgcaaggagtgcgagaagaccttccactggagcagcaccctgaccaaccacaaggagatccacaccgaggacaagccctacaagtgcgaggagtgcggcaaggccttcaagcagctgagcaccctgaccacccacaagatcatctgcgccaaggagaagatctacaagtgcgaggagtgcggcaaggccttcctgtggagcagcaccctgaccagacacaagagaatccacaccggcgagaagccctacaagtgcgaggagtgcggcaaggccttcagccacagcagcaccctggccaagcacaagagaatccacaccggcgagaagccctacaagtgcgaggagtgcggcaaggccttcagcagaagcagcaccctggccaagcacaagagaatccacaccggcgagaagccctacaagtgcaaggagtgcggcaaggccttcagcaacagcagcaccctggccaaccacaagatcacccacaccgaggagaagccctacaagtgcaaggagtgcgacaaggccttcaagagactgagcaccctgaccaagcacaagatcatccacgccggcgagaagctgtacaagtgcgaggagtgcggcaaggccttcaacagaagcagcaacctgaccatccacaagttcatccacaccggcgagaagccctacaagtgcgaggagtgcggcaaggccttcaactggagcagcagcctgaccaagcacaagagattccacaccagagagaagcccttcaagtgcaaggagtgcggcaaggccttcatctggagcagcaccctgaccagacacaagagaatccacaccggcgagaagccctacaagtgcgaggagtgcggcaaggccttcagacagagcagcaccctgaccaagcacaagatcatccacaccggcgagaagccctacaagttcgaggagtgcggcaaggccttcagacagagcctgaccctgaacaagcacaagatcatccacagcagagagaagccctacaagtgcaaggagtgcggcaaggccttcaagcagttcagcaccctgaccacccacaagatcatccacgccggcaagaagctgtacaagtgcgaggagtgcggcaaggccttcaaccacagcagcagcctgagcacccacaagatcatccacaccggcgagaagagctacaagtgcgaggagtgcggcaaggccttcctgtggagcagcaccctgagaagacacaagagaatccacaccggcgagaagccctacaagtgcgaggagtgcggcaaggccttcagccacagcagcgccctggccaagcacaagagaatccacaccggcgagaagccctacaagtgcaaggagtgcggcaaggccttcagcaacagcagcaccctggccaaccacaagatcacccacaccgaggagaagccctacaagtgcaaggagtgcgacaagaccttcaagagactgagcaccctgaccaagcacaagatcatccacgccggcgagaagctgtacaagtgcgaggagtgcggcaaggccttcaacagaagcagcaacctgaccatccacaagttcatccacaccggcgagaagccctacaagtgcgaggagtgcggcaaggccttcaactggagcagcagcctgaccaagcacaagagaatccacaccagagagaagcccttcaagtgcaaggagtgcggcaaggccttcatctggagcagcaccctgaccagacacaagagaatccacaccggcgagaagccctacaagtgcgaggagtgcggcaaggccttcagcagaagcagcaccctgaccaagcacaagaccatccacaccggcgagaagccctacaagtgcaaggagtgcggcaaggccttcaagcacagcagcgccctggccaagcacaagatcatccacgccggcgagaagctgtacaagtgcgaggagtgcggcaaggccttcaaccagagcagcaacctgaccacccacaagatcatccacaccaaggagaagcccagcaagagcgaggagtgcgacaaggccttcatctggagcagcaccctgaccgagcacaagagaatccacaccagagagaagacctacaagtgcgaggagtgcggcaaggccttcagccagcccagccacctgaccacccacaagagaatgcacaccggcgagaagccctacaagtgcgaggagtgcggcaaggccttcagccagagcagcaccctgaccacccacaagatcatccacaccggcgagaagccctacaagtgcgaggagtgcggcaaggccttcagaaagagcagcaccctgaccgagcacaagatcatccacaccggcgagaagccctacaagtgcgaggagtgcggcaaggccttcagccagagcagcaccctgaccagacacaccagaatgcacaccggcgagaagccctacaagtgcgaggagtgcggcaaggccttcaacagaagcagcaagctgaccacccacaagatcatccacaccggcgagaagccctacaagtgcgaggagtgcggcaaggccttcatcagcagcagcaccctgaacggccacaagagaatccacaccagagagaagccctacaagtgcgaggagtgcggcaaggccttcagccagagcagcaccctgaccagacacaagagactgcacaccggcgagaagccctacaagtgcggcgagtgcggcaaggccttcaaggagagcagcgccctgaccaagcacaagatcatccacaccggcgagaagccctacaagtgcgagaagtgcggcaaggccttcaaccagagcagcatcctgaccaaccacaagaagatccacaccatcacccccgtgatccccctgctgtgggaggccgaggccggcggcagcagaggccaggagatggagaccatcctggccaacaccgtgaagcccctgctgtactag

SEQ ID NO: 138317 - DNA, 3576 bp, Artificial Sequence
  derived and/or modified sequence
atgccgggaacgcccgggagtctggagatgggtctgctcacattcagggacgtggcgatcgaattttcacctgaggagtggcagtgcctggacactgcccaacagaacttgtacagaaacgtcatgctggagaattatcgtaacctggcctttctgggtatcgcgctgagtaagccagacctcattacatatctggagcagggcaaagaaccatggaacatgaagcagcatgaaatggtggacgagcctactggcatctgcccgcacttccctcaagatttctggccagagcagtccatggaggactcttttcagaaggtgctgctgcgcaagtatgagaaatgtgggcacgaaaaccttcagctgaggaaaggttgtaaatcagtggatgagtgtaaggtgcataaagaaggttacaacaaactgaatcagtgtctcactacagcccaaagcaaagtttttcagtgcggaaaatacttgaaagtcttctataagttcctgaatagtaatcggcatactatcagacacacaggcaagaaatgtttcaaatgtaagaaatgtgtgaaatctttctgcattcggctgcataagacccaacacaaatgcgtttacatcaccgaaaagtcttgcaaatgcaaagagtgtgaaaagacctttcactggtcatcaaccctgaccaatcataaagaaattcacaccgaagacaagccttacaagtgtgaggagtgcggaaaagcctttaagcaactctctactctgactacccacaagatcatttgtgccaaggagaaaatctataaatgcgaagagtgtggaaaagcctttctgtggtcctctacactgacacgtcataagcgaatacacactggcgagaaaccatacaagtgcgaggaatgcggtaaggccttttctcacagcagcactctcgcaaaacataaaaggatccataccggagagaagccatacaagtgcgaggagtgcgggaaagcctttagtcgcagctctacactcgctaagcataagcgaatccacactggagaaaaaccctacaagtgcaaggagtgcggaaaggctttcagtaattcttccaccctggctaatcacaagatcactcacacggaggaaaagccatataaatgtaaagagtgcgacaaggcctttaaacgactgtctacgctgactaaacacaagatcatacacgcaggtgaaaagctttataagtgcgaagaatgcggcaaggctttcaacagatccagtaacctgacgattcataagtttattcacactggcgaaaagccttacaagtgtgaagaatgtggaaaggcctttaattggtcgtcttcccttaccaaacataagcgcttccatacacgggaaaagcccttcaagtgcaaggagtgtgggaaggccttcatctggagctctaccctgaccaggcacaagcgaatccacaccggggagaagccgtataagtgcgaggagtgcgggaaggcatttcgccagtcgagcactctgaccaagcataaaattatccacacgggtgaaaagccctacaagtttgaggagtgtgggaaggctttcaggcaatctctgaccctgaataaacacaagatcatccatagccgggagaaaccctacaagtgcaaagagtgcggcaaggccttcaagcagttctctacacttactacgcacaagattatacatgctggcaaaaaattatacaagtgcgaggagtgcgggaaagcttttaaccactcttcttccctcagcactcataaaatcatccacactggagaaaagagctataaatgtgaggaatgcgggaaagcctttctgtggtcctcaacattgaggcgtcataaacgcatccacaccggcgagaaaccttataaatgcgaagaatgtggcaaggccttttcgcactcctccgccctggccaaacataaacgcattcacacaggggaaaagccttacaagtgtaaagaatgtggcaaggctttctcaaactcttcaacgctggccaaccacaagataacccacactgaggaaaaaccctacaagtgtaaagaatgtgataagacatttaagagattatcaaccctgacaaagcacaagatcatacatgctggggagaagctatacaaatgtgaagaatgtgggaaggcatttaatcgctcttctaacctcacaatccataagttcattcataccggcgaaaagccatacaagtgcgaggagtgcggtaaggcattcaattggagttccagcttgacaaagcacaagcgcatccacacaagggagaagccgttcaagtgtaaagaatgcggaaaggcattcatctggtcctctactctcactagacacaaaagaatacatacaggtgagaaaccttacaagtgtgaagagtgtggcaaagctttcagccggagctctacactgaccaagcacaagacgatccacacaggcgagaagccatacaaatgcaaagagtgcggtaaggcgttcaagcacagcagtgctttggccaaacacaaaatcattcatgcaggggagaaattgtacaagtgtgaagagtgcggaaaagcctttaaccagtcaagcaacctcaccactcacaagatcatccacaccaaggagaagccctccaaatccgaagaatgtgacaaggcctttatatggtcctccacgcttactgaacacaagcggatccacaccagggaaaagacctacaagtgcgaagaatgcggcaaagccttcagtcaaccttctcatttaactacacacaagaggatgcacaccggcgagaagccctacaaatgtgaagagtgcggaaaagccttctctcaaagttctaccctaacaacacataagataattcacacgggcgagaagccctacaagtgtgaagagtgcggcaaagccttcagaaagagttcgacacttactgaacacaaaattatacacactggtgaaaagccttataaatgtgaggagtgcggtaaagctttcagccagtcaagcaccttgaccaggcatactcgcatgcataccggcgagaagccttataagtgtgaagagtgcggcaaagccttcaataggagctcgaagctcacaacacataagattatccacaccggcgaaaagccttataaatgcgaggaatgcggaaaagcttttatcagctctagcaccttaaacggccacaagaggatccatactagagagaagccttacaagtgtgaggagtgtggcaaagcgtttagtcagtcatctaccctcaccagacataagcggctacatacaggggaaaagccttacaaatgcggtgagtgcgggaaggcctttaaggagagctccgcccttactaaacataagatcatccacacaggcgaaaagccctacaaatgtgagaaatgtggcaaagctttcaatcagtctagcatccttacaaatcacaagaagatacacacaataacacccgtgatacctctcctctgggaggctgaagctggagggagtaggggacaagagatggaaaccatcctggccaataccgttaagcctctcctgtactag

SEQ ID NO: 138318 - DNA, 3576 bp, Artificial Sequence
  derived and/or modified sequence
atgcctggcaccccaggcagcctggagatgggcctgctgaccttcagagatgtggccatcgagttcagccctgaggagtggcagtgcctggacacagcccagcagaacctgtacagaaatgtgatgctggagaactacagaaacctggccttcctgggcatcgccctgagcaagccagacctgatcacctacctggagcagggcaaggagccctggaacatgaagcagcacgagatggtggatgagcccaccggcatctgcccccacttcccccaggacttctggccagagcagagcatggaggacagcttccagaaggtgctgctgaggaaatatgagaagtgtggccacgagaacctgcagctgaggaagggctgcaagtctgtggatgagtgcaaggtgcacaaggagggctacaacaagctgaaccagtgcctgaccacagcccagagcaaggtgttccagtgtgggaagtacctgaaggtgttctacaagttcctgaacagcaacagacacaccatccgccacacaggcaagaagtgcttcaagtgcaagaagtgtgtgaagagcttctgcatccggctgcacaagacccagcacaagtgtgtgtacatcacagagaagagctgcaagtgcaaggaatgtgagaagaccttccactggagcagcaccctgaccaaccacaaggagatccacacagaggacaagccctacaagtgtgaggagtgtgggaaggccttcaagcagctgagcaccctgaccacccacaagatcatctgtgccaaggagaagatctacaagtgtgaggagtgtgggaaggccttcctgtggagcagcaccctgaccaggcacaagaggatccacactggagagaagccctacaagtgtgaggagtgtgggaaggccttcagccacagcagcaccctggccaagcacaagaggatccacactggagagaagccctacaagtgtgaggagtgtgggaaggccttcagccgcagcagcaccctggccaagcacaagaggatccacactggagagaagccctacaagtgcaaggaatgtgggaaggccttcagcaacagcagcaccctggccaaccacaagatcacccacacagaggagaagccctacaagtgcaaggaatgtgacaaggccttcaagaggctgagcaccctgaccaagcacaagatcatccatgctggggagaagctgtacaagtgtgaggagtgtgggaaggccttcaacagaagcagcaacctgaccatccacaagttcatccacactggagagaagccctacaagtgtgaggagtgtgggaaggccttcaactggagcagcagcctgaccaagcacaagcgcttccacacccgggagaagcccttcaagtgcaaggaatgtgggaaggccttcatctggagcagcaccctgaccaggcacaagaggatccacactggagagaagccctacaagtgtgaggagtgtgggaaggccttccggcagagcagcaccctgaccaagcacaagatcatccacactggagagaagccctacaagtttgaggagtgtgggaaggccttccggcagagcctgaccctgaacaagcacaagatcatccacagccgggagaagccctacaagtgcaaggaatgtgggaaggccttcaagcagttcagcaccctgaccacccacaagatcatccatgctgggaagaagctgtacaagtgtgaggagtgtgggaaggccttcaaccacagcagcagcctgagcacccacaagatcatccacactggagagaagagctacaagtgtgaggagtgtgggaaggccttcctgtggagcagcaccctgcggcggcacaagaggatccacactggagagaagccctacaagtgtgaggagtgtgggaaggccttcagccacagcagcgccctggccaagcacaagaggatccacactggagagaagccctacaagtgcaaggaatgtgggaaggccttcagcaacagcagcaccctggccaaccacaagatcacccacacagaggagaagccctacaagtgcaaggaatgtgacaagaccttcaagaggctgagcaccctgaccaagcacaagatcatccatgctggggagaagctgtacaagtgtgaggagtgtgggaaggccttcaacagaagcagcaacctgaccatccacaagttcatccacactggagagaagccctacaagtgtgaggagtgtgggaaggccttcaactggagcagcagcctgaccaagcacaagaggatccacacccgggagaagcccttcaagtgcaaggaatgtgggaaggccttcatctggagcagcaccctgaccaggcacaagaggatccacactggagagaagccctacaagtgtgaggagtgtgggaaggccttcagccgcagcagcaccctgaccaagcacaagaccatccacactggagagaagccctacaagtgcaaggaatgtgggaaggccttcaagcacagcagcgccctggccaagcacaagatcatccatgctggggagaagctgtacaagtgtgaggagtgtgggaaggccttcaaccagagcagcaacctgaccacccacaagatcatccacaccaaggagaagcccagcaagtctgaggagtgtgacaaggccttcatctggagcagcaccctgacagagcacaagaggatccacacccgggagaagacctacaagtgtgaggagtgtgggaaggccttcagccagcccagccacctgaccacccacaagaggatgcacactggagagaagccctacaagtgtgaggagtgtgggaaggccttcagccagagcagcaccctgaccacccacaagatcatccacactggagagaagccctacaagtgtgaggagtgtgggaaggccttcaggaagagcagcaccctgacagagcacaagatcatccacactggagagaagccctacaagtgtgaggagtgtgggaaggccttcagccagagcagcaccctgaccaggcacaccaggatgcacactggagagaagccctacaagtgtgaggagtgtgggaaggccttcaacagaagcagcaagctgaccacccacaagatcatccacactggagagaagccctacaagtgtgaggagtgtgggaaggccttcatcagcagcagcaccctgaatggccacaagaggatccacacccgggagaagccctacaagtgtgaggagtgtgggaaggccttcagccagagcagcaccctgaccaggcacaagaggctgcacactggagagaagccctacaagtgtggggagtgtgggaaggccttcaaggagagcagcgccctgaccaagcacaagatcatccacactggagagaagccctacaagtgtgagaagtgtgggaaggccttcaaccagagcagcatcctgaccaaccacaagaagatccacaccatcacccctgtgatccccctgctgtgggaggccgaggccggcggcagccggggccaggagatggagaccatcctggccaacacagtgaagcccctgctgtactag

SEQ ID NO: 138319 - DNA, 3576 bp, Artificial Sequence
  derived and/or modified sequence
atgcccggcacccccggcagcctggagatgggcctgctgaccttccgggatgtagccatcgagttctcgcctgaggaatggcagtgcctggataccgcccaacagaatctctacagaaatgtgatgctcgaaaactacagaaacctcgccttcctgggcattgccctgagtaaacccgacctaattacatatttagaacagggtaaagagccttggaatatgaaacaacacgaaatggtggatgagcctaccggcatctgtccgcattttccacaggatttttggccggagcaaagtatggaagattcattccagaaagtactactccgcaaatatgaaaagtgcgggcatgaaaaccttcagttgcgtaaaggctgcaaatctgttgacgaatgcaaagtgcataaagaagggtacaataagctgaatcaatgtctgaccactgcgcaaagcaaggtatttcagtgtggcaagtacctcaaagtgttctacaaattcttaaacagcaaccggcacaccataagacacacaggtaaaaagtgtttcaagtgcaagaagtgcgtcaaatctttctgtatccgacttcataagacccaacacaagtgtgtctacataaccgaaaagagctgcaaatgcaaagaatgcgagaagactttccactggtcctctacgctgactaatcacaaagagatccatactgaagacaaaccttataaatgtgaggagtgtggcaaagcctttaagcagctttcaactcttactacacataaaattatctgtgctaaagagaagatctataagtgcgaggagtgtggcaaggccttcctctggagttctacgctgactcggcataaacgtatccacacgggggagaaaccatataaatgcgaagaatgcggtaaggcattttctcacagcagtaccctagccaagcacaaaagaatccatactggagagaaaccttataagtgcgaagagtgtgggaaggctttcagcaggagtagcactctcgctaagcacaaacgcatacatacaggtgaaaaaccctataaatgtaaggagtgcggaaaagccttcagtaattcctccacactggcaaatcataaaattacccacaccgaagagaagccatataaatgtaaagagtgtgacaaggccttcaagaggctttccacactgaccaaacacaagatcatacacgccggcgagaaactgtataagtgtgaagaatgtgggaaagcctttaaccgttccagcaacttgaccattcataagttcattcatactggcgaaaaaccttataaatgtgaagaatgcggtaaagccttcaactggtcttccagccttactaagcacaagagatttcatacaagggagaaaccttttaagtgcaaggagtgtggcaaagcattcatttggtcatctacactcaccagacacaagcgaatacacactggtgagaaaccctataagtgcgaggaatgcggtaaagctttccggcagtctagtactttaactaagcataagattatacacacaggcgaaaagccctataagtttgaggaatgcggcaaagccttcagacaatctttaacccttaataaacacaagatcatccattcacgcgagaagccttataagtgtaaagagtgtggcaaagctttcaaacaatttagtacactgactacccacaagattattcacgccggcaagaagctctacaaatgtgaagagtgcgggaaagctttcaaccacagctccagtttaagtacccacaaaattatccacactggcgagaaaagttacaagtgcgaggagtgtggcaaagcttttctttggagtagcactttacgtaggcataaacgtatacataccggagaaaagccttacaaatgtgaggagtgcggcaaagccttcagccactcatcggcccttgccaaacataaaaggattcacaccggggaaaaaccctataaatgtaaagaatgtggcaaggccttctctaacagttctactttggcaaatcataagattacacacaccgaggagaagccatacaagtgcaaagaatgcgacaaaactttcaagcggttgagcaccctcacaaagcacaagattatacatgctggcgagaagctgtacaagtgtgaggaatgcgggaaggccttcaatcgcagctctaacttaactatccacaagtttatccacacaggagaaaaaccctacaaatgtgaggaatgcgggaaagcttttaactggagttctagcctcaccaagcataagcgaatccatacgagggagaaaccttttaagtgtaaggaatgcggaaaggccttcatctggtctagcactttgacgcgtcacaagaggatccatactggcgagaaaccctataagtgcgaggaatgtgggaaagcttttagcaggtcatcaacacttacaaagcacaaaactattcacacgggcgaaaaaccttataaatgcaaagaatgcggtaaagccttcaaacattcgtcggccctggcaaagcataagatcatccatgccggcgaaaagctgtacaaatgtgaagagtgtgggaaagcattcaaccagagctccaacctgaccacccataaaattatccataccaaggagaagccttcaaagtccgaagaatgcgacaaagcatttatttggtcctccaccctcaccgagcataaacggatccataccagggagaaaacttacaagtgcgaagagtgtggcaaggcttttagccagcctagccacttgacgactcacaagcgcatgcatactggggaaaagccttataaatgtgaagaatgcggaaaagccttttcacagtccagtacgctcaccacgcacaagattatccacaccggggaaaagccgtacaaatgcgaggagtgtggaaaagccttcagaaagagttccaccctcacagaacacaaaattatccacactggagagaaaccttacaagtgcgaagaatgcggaaaggcattcagtcagagttccacccttacacggcacacccgaatgcacacaggagaaaaaccctacaaatgtgaagagtgtggtaaggcattcaaccggtcaagcaagcttactactcacaagattatacacacaggggaaaagccgtacaagtgtgaggagtgcgggaaggctttcattagcagcagcactttaaacgggcataaaaggattcatacgcgggaaaagccatataaatgcgaggagtgtggaaaggcattcagccagtcttcaaccctcacgagacacaaaagactccacaccggagagaagccttacaagtgtggagagtgcgggaaagcattcaaagagtcgtccgctctgacgaagcacaaaatcatacacactggagagaaaccctataagtgcgaaaagtgtgggaaagcctttaaccagtccagcatcctgaccaatcacaaaaaaattcacactatcaccccagttatacccctcctatgggaggcggaggcagggggcagccgcggccaggaaatggaaacaatcctagctaatactgtgaagccactgctgtactag

SEQ ID NO: 138320 - DNA, 3576 bp, Artificial Sequence
  derived and/or modified sequence
atgcccggtacacctggctccctggagatgggcctgctgacattcagggatgtcgccattgaatttagcccggaggagtggcagtgtctcgacactgcccagcagaatctttaccgaaacgttatgctcgagaactataggaatctcgccttcttgggcattgctctcagtaagcccgatctgatcacatacctcgagcagggtaaggagccatggaatatgaagcagcatgaaatggtcgacgaacctaccgggatatgcccacatttcccccaggatttctggcctgagcagtctatggaggattcattccagaaggtgttgttaagaaagtacgagaaatgtggtcatgaaaacctccagctacgcaagggctgtaagtccgtggatgagtgtaaggtgcacaaagagggctacaataagctcaaccaatgcttgacaaccgcccagtcaaaagtgttccaatgtggcaagtatttgaaggtgttctacaaattcctcaattcaaatcgtcacaccatacgacataccggaaagaagtgcttcaagtgtaagaagtgtgtaaagagcttttgtattcggctgcataagactcagcataagtgcgtttatatcacagaaaaaagctgcaagtgcaaggaatgtgagaagacctttcactggtcttcaactctcaccaaccacaaggagatacacaccgaagacaagccctacaaatgcgaggagtgcggaaaagctttcaagcagctttccacactcaccacccataaaatcatctgcgccaaagaaaaaatatacaagtgcgaggagtgcggtaaagccttcctgtggtctagtaccttgacgaggcacaaacggatccatactggggaaaagccgtacaagtgcgaggaatgtgggaaagcatttagtcatagctcgactttggctaaacacaagcggattcacactggcgagaaaccctacaaatgcgaggagtgcggtaaagcttttagtaggtcgagtactctggccaagcataagaggatccatacaggagagaagccctataaatgtaaggagtgcggaaaggctttctcaaattccagtaccctcgccaatcacaaaataacccatactgaggagaagccatataaatgcaaggagtgcgacaaagcgttcaaaaggttgtcgactctgaccaagcacaaaatcattcatgccggagagaagctttataagtgcgaagaatgtggcaaggcttttaacaggtcttctaatctcaccatccacaaatttatacacactggagagaaaccttacaagtgtgaggaatgtggtaaggccttcaattggagctctagtttgacaaagcataagcgtttccacacacgtgagaagccctttaagtgtaaggaatgcggcaaggcgttcatttggagttccactttaacccgccataaaaggattcacacaggcgaaaaaccgtacaagtgtgaggaatgcggcaaggctttcaggcagagttcgactttaactaagcacaagatcattcataccggggaaaagccatacaagtttgaagagtgcggtaaggccttccgtcaatcactgaccctgaataagcacaaaatcatccattcacgagaaaaaccttataaatgtaaagaatgcgggaaggcctttaagcagttctctacactcacgacccacaaaatcattcatgctggaaagaagctgtacaagtgcgaagaatgtgggaaagccttcaaccattcatcaagccttagcacccacaagatcattcatactggggagaagagctacaagtgcgaggagtgcgggaaggcctttttatggtcctcaaccctccgtcgtcacaagagaatccataccggtgagaagccatacaagtgtgaggagtgcggcaaggcattttcccactcttctgctttggctaagcacaagcggatacacactggggagaaaccttacaaatgcaaggaatgcggtaaggctttcagcaattcctctaccttggctaaccacaaaatcactcacacagaagagaagccctataaatgtaaggagtgtgataagaccttcaaaagactgtctaccctaacgaagcataaaattattcacgcaggcgagaagctctataaatgtgaagagtgtggaaaagccttcaaccggtccagtaatctcaccatccataaatttatccatacaggggaaaaaccttacaagtgtgaggagtgtgggaaagctttcaattggtcatcctctcttacaaaacacaaacggatccacactcgtgaaaaacctttcaaatgcaaggagtgcggcaaagcttttatttggagctccacactgacacgccataagcgcattcataccggcgagaagccttacaagtgtgaagagtgtggcaaagctttttccaggagttccacgcttactaaacataagacaatccacaccggcgagaaaccttacaagtgcaaggagtgcgggaaagcattcaagcattcttcggcactggccaagcacaagatcatacacgctggcgagaaactgtacaaatgcgaggagtgcgggaaggctttcaatcaaagttctaacttaaccacacacaaaatcattcacaccaaggagaaaccctccaaatcggaggagtgcgacaaggcattcatctggtcaagcactctgactgagcacaaacgcatccacacaagagagaagacgtacaagtgcgaggagtgcggtaaagccttctctcagccctcccacttgactacccacaagcgaatgcacactggtgagaagccttataagtgcgaggagtgcggaaaagctttctcccagagtagcacactcactacccacaagatcatccacacgggcgagaagccatacaagtgcgaagagtgcggtaaggcatttaggaagagctctacactgactgaacataagattatccacaccggggagaaaccatacaagtgtgaagaatgtggcaaggcctttagtcaatcgtccaccttaacccgccacacacggatgcacacaggggagaagccatacaagtgtgaggagtgcgggaaagcctttaatcgcagttctaagctcacaacacataagattattcacacgggggaaaagccctataagtgcgaagaatgcgggaaggcttttatttccagctcaaccttgaacggccataagagaattcacactagggaaaagccgtacaagtgcgaggaatgcgggaaggccttctcacagagtagcacacttactcggcataagaggttacataccggagaaaaaccgtacaaatgcggggaatgtgggaaggcgttcaaggaaagcagtgccctgactaagcataaaatcattcatactggggaaaagccctataaatgcgaaaaatgtggcaaggcattcaaccagtcctcaattctgacgaatcacaagaaaatacacacaatcacccccgttattccactgctttgggaagcagaggccggtggaagcagaggacaagagatggagaccatcctggccaatacggtgaagcccctgctgtactag

SEQ ID NO: 138321 - DNA, 5393 bp, Artificial Sequence
  derived and/or modified sequence
ctcgctgccgccggagtttccaggtctcgacttcactgctctgtgtcctctgctccaggaggcccagcctgtgtggccctgtgacctgcaggtattggagagccacagctaagatgccaggaacccctggaagcctagaaatgggactgttgacatttagggatgtggccatagaattctctccggaggagtggcaatgtctggacactgcacagcagaatttatataggaatgtgatgttagagaactacagaaacctggccttcctgggtattgctctctctaagccagacctgattacttatctggagcaaggaaaagagccctggaatatgaagcaacatgagatggtggatgaacccacaggtatatgtcctcattttcctcaagacttttggccagagcagagcatggaagattcttttcaaaaagtattactgagaaaatatgaaaaatgtggacatgagaatttacagttaagaaaaggttgtaaaagtgtggatgagtgtaaggtgcacaaagaaggttataataaacttaaccagtgtctcacaactgcccagagcaaagtatttcaatgtgggaaatatttgaaagtcttctataaatttttaaattcaaacagacatacgataagacatactggaaagaaatgcttcaaatgtaaaaaatgtgtcaagtcattttgcatccgtttacacaaaacccaacataaatgcgtttatattacagagaagtcctgtaaatgtaaagaatgtgaaaaaacctttcattggtcctcaacccttactaatcataaggaaattcatactgaagataaaccctacaaatgtgaagaatgtggcaaagcttttaagcagctctcaacccttactacacataaaataatctgtgctaaagagaaaatctacaagtgtgaagaatgtggcaaagcatttctatggtcctcaaccctaactagacataagaggatacacactggagagaaaccctacaaatgtgaagaatgtggcaaagcttttagccattcttcaacccttgctaaacataagagaattcatactggagagaaaccctacaaatgtgaagaatgtggcaaagcttttagccgttcttcaacccttgctaaacataagagaattcatactggagagaaaccctacaaatgtaaagaatgtggcaaagcttttagcaattcctcaacccttgctaatcataagataactcatactgaagagaaaccctacaaatgtaaagaatgtgacaaagcttttaagcgactctcaacccttactaaacataaaataatacatgctggagagaaactctacaaatgtgaagaatgtggcaaagcttttaatcgatcttcaaatcttactatacataagtttattcatactggagagaaaccttacaagtgtgaagaatgtggcaaagcatttaactggtcctcaagccttactaaacataaaagatttcatactagagagaaacccttcaaatgtaaagaatgtggcaaagcatttatatggtcttcaaccctaactagacataagaggatacacactggagagaagccctacaaatgtgaagaatgtggcaaagcttttaggcaatcctcaacccttactaaacataagataattcatactggagagaaaccctacaaatttgaagaatgtggcaaagcttttagacaatccttaacccttaataaacataagataattcatagtagagagaaaccctacaaatgtaaagaatgtggcaaagcttttaagcaattctcaacccttactacacataaaataattcatgctggaaagaaactctacaaatgtgaagaatgtggcaaagcttttaatcattcctcaagtctttctacacataagataattcatactggagagaagtcttacaagtgtgaagaatgtggcaaagcatttctatggtcctcaaccctaagaagacataagaggatacacactggagagaaaccctacaaatgtgaagaatgtggcaaagcttttagccattcttcagcccttgctaaacataagagaattcatactggagagaaaccctacaaatgtaaagaatgtggcaaagcttttagcaattcctcaacccttgctaatcataagataactcatactgaagagaaaccctacaaatgtaaagaatgtgacaaaacttttaagcgactctcaacccttactaaacataaaataatacatgctggagagaaactctacaaatgtgaagaatgtggcaaagcttttaatcgatcttcaaatcttactatacataagtttattcatactggagagaaaccttacaagtgtgaagaatgtggcaaagcatttaactggtcctcaagccttactaaacataaaagaattcatactagagagaaacccttcaaatgtaaagaatgtggcaaagcatttatatggtcttcaaccctaactagacataagaggatacacactggagagaagccctacaaatgtgaagaatgtggcaaagcttttagccgttcctcaacccttactaagcataagacaattcatactggagagaaaccctacaaatgtaaagaatgtggcaaagcttttaagcactcctcagcccttgctaaacataaaataatacatgctggagagaaactctacaaatgtgaggaatgtggcaaagcttttaatcaatcttcaaatcttacgacacataagataattcatactaaagagaaaccttccaagagtgaagaatgtgacaaagcatttatctggtcctcaacccttactgaacataagagaattcataccagagagaaaacctacaaatgtgaagaatgtggcaaagcatttagccagccttcacaccttactacacataagaggatgcacactggagagaaaccctacaaatgtgaagaatgtggcaaagcttttagccaatcctcaacccttactacacataagataattcatactggagagaaaccctacaaatgtgaagaatgtggcaaagcttttaggaaatcttcaactcttactgaacataagataattcatactggagagaaaccctacaaatgtgaagaatgtggcaaagcatttagccaatcctcaaccctaactagacatacgaggatgcacactggagagaaaccatacaaatgtgaagaatgtggcaaagcttttaatcgatcctcaaagcttactacacataagataattcatactggagagaaaccttacaagtgtgaagaatgtggcaaagcatttatatcatcctcaaccctaaatggacataagagaattcatactagagagaaaccctacaaatgtgaagaatgtggcaaagcatttagccaatcttcaaccctaactagacataagaggttgcacaccggagagaaaccctacaaatgtggagaatgtggcaaagcctttaaagagtcctcagctcttactaaacataagataattcacactggagagaaaccctacaaatgtgaaaaatgtggcaaagcctttaaccagtcttcaatccttactaaccataagaaaattcatactatcacacctgtaatcccactactttgggaggccgaggcgggcggatcacgaggtcaggagatggagaccatcctggctaacacagtgaaaccccttctctactaaaaaatacaaaaaattagccgggcgtggtggcgggcgcctgtagtcccagctatgcgagaggctgaggcaggagaatggcgtgaacccgggaggcggagcttgcagtgagccgagatcacgccactgcactcaagcctgggcgacagagcgagactccgtctcaaaaaaaaaaaaaagaaaattcatactagagagaaaccctacaaatataaagaatgtggcaaatcttttaaccggtcttcaacctttactaaacataaggtaattcatactggagtaaaactctacaaatgtgaagaatgtggcaaatcctttttctggtcctcagccctaaccagacataagaaaattcatactggacagcaaccctacaaacaggaaaaatttggcaaagcctttaaccagttttcacaccttactacagataagataactcatattggagagaaatcttacaagtgtgaataatgtggtaaagtctataaaaagtcctgaattcttaacagacataatattattcatactggagagaaactctacaaacctgaaagatgtgccaacgcttttgacaagtcaaacttttctaaacatcaagaaaatcatgctgctgagaaatcctagaaatgtgaagaatgtgacaaagcctctaaatgattgtcacacttgatcgtaggtaagataattcatactggagaaaactaccagtgtgaacaatgtggccaagctttgaactaatgctcacaccttaatgcataggaaagcatttatgcttgagaaaaagtgaacaaatatagacaaaaagccattaatacctgctcacatcgtactcaaattcagagcgttcatactaaataagaagtgtaattactgtcaaacgactgatcagaaaatatgtctttaaagtacagaagagtattttgaaaaagcattacaaatatgaagaggcattatttatgaccttttctatggaaaggtaaggacattaaaaatgtaagatgcatgatgaaaatttaagtagagaggatctttatggttaacttataatatcgagtgatgcatgaggtagatgttcagattaatattctgcattattatgaaagaaaaacattcttaattttagttaaagtttagtatgatttattgtatttttatgaaatatatgtagcatatttttaaattataaattgcatgtgaacttttcaaccaaacagttttaacatgttaaatactatcatgaattcaatgaagtgttattatgccagtaactttaacctattccaccttactcaagggtgtaggtaaaagatggtaaaaatacactatttggtaagataatggactgacatctctagtgattttttttgccagtgagttttaattgccattaagttaaagaatattgttcccataggctaaatttttatttttattttctcatttaaatgtatttgacttaatttttgtggatacctaatatgtgtacatattatgccatatgtggcatattttgatacggacacacaatatataacaatcgcattagactaaatgcggtctccattacctctagcatttattctttgtattacaaataattcaattctacagttttagttatttttaaatgtacaattaaattgttgttgactacaggattatttttatggtcataataaaacttatatacaaacataagtaaaatcc

SEQ ID NO: 138322 - protein, 589 aa, Artificial Sequence
  derived and/or modified sequence
MEAEETMECLQEFPEHHKMILDRLNEQREQDRFTDITLIVDGHHFKAHKAVLAACSKFFYKFFQEFTQEPLVEIEGVSKMAFRHLIEFTYTAKLMIQGEEEANDVWKAAEFLQMLEAIKALEVRNKENSAPLEENTTGKNEAKKRKIAETSNVITESLPSAESEPVEIEVEIAEGTIEVEDEGIETLEEVASAKQSVKYIQSTGSSDDSALALLADITSKYRQGDRKGQIKEDGCPSDPTSKQEHMKSHSTESFKCEICNKRYLRESAWKQHLNCYHLEEGGVSKKQRTGKKIHVCQYCEKQFDHFGHFKEHLRKHTGEKPFECPNCHERFARNSTLKCHLTACQTGVGAKKGRKKLYECQVCNSVFNSWDQFKDHLVIHTGDKPNHCTLCDLWFMQGNELRRHLSDAHNISERLVTEEVLSVETRVQTEPVTSMTIIEQVGKVHVLPLLQVQVDSAQVTVEQVHPDLLQDSQVHDSHMSELPEQVQVSYLEVGRIQTEEGTEVHVEELHVERVNQMPVEVQTELLEADLDHVTPEIMNQEERESSQADAAEAAREDHEDAEDLETKPTVDSEAEKAENEDRTALPVLE

SEQ ID NO: 138323 - protein, 151 aa, Artificial Sequence
  derived and/or modified sequence
MEAEETMECLQEFPEHHKMILDRLNEQREQDRFTDITLIVDGHHFKAHKAVLAACSKFFYKFFQEFTQEPLVEIEGVSKMAFRHLIEFTYTAKLMIQGEEEANDVWKAAEFLQMLEAIKALEVRNKENSAPLEENTTGKNEAKKRKIAETS

SEQ ID NO: 138324 - protein, 139 aa, Artificial Sequence
  derived and/or modified sequence
MEAEETMECLQEFPEHHKMILDRLNEQREQDRFTDITLIVDGHHFKAHKAVLAACSKFFYKFFQEFTQEPLVEIEGVSKMAFRHLIEFTYTAKLMIQGEEEANDVWKAAEFLQMLEAIKALEVRNKENSAPLEENTTGK

SEQ ID NO: 138325 - protein, 265 aa, Artificial Sequence
  derived and/or modified sequence
MEAEETMECLQEFPEHHKMILDRLNEQREQDRFTDITLIVDGHHFKAHKAVLAACSKFFYKFFQEFTQEPLVEIEGVSKMAFRHLIEFTYTAKLMIQGEEEANDVWKAAEFLQMLEAIKALEVRNKENSAPLEENTTGKNEAKKRKIAETSNVITESLPSAESEPVEIEVEIAEGTIEVEDEGIETLEEVASAKQSVKYIQSTGSSDDSALALLADITSKYRQGDRKGQIKEDGCPSDPTSKQEHMKSHSTESFKCEICNKRYLR

SEQ ID NO: 138326 - DNA, 1770 bp, Artificial Sequence
  derived and/or modified sequence
atggaggccgaggagaccatggagtgcctgcaggagttccccgagcaccacaagatgatcctggacagactgaacgagcagagagagcaggacagattcaccgacatcaccctgatcgtggacggccaccacttcaaggcccacaaggccgtgctggccgcctgcagcaagttcttctacaagttcttccaggagttcacccaggagcccctggtggagatcgagggcgtgagcaagatggccttcagacacctgatcgagttcacctacaccgccaagctgatgatccagggcgaggaggaggccaacgacgtgtggaaggccgccgagttcctgcagatgctggaggccatcaaggccctggaggtgagaaacaaggagaacagcgcccccctggaggagaacaccaccggcaagaacgaggccaagaagagaaagatcgccgagaccagcaacgtgatcaccgagagcctgcccagcgccgagagcgagcccgtggagatcgaggtggagatcgccgagggcaccatcgaggtggaggacgagggcatcgagaccctggaggaggtggccagcgccaagcagagcgtgaagtacatccagagcaccggcagcagcgacgacagcgccctggccctgctggccgacatcaccagcaagtacagacagggcgacagaaagggccagatcaaggaggacggctgccccagcgaccccaccagcaagcaggagcacatgaagagccacagcaccgagagcttcaagtgcgagatctgcaacaagagatacctgagagagagcgcctggaagcagcacctgaactgctaccacctggaggagggcggcgtgagcaagaagcagagaaccggcaagaagatccacgtgtgccagtactgcgagaagcagttcgaccacttcggccacttcaaggagcacctgagaaagcacaccggcgagaagcccttcgagtgccccaactgccacgagagattcgccagaaacagcaccctgaagtgccacctgaccgcctgccagaccggcgtgggcgccaagaagggcagaaagaagctgtacgagtgccaggtgtgcaacagcgtgttcaacagctgggaccagttcaaggaccacctggtgatccacaccggcgacaagcccaaccactgcaccctgtgcgacctgtggttcatgcagggcaacgagctgagaagacacctgagcgacgcccacaacatcagcgagagactggtgaccgaggaggtgctgagcgtggagaccagagtgcagaccgagcccgtgaccagcatgaccatcatcgagcaggtgggcaaggtgcacgtgctgcccctgctgcaggtgcaggtggacagcgcccaggtgaccgtggagcaggtgcaccccgacctgctgcaggacagccaggtgcacgacagccacatgagcgagctgcccgagcaggtgcaggtgagctacctggaggtgggcagaatccagaccgaggagggcaccgaggtgcacgtggaggagctgcacgtggagagagtgaaccagatgcccgtggaggtgcagaccgagctgctggaggccgacctggaccacgtgacccccgagatcatgaaccaggaggagagagagagcagccaggccgacgccgccgaggccgccagagaggaccacgaggacgccgaggacctggagaccaagcccaccgtggacagcgaggccgagaaggccgagaacgaggacagaaccgccctgcccgtgctggagtag

SEQ ID NO: 138327 - DNA, 456 bp, Artificial Sequence
  derived and/or modified sequence
atggaggccgaggagaccatggagtgcctgcaggagttccccgagcaccacaagatgatcctggacagactgaacgagcagagagagcaggacagattcaccgacatcaccctgatcgtggacggccaccacttcaaggcccacaaggccgtgctggccgcctgcagcaagttcttctacaagttcttccaggagttcacccaggagcccctggtggagatcgagggcgtgagcaagatggccttcagacacctgatcgagttcacctacaccgccaagctgatgatccagggcgaggaggaggccaacgacgtgtggaaggccgccgagttcctgcagatgctggaggccatcaaggccctggaggtgagaaacaaggagaacagcgcccccctggaggagaacaccaccggcaagaacgaggccaagaagagaaagatcgccgagaccagctag

SEQ ID NO: 138328 - DNA, 420 bp, Artificial Sequence
  derived and/or modified sequence
atggaggccgaggagaccatggagtgcctgcaggagttccccgagcaccacaagatgatcctggacagactgaacgagcagagagagcaggacagattcaccgacatcaccctgatcgtggacggccaccacttcaaggcccacaaggccgtgctggccgcctgcagcaagttcttctacaagttcttccaggagttcacccaggagcccctggtggagatcgagggcgtgagcaagatggccttcagacacctgatcgagttcacctacaccgccaagctgatgatccagggcgaggaggaggccaacgacgtgtggaaggccgccgagttcctgcagatgctggaggccatcaaggccctggaggtgagaaacaaggagaacagcgcccccctggaggagaacaccaccggcaagtag

SEQ ID NO: 138329 - DNA, 798 bp, Artificial Sequence
  derived and/or modified sequence
atggaggccgaggagaccatggagtgcctgcaggagttccccgagcaccacaagatgatcctggacagactgaacgagcagagagagcaggacagattcaccgacatcaccctgatcgtggacggccaccacttcaaggcccacaaggccgtgctggccgcctgcagcaagttcttctacaagttcttccaggagttcacccaggagcccctggtggagatcgagggcgtgagcaagatggccttcagacacctgatcgagttcacctacaccgccaagctgatgatccagggcgaggaggaggccaacgacgtgtggaaggccgccgagttcctgcagatgctggaggccatcaaggccctggaggtgagaaacaaggagaacagcgcccccctggaggagaacaccaccggcaagaacgaggccaagaagagaaagatcgccgagaccagcaacgtgatcaccgagagcctgcccagcgccgagagcgagcccgtggagatcgaggtggagatcgccgagggcaccatcgaggtggaggacgagggcatcgagaccctggaggaggtggccagcgccaagcagagcgtgaagtacatccagagcaccggcagcagcgacgacagcgccctggccctgctggccgacatcaccagcaagtacagacagggcgacagaaagggccagatcaaggaggacggctgccccagcgaccccaccagcaagcaggagcacatgaagagccacagcaccgagagcttcaagtgcgagatctgcaacaagagatacctgagatag

SEQ ID NO: 138330 - DNA, 1770 bp, Artificial Sequence
  derived and/or modified sequence
atggaggcagaggagacaatggagtgcctgcaagagttcccggagcaccacaaaatgatattagaccggctcaacgaacagcgggagcaggaccggttcactgatattaccttgatcgtggacggacatcacttcaaggcccacaaagccgtcctagcagcatgcagcaaatttttctacaagttcttccaggagtttacccaagagcctctcgtggaaatagagggcgtcagtaaaatggcctttaggcacctgatagagtttacatacactgctaagctgatgattcaaggtgaggaagaagcaaatgacgtatggaaggcggccgagttcctgcagatgctggaggctatcaaagctcttgaagtgagaaataaggagaactcggctccactggaagaaaacacaacaggaaaaaacgaggccaaaaagagaaagatcgccgaaacctccaatgtgatcactgagtctctgcctagcgctgagtcagagcctgtggaaattgaagtggagattgcagagggcacaatcgaggtcgaagatgaggggattgaaaccctggaagaagtggcaagtgccaagcagagcgtaaagtacatccagagtaccggctcctctgacgacagtgccctcgccttgctagccgatatcactagtaaatataggcagggtgatcggaaaggtcagattaaggaggacggatgcccgagtgaccccacgagcaaacaagaacatatgaagagtcactctaccgaaagtttcaagtgcgaaatctgtaacaagcggtatttaagggaatcggcttggaagcagcacctgaattgttaccacctcgaggaagggggagtgagtaagaaacagaggaccggtaagaagattcacgtctgtcaatattgcgaaaaacagttcgaccacttcggtcatttcaaagaacatctgcggaaacacacaggagagaagccatttgagtgccctaattgccatgaacgcttcgcgaggaacagtaccctcaagtgtcacctgacggcatgtcaaaccggtgtgggagccaagaagggccggaagaagctatatgaatgtcaggtctgcaattctgtgtttaacagttgggatcagtttaaggatcacttagttatccataccggagacaagcccaatcactgcactttgtgtgacctgtggttcatgcaagggaatgagctgcggcgacatctctcagacgctcacaacatatcggagaggctcgtgaccgaagaggtactgtcggtggaaacccgagtacagactgagcccgtcactagcatgacaattattgagcaagtaggcaaggttcacgttctccccctgctccaggtgcaagtggatagcgcccaggtaaccgtggaacaggtccatcctgacctccttcaggatagtcaggtccatgacagtcacatgagcgagctgcccgagcaggtacaggtctcttatctggaagtcggacggatccagactgaggagggcaccgaagtgcatgtcgaagaattgcacgttgagagggtcaaccagatgcctgtggaagtgcaaacagagctgctggaggccgatctagatcacgtaaccccagaaattatgaaccaggaggagcgggaatcttcccaggccgatgcagccgaagccgctcgcgaagaccacgaggatgccgaagacctcgagacgaagcctaccgttgattccgaggcggaaaaggcggaaaacgaagaccggaccgccctgcctgtgctagaatag

SEQ ID NO: 138331 - DNA, 1770 bp, Artificial Sequence
  derived and/or modified sequence
atggaggccgaagaaactatggaatgtttgcaggagtttcccgagcatcataaaatgattctggaccgactcaatgagcagagggagcaagaccgattcacagatattacactcatcgtggatggacaccattttaaagcccataaggcagtgctggccgcatgcagtaaatttttctacaagttcttccaagagtttacccaggagccgctggtggaaatcgaaggagtgtcgaagatggcctttcgacacctaatagaattcacttatacggctaagctgatgattcaaggggaggaggaagctaacgatgtgtggaaggcggcagagtttttgcaaatgcttgaagccatcaaagccctcgaggtgcgcaacaaggaaaattctgcccccctggaagaaaacactaccggcaagaacgaggcgaaaaagagaaagattgccgagaccagcaatgtcataacagagagtctcccatctgcagagagtgagcccgtcgaaattgaggttgagatcgccgaaggcacaatcgaggtcgaagatgaaggcatcgagacactggaggaggtcgccagcgctaagcagagcgtcaagtacattcagagcactggtagtagcgatgactctgcgctggcattattggccgacattactagcaaataccgacaaggggatcgcaaaggtcaaattaaagaggacgggtgcccatccgacccaactagcaagcaggaacatatgaaatctcactcaaccgaatccttcaaatgtgagatttgcaacaagcgttatctgagggaaagcgcatggaaacaacaccttaattgttaccatctggaggagggtggcgtgagcaagaagcagcgaactggaaagaagatacacgtctgtcagtattgtgagaagcagtttgaccacttcgggcacttcaaggagcatctgagaaaacacaccggtgagaagcccttcgagtgcccaaactgccacgagcgatttgcgaggaacagcacactgaagtgtcaccttactgcttgccaaactggagttggggctaagaaagggcgtaagaaattatatgagtgtcaggtgtgtaattctgtgttcaattcttgggatcagttcaaggatcaccttgtaatccatactggtgataagccaaatcactgtactctgtgtgatctgtggtttatgcagggcaacgagttacgaagacacctgtcagatgcccacaacatatctgaaagactcgtgactgaggaggttctcagtgtcgaaaccagggtccagaccgagcctgttacatccatgacaatcattgagcaggtgggaaaggtgcacgtcctgccccttcttcaagtgcaggtcgacagcgcgcaggtgaccgtggagcaggtgcatcccgacttgttgcaggattcgcaggttcatgatagccatatgtccgaattgccggagcaggtgcaggtctcatatcttgaggtcggacggatccagacggaggaggggactgaagtgcacgtcgaagaacttcatgtggaacgggtgaatcagatgcccgttgaggtgcagaccgagctgctcgaggctgacctcgatcatgtaacacccgagattatgaatcaggaagagagggaatcctctcaggcggacgctgcagaggcagctagggaagaccacgaggacgctgaggatttagagactaaaccaacagtggattcagaggccgaaaaagctgaaaatgaagacagaacggctctgcccgtgctagaatag

SEQ ID NO: 138332 - DNA, 456 bp, Artificial Sequence
  derived and/or modified sequence
atggaggccgaggagactatggagtgtctacaggaattccctgaacatcataagatgatcttagatcgccttaatgaacagcgagagcaggaccgttttaccgacatcacactgattgtcgacgggcaccacttcaaggcccataaggcagtgcttgccgcttgttctaaattcttctacaaattcttccaagaattcacccaagagccgttagtcgagatcgagggcgttagcaaaatggcatttaggcaccttatcgagtttacgtacaccgctaagttgatgatccagggcgaagaagaggcgaatgacgtctggaaagctgcagagttcctccagatgcttgaagccattaaagcgctggaagtcaggaataaagaaaattctgcacctctagaggaaaacaccactggcaaaaacgaagccaagaagcgaaagattgccgaaacaagctag

SEQ ID NO: 138333 - DNA, 420 bp, Artificial Sequence
  derived and/or modified sequence
atggaagctgaggaaacaatggagtgcctgcaagagtttccagagcaccacaaaatgattttggatcggctgaatgagcagagagaacaggacagattcaccgatatcactcttatagttgatggccatcactttaaggctcataaagcagtcctggcagcttgctctaagtttttctacaagttcttccaggaatttacacaggagcccctcgtcgagatagagggggtttccaaaatggcatttcggcacctaattgagtttacatacaccgcaaagctgatgatccagggggaagaagaagcaaatgatgtatggaaggcagcggagtttttacagatgctcgaggcaattaaggccctggaggtgaggaataaagagaattctgcaccactggaggaaaatacaacgggcaaatag

SEQ ID NO: 138334 - DNA, 1770 bp, Artificial Sequence
  derived and/or modified sequence
atggaggcagaggaaacaatggagtgtctgcaagagtttcctgagcatcataaaatgatcctcgaccgcctcaatgagcagcgtgagcaagatcgtttcaccgacatcactctcattgtcgacggacatcacttcaaggcccataaagccgtgctagccgcatgttcaaaattcttttataaattctttcaagagtttactcaagaacccttggtggagattgagggagtctccaagatggcattccgccacctaatcgaatttacttacaccgctaagctcatgattcaaggcgaagaagaggcaaacgatgtgtggaaagccgcagagttcttacaaatgctcgaagccatcaaagcactggaagtaagaaataaggaaaactccgctcccctagaggaaaacacaacagggaaaaatgaggccaaaaagcgaaagatcgcagagacaagcaatgtaatcaccgagagcctcccatccgccgaatcagagcccgttgaaattgaggtcgagattgctgagggaacaatcgaggtggaagacgagggaattgaaacactggaagaagtggcctctgcgaaacagtcagtgaaatatatccagagtactggatccagtgatgacagtgccctggccctgcttgctgatattacgtccaagtaccgccaaggggatagaaaaggtcagattaaagaagacgggtgtccgagcgatcctacttccaagcaggaacacatgaagagccattcgaccgaatctttcaagtgtgagatttgtaataagcggtatttgagggagtcagcctggaaacagcaccttaattgctaccacttggaagagggaggagtgagcaagaaacagaggaccgggaagaaaattcatgtctgtcagtactgcgagaaacaattcgaccattttggacacttcaaagagcatcttaggaagcataccggtgagaaaccattcgagtgtccgaattgccacgaaagattcgccaggaattccaccctgaaatgtcatctgacagcttgtcaaacaggagtcggtgctaagaaaggacggaagaaactgtatgaatgtcaggtgtgtaactcggtgttcaattcatgggaccagtttaaagatcaccttgtaattcataccggcgacaaaccaaaccactgtacactctgcgatctttggtttatgcagggtaatgagctgcgacgccatctatctgacgcccacaacatatccgagagactggtaaccgaggaggtgctatcagtggaaactcgcgtgcagacagagccagttacaagcatgaccataatagagcaggtaggcaaggtgcacgtcctgcctttgttacaggtccaggtcgactccgcccaggtgaccgtagagcaggtgcacccagacctcctccaggactcacaggttcacgactcacacatgtcggagttgccagaacaggtccaagtgagctacctggaggtcggacggatccagaccgaggaagggacagaagtgcacgtggaagaacttcacgttgaacgcgttaaccagatgccggtggaggtacagacagagctgttggaagccgatctggaccatgtaacgccagagatcatgaatcaggaagagcgagaatcttcacaggccgatgccgccgaggcagcccgggaggatcacgaggatgctgaggacctcgagactaagcccaccgtcgactccgaggctgaaaaggccgagaacgaagaccggaccgctctgccagtcttagaatag

SEQ ID NO: 138335 - DNA, 798 bp, Artificial Sequence
  derived and/or modified sequence
atggaagcagaggagaccatggaatgtctgcaagagttccccgagcaccacaaaatgatcctagatcggctaaacgagcaacgggagcaggaccgttttaccgacattactctcattgttgatgggcaccacttcaaggctcacaaagccgttctggccgcttgttccaagttcttctataagttctttcaggaatttactcaggaacctctggtcgagatagagggtgtgtcgaaaatggctttccgtcacctcatcgaattcacctacaccgccaaactcatgatccagggcgaggaagaagccaacgatgtgtggaaggcagcagagtttttgcagatgttggaagccatcaaggccctcgaggtgcggaacaaggaaaattctgccccgttagaggaaaatactactggcaaaaatgaggccaaaaagcgtaagatcgccgaaacctccaacgttatcaccgaatctttgccgtcagctgagtcagagcccgtcgagatcgaagtggaaatagcagagggcactattgaggttgaagatgaggggattgagactttagaggaggtggcctccgccaagcaatctgtcaagtacatccagagcacaggcagctcagacgattctgctttagccctccttgctgacataacctctaagtataggcaaggcgatcgcaaggggcaaatcaaggaggacgggtgtccaagcgaccctacatccaaacaggagcatatgaaatcacattcgactgagtcttttaagtgcgaaatttgcaataagcgctatttaaggtag

SEQ ID NO: 138336 - DNA, 1770 bp, Artificial Sequence
  derived and/or modified sequence
atggaggccgaggagaccatggagtgcctgcaggagttccctgagcaccacaagatgatcctggaccggctgaatgagcagcgggagcaggaccgcttcacagacatcaccctgattgtggatggccaccacttcaaggcccacaaggctgtgctggccgcctgcagcaagttcttctacaagttcttccaggagttcacccaggagcccctggtggagattgagggcgtgtccaagatggccttccgccacctgattgagttcacctacacagccaagctgatgatccagggcgaggaggaggccaatgatgtgtggaaggctgctgagttcctgcagatgctggaggccatcaaggccctggaggtgaggaacaaggaaaattctgcccccctggaggagaacaccaccgggaagaatgaggccaagaagaggaagattgctgagaccagcaatgtcatcacagagagcctgcccagcgctgagagcgagcctgtggagattgaggtggagattgctgagggcaccatcgaggtggaggatgagggcatcgagaccctggaggaggtggccagcgccaagcagagcgtgaagtacatccagagcacaggcagcagtgatgattctgccctggccctgctggccgacatcaccagcaagtaccggcagggcgacaggaagggccagatcaaggaggatggctgccccagcgaccccaccagcaagcaggagcacatgaagagccacagcacagagagcttcaagtgtgagatctgcaacaagcgctacctgcgggagagcgcctggaagcagcacctgaactgctaccacctggaggagggcggcgtgtccaagaagcagaggacaggcaagaagatccacgtgtgccagtactgtgagaagcagtttgaccacttcggccacttcaaggagcacctgaggaagcacactggagagaagccctttgaatgtcccaactgccacgagagatttgccaggaacagcaccctgaagtgccacctgacagcctgccagacaggagtgggcgccaagaagggcaggaagaagctgtatgagtgccaggtgtgcaacagcgtcttcaacagctgggaccagttcaaggaccacctggtgatccacactggagacaagcccaaccactgcaccctgtgtgacctgtggttcatgcagggcaatgagctgcggcggcacctgagtgatgcccacaacatcagcgagcggctggtgacagaggaggtgctgtctgtggagaccagggtgcagacagagcctgtgacctccatgaccatcatcgagcaggtgggcaaggtgcacgtgctgcccctgctgcaggtgcaggtggacagcgcccaggtgacagtggagcaggtgcacccagacctgctgcaggacagccaggtgcatgacagccacatgtctgagctgcctgagcaggtgcaggtgtcctacctggaggtgggccgcatccagacagaggagggcacagaggtgcacgtggaggagctgcacgtggagcgggtgaaccagatgcctgtggaggtgcagacagagctgctggaggccgacctggaccacgtgaccccagagatcatgaaccaggaggagcgggagagcagccaggctgatgctgctgaggccgcccgggaggaccatgaagatgctgaggacctggagaccaagcccaccgtggacagcgaggccgagaaggccgagaatgaagatagaacagccctgcctgtgctggagtag

SEQ ID NO: 138337 - DNA, 456 bp, Artificial Sequence
  derived and/or modified sequence
atggaggccgaggagaccatggagtgcctgcaggagttccctgagcaccacaagatgatcctggaccggctgaatgagcagcgggagcaggaccgcttcacagacatcaccctgattgtggatggccaccacttcaaggcccacaaggctgtgctggccgcctgcagcaagttcttctacaagttcttccaggagttcacccaggagcccctggtggagattgagggcgtgtccaagatggccttccgccacctgattgagttcacctacacagccaagctgatgatccagggcgaggaggaggccaatgatgtgtggaaggctgctgagttcctgcagatgctggaggccatcaaggccctggaggtgaggaacaaggaaaattctgcccccctggaggagaacaccaccgggaagaatgaggccaagaagaggaagattgctgagaccagctag

SEQ ID NO: 138338 - DNA, 420 bp, Artificial Sequence
  derived and/or modified sequence
atggaggccgaggagaccatggagtgcctgcaggagttccctgagcaccacaagatgatcctggaccggctgaatgagcagcgggagcaggaccgcttcacagacatcaccctgattgtggatggccaccacttcaaggcccacaaggctgtgctggccgcctgcagcaagttcttctacaagttcttccaggagttcacccaggagcccctggtggagattgagggcgtgtccaagatggccttccgccacctgattgagttcacctacacagccaagctgatgatccagggcgaggaggaggccaatgatgtgtggaaggctgctgagttcctgcagatgctggaggccatcaaggccctggaggtgaggaacaaggaaaattctgcccccctggaggagaacaccaccgggaagtag

SEQ ID NO: 138339 - DNA, 798 bp, Artificial Sequence
  derived and/or modified sequence
atggaggccgaggagaccatggagtgcctgcaggagttccctgagcaccacaagatgatcctggaccggctgaatgagcagcgggagcaggaccgcttcacagacatcaccctgattgtggatggccaccacttcaaggcccacaaggctgtgctggccgcctgcagcaagttcttctacaagttcttccaggagttcacccaggagcccctggtggagattgagggcgtgtccaagatggccttccgccacctgattgagttcacctacacagccaagctgatgatccagggcgaggaggaggccaatgatgtgtggaaggctgctgagttcctgcagatgctggaggccatcaaggccctggaggtgaggaacaaggaaaattctgcccccctggaggagaacaccaccgggaagaatgaggccaagaagaggaagattgctgagaccagcaatgtcatcacagagagcctgcccagcgctgagagcgagcctgtggagattgaggtggagattgctgagggcaccatcgaggtggaggatgagggcatcgagaccctggaggaggtggccagcgccaagcagagcgtgaagtacatccagagcacaggcagcagtgatgattctgccctggccctgctggccgacatcaccagcaagtaccggcagggcgacaggaagggccagatcaaggaggatggctgccccagcgaccccaccagcaagcaggagcacatgaagagccacagcacagagagcttcaagtgtgagatctgcaacaagcgctacctgaggtag

SEQ ID NO: 138340 - DNA, 1770 bp, Artificial Sequence
  derived and/or modified sequence
atggaggccgaggagaccatggagtgcctgcaggagttccccgagcaccacaaaatgatattagacaggctgaacgaacaaagagaacaggatcgctttacagacattacccttattgtggacggccatcactttaaggcccataaggcggtcctggccgcttgtagcaaattcttttataagttctttcaggaattcacacaagaaccactggtcgaaatagagggagttagcaagatggccttcaggcatttaatcgagttcacatacactgcaaagctaatgatacagggcgaggaggaagcaaatgacgtgtggaaggcagccgagtttctccagatgctagaagctattaaagctttggaggtccgaaacaaggagaattccgcgccactggaagaaaacaccaccggaaaaaacgaagcaaagaagcgtaaaatcgctgagacaagcaacgtcattaccgagtccctgccatccgcggaatctgagccagtggaaatagaggtggaaattgctgaaggaacaattgaggtagaggacgagggaattgagaccttggaggaagtcgcttcggccaaacagagcgtgaagtacatccagtctaccggtagcagtgatgattccgcgctggcccttctcgcagacattaccagcaaatataggcagggcgatagaaaggggcagataaaggaagacggttgcccttcagacccaacctctaaacaggagcatatgaaaagccactcgaccgagtctttcaagtgtgagatctgcaataagaggtatcttagggagtctgcttggaaacaacacctaaattgttatcatttggaggagggaggggtcagtaagaaacagagaacaggcaagaagatccatgtttgtcagtactgtgagaagcagtttgatcactttgggcacttcaaggaacacctgcgtaagcataccggcgaaaaacccttcgaatgcccaaactgccatgaaagattcgctcggaactcaacattgaaatgccatctgacggcatgtcaaacaggggtcggggctaagaaggggcggaagaaactatacgaatgtcaggtctgcaattcagtattcaattcttgggatcagtttaaggaccacctggtcatacacactggtgacaaacctaatcactgcacactgtgcgatctgtggtttatgcagggcaatgagctcaggcgtcatctctccgacgctcataacatcagtgagcgtctggtgaccgaggaagtgctgtccgtcgaaacacgggtccagactgaaccagttaccagtatgaccattattgagcaggtcgggaaggtacatgttctgccgctattacaggtgcaagtggatagcgcccaagtgacggtggagcaggtccaccctgatctgcttcaggatagccaggtacacgattcgcatatgtctgaactgcccgaacaggtgcaggtatcgtacctcgaggtcgggcgtatccagaccgaagagggaactgaggtgcatgtggaagaactacacgtagagagggtaaatcagatgcccgtagaggtacagactgagctgctagaggcagatctggatcacgttacgcctgagatcatgaaccaggaagagcgcgagtcatcccaagctgacgccgccgaggctgcacgcgaggaccatgaagacgcagaggatctggagactaagcccacggttgactccgaggccgaaaaggcagagaacgaggaccggaccgcattgcccgtgctggagtag

SEQ ID NO: 138341 - DNA, 1770 bp, Artificial Sequence
  derived and/or modified sequence
atggaggccgaggagaccatggagtgcctgcaggagttccccgagcatcataaaatgatcctggaccgtctgaacgaacagagagagcaggatcgttttacagacatcaccctgatcgtggatggacaccacttcaaggcacataaagcggtgctggctgcgtgctctaagtttttttacaaatttttccaggagttcactcaagagcccctggtcgagatcgaaggtgtgtctaaaatggctttccggcacctcattgaatttacttacactgccaagttaatgattcaaggcgaagaggaggcgaacgatgtgtggaaagcagcagagttcttgcaaatgctcgaggcaattaaagctctggaggtcagaaataaagagaactctgcccccctcgaggaaaatacaaccgggaagaatgaggccaagaagcggaaaattgctgagacctccaacgtgatcacagaaagtttgccgagcgcggagtcggagcccgtggaaatcgaagtggaaatcgctgaggggactattgaggttgaggatgagggaatcgagaccctcgaagaggtggccagcgccaagcagtccgtcaaatatattcagagtactggctcctctgatgattctgctctagccttactcgccgacatcacctccaaatatagacagggagacagaaaagggcagatcaaggaggatgggtgccctagcgatcctaccagcaaacaggagcacatgaaatcacacagcaccgaatccttcaagtgcgagatttgcaataagcgctacttacgcgagtctgcatggaaacagcacttaaactgttatcacctggaggaagggggcgtctcaaaaaagcagagaactgggaagaaaatacacgtctgtcagtactgtgaaaagcagttcgaccacttcggccattttaaggagcatctgcgaaaacatacaggagaaaaaccattcgaatgccctaactgccacgaaaggtttgcacgcaattccacactaaagtgccacctgacggcctgtcagacaggcgtgggcgcaaagaaaggcaggaaaaaactgtacgaatgccaggtctgtaacagtgtgtttaactcttgggatcagttcaaagaccaccttgttatccataccggggataaaccaaaccattgcaccttatgcgacctctggtttatgcagggaaacgaactgcgcagacatctgtctgacgctcacaatatttctgagcgactggtgaccgaggaggtgctctcggtggaaacaagggtgcagaccgaacctgtgacctccatgactatcatcgagcaggtgggcaaggtgcacgtgctcccactcctgcaggtgcaagttgactcagcccaggtcaccgtggaacaggtacaccccgacttgctccaagattcgcaagtccatgatagccacatgagtgagctgcccgaacaggtacaggtgagttatcttgaggtcgggcgcatccagacagaagaaggaaccgaggtacacgtggaggagctgcacgttgaaagggtgaaccagatgcccgtggaggtgcagaccgaactgcttgaagcggatctggaccatgttaccccagaaatcatgaaccaggaagagagagagtcatctcaggccgacgccgctgaagctgctcgcgaggaccacgaagatgccgaagatttagagactaaaccaacggtggactccgaagctgaaaaagctgagaacgaggatcgcactgctttaccagtcttggaatag

SEQ ID NO: 138342 - DNA, 456 bp, Artificial Sequence
  derived and/or modified sequence
atggaggccgaggagaccatggagtgcctgcaggagttccccgagcaccataaaatgatcctggatcgcctgaatgaacagcgagagcaggaccggtttaccgacatcacacttattgtggatggtcatcactttaaagcacacaaagccgtcctggctgcctgttctaagttcttctacaaattcttccaagaatttactcaggagccacttgtggaaatcgaaggtgtttctaagatggcttttcgacatctaatcgagttcacttatacggccaagctgatgatacagggcgaggaagaagctaacgacgtgtggaaggcggctgagttccttcagatgctggaggccatcaaggctcttgaggtgcggaacaaggagaacagcgcgcctttagaggaaaatactacggggaaaaacgaggcaaagaaaaggaaaatcgcagaaacttcttag

SEQ ID NO: 138343 - DNA, 420 bp, Artificial Sequence
  derived and/or modified sequence
atggaggccgaggagaccatggagtgcctgcaggagttccccgagcaccacaaaatgattctggacagactgaacgagcagcgggaacaggaccggtttacagacatcactttgatcgtggacggtcaccatttcaaagcacataaggcagtgttagccgcgtgcagtaaatttttctacaaattctttcaggaattcacacaggagcctcttgtggagatcgaaggcgtaagcaagatggcattcagacacctgatcgaattcacctataccgctaagctcatgatacagggcgaggaggaagccaacgacgtgtggaaagccgccgaatttttgcaaatgcttgaggctatcaaggccctggaagtgcgaaacaaggagaattccgcccctctggaggagaatactacaggaaagtag

SEQ ID NO: 138344 - DNA, 1770 bp, Artificial Sequence
  derived and/or modified sequence
atggaggccgaggagaccatggagtgcctgcaggagttccccgagcaccacaaaatgatactcgatcgtttaaatgaacaacgagaacaggaccggtttaccgatattacacttattgtggatggccatcatttcaaggcccataaggccgtacttgctgcctgctctaagttcttttacaaattctttcaggaattcactcaagagccactagtggaaatcgaaggagtttccaagatggcctttaggcacctgattgaatttacttatactgcaaagttgatgatacagggagaggaagaggcgaacgatgtgtggaaagccgccgagtttctccagatgcttgaagccattaaggccctggaagtaaggaataaggaaaattccgcgccccttgaggagaataccaccgggaagaatgaggctaagaaaagaaagatcgctgaaacctcaaatgtgatcaccgaatctcttccgtcagccgagagtgagccggtcgaaattgaggtcgagatcgccgaaggaaccatcgaggtggaggatgaaggtattgaaaccctggaagaagtagccagcgccaaacaatctgtaaagtatattcagagcaccggtagcagcgatgactcagctctggcgttgctggcggacataacatccaaataccgccagggggatcgaaaaggccagatcaaggaagacggatgtccctccgaccccacaagtaagcaggagcacatgaaatcccattccacagaatcctttaagtgcgagatttgcaacaaacggtacctgagagagtccgcttggaaacagcatctaaattgctatcacctagaggagggcggtgtatctaagaagcagcgaactgggaagaaaattcacgtgtgtcaatactgcgaaaagcagttcgaccatttcggccactttaaagagcacctgaggaaacatacaggggaaaaaccatttgagtgtcctaattgccacgagcgattcgccaggaactctaccctgaagtgtcatctgaccgcctgccaaaccggggtgggtgccaagaagggccggaaaaaactttacgaatgccaggtgtgcaacagcgtgtttaattcttgggaccagttcaaggaccacctagtgattcacaccggggataagcccaaccattgcaccctgtgcgacctgtggttcatgcagggcaacgagctgcgacggcacctttcagatgcccataacatatccgagagactggttactgaagaagttctctcagtggagacaagagtgcaaacagagcccgtgaccagcatgactatcattgagcaggtagggaaagtgcacgtgcttccactgcttcaggtgcaggtggactcggcgcaggtaacagtggaacaggtccatcctgacctgctgcaggactcgcaggtgcacgattcccatatgtctgagctcccggagcaggtccaggtcagctacctggaagtgggacgaattcaaacagaggaagggactgaggtccacgtagaagagcttcatgtggaaagggttaatcaaatgcctgtcgaagttcagaccgaactgcttgaggccgacctcgatcacgtcacacctgaaatcatgaatcaggaggaacgagagtctagtcaggccgacgctgctgaagccgcacgggaggatcatgaggatgcggaggacttagagaccaagcccactgtcgacagtgaggccgagaaagctgaaaatgaggaccgtacagcactcccagtgttggaatag

SEQ ID NO: 138345 - DNA, 798 bp, Artificial Sequence
  derived and/or modified sequence
atggaggccgaggagaccatggagtgcctgcaggagttccccgagcatcacaaaatgatactggacagactcaacgaacagcgcgagcaagatcgctttaccgatataacccttatcgtcgacggccaccactttaaagcccacaaggctgtgttggctgcatgttccaaattcttttacaagttcttccaggagttcactcaggaaccactggttgagattgagggggtcagtaagatggcgttccggcacctgatcgagttcacatatactgctaaacttatgatccaaggcgaggaggaggccaacgacgtatggaaggctgctgagtttttgcaaatgctcgaagcaatcaaagctctggaggtccggaacaaagaaaacagtgctcccctagaggagaatacaaccggcaaaaacgaagccaagaaaaggaaaatcgctgagacttctaacgtcatcacagaaagtctgccgagcgccgagagcgaaccggtggaaatagaggtcgagattgcagaaggtacgatcgaggtggaagatgagggcattgagactctggaagaggttgcttccgcaaagcagtctgtgaagtacatccagtctaccggctcatccgacgattctgctctggcacttctggctgacatcacctctaaatacaggcagggggaccggaaggggcagataaaggaggatggttgtccttctgatcccacatccaagcaggaacatatgaaatcccatagcactgagtcattcaagtgcgagatctgcaataaaaggtacctgagatag

SEQ ID NO: 138346 - DNA, 1770 bp, Artificial Sequence
  derived and/or modified sequence
atggaagctgaggagacgatggagtgtttgcaggaatttcctgaacaccataaaatgattcttgatcgcctgaatgagcagagggagcaggaccgctttaccgatattaccctaatcgtggatggacatcactttaaagcccacaaggctgtgctagcagcgtgttccaaatttttttacaaattcttccaagagttcacccaggagccgctggtcgaaattgagggcgtttcaaagatggcattccgccacctgatcgaatttacttacaccgcgaagctgatgatccagggcgaggaggaagccaacgacgtttggaaggctgctgaattcttacaaatgctagaggcgatcaaggctctcgaagtgcggaataaagagaattccgcaccactagaagagaacacaactggcaagaatgaagctaagaagaggaaaatcgccgaaacctccaacgttatcaccgagagcctgccatccgcagaatctgagccagtggagatcgaggtggagattgcagaggggacgattgaggtggaggacgaagggatcgaaactctcgaagaggtggccagtgctaaacaaagtgttaaatatatccagtccaccggttcttccgacgattcagcccttgcattgctggccgacatcacttctaagtatagacaaggcgacagaaaaggacagatcaaggaagacgggtgtccttcagacccaacaagcaaacaggagcatatgaaaagtcatagcaccgagtcattcaagtgcgaaatctgcaacaagcggtaccttcgcgaatccgcttggaaacagcacctgaactgttaccatctcgaggagggaggtgtctcaaagaagcagagaacaggaaagaaaatccacgtctgccagtactgtgagaaacaattcgaccatttcggccactttaaagagcaccttagaaagcacaccggcgaaaagccttttgaatgtccaaactgtcatgagcggtttgcacggaatagtacgctaaagtgccacttgacagcatgtcagacaggagtaggcgctaagaaaggaagaaaaaaactgtatgagtgccaggtatgcaacagcgtcttcaattcctgggaccagtttaaagaccatctggtgattcataccggggacaagcccaaccactgcaccctctgtgacctatggttcatgcaaggcaacgaactgcgtcgccatctctcagatgcacacaatattagcgagaggctggtgactgaggaagtgctctctgtggagactagggtacagactgaaccggttacatcaatgacgattatagagcaagtcggaaaggttcatgtgttgcctctgcttcaggtccaagttgatagcgcacaagtgaccgttgagcaggtccatcccgatctgctacaggattcacaggtccacgacagccacatgtccgaactgcctgagcaagtgcaagtaagctatctagaggtggggagaatccagacagaagagggaaccgaggttcatgttgaagagctccatgttgagagggtaaatcagatgcctgtggaagtgcagaccgagctactcgaagccgatctggaccacgtgacacccgagataatgaaccaggaggaacgcgagtcatctcaggcggacgctgcggaggctgctcgggaagatcacgaggacgccgaagatctggaaaccaagccgacagtggattcagaggccgagaaggcggaaaatgaagaccgtactgcattgccagtgttagagtag

SEQ ID NO: 138347 - DNA, 1770 bp, Artificial Sequence
  derived and/or modified sequence
atggaggcagaagagactatggaatgtctgcaggagttccccgagcatcataagatgatcctagataggctgaatgaacagcgcgaacaggacaggtttacggatatcacgctgattgtggacggacatcactttaaggctcataaggctgtgctagccgcttgcagcaagtttttttataaattcttccaggaattcacccaggagccattggttgaaattgagggcgtgtcaaaaatggcttttcgccatctgatagagtttacctatacagctaagctgatgatccagggagaggaagaggccaatgatgtctggaaggcggctgagttcctacagatgctggaagccatcaaggcattggaggtgagaaataaggaaaatagtgcaccgctggaagaaaacaccacagggaagaatgaagcaaagaagagaaagatcgccgagaccagcaacgtcatcacggagagcctgccttcggccgagagcgagcccgtggagatcgaggtggagattgctgagggcaccatcgaagttgaggacgaggggatagaaaccttagaggaagtagcatccgcaaagcagtccgttaagtacattcaaagcactggcagcagtgacgactctgccctcgccctcctggccgacatcactagcaagtatcgccagggtgacagaaagggccaaattaaggaagatgggtgtccatcagatcccacgagcaaacaggaacacatgaaaagccattccactgaatcctttaagtgtgagatctgcaataaacgataccttcgggagagtgcttggaaacagcacctcaattgttatcatctagaggagggcggtgtgtcaaagaagcagaggactggaaagaaaattcacgtatgccagtattgtgagaaacaattcgaccattttggacactttaaggagcacctaaggaagcacacaggagagaaacccttcgaatgccccaattgtcatgagcgctttgccaggaacagtacactaaaatgtcacctgacagcctgtcaaactggcgtgggtgcgaagaaaggtcgaaagaaactgtatgaatgtcaggtctgcaattctgtctttaatagttgggatcagttcaaagaccacctggtgatccatacaggcgacaagccgaaccattgtacactgtgcgatttgtggttcatgcagggcaacgaactgcgcagacatctgtctgacgcacacaatatttcagaacggctggtgactgaagaggttctgtctgtggaaacacgcgtccagacagagcctgtgacctctatgaccattattgaacaggtgggaaaagtgcatgtactccctctcttacaggtgcaggttgattcagctcaagtgactgtcgagcaggtgcacccagacctgttgcaggactcccaggtccatgattcccacatgtcggaactgcccgaacaggtacaagtgagctacctggaggttgggcgtatacaaacggaagaggggactgaagtccatgtggaggagcttcacgttgaaagggtcaatcagatgccagtggaggtgcagaccgagctgcttgaggctgatcttgaccacgttaccccagagatcatgaaccaggaggagcgggagagcagccaggccgacgctgcagaggccgctagagaggaccacgaggacgccgaggacctcgagaccaagccgacagtggattctgaagctgaaaaagcggagaatgaagaccgaactgcgctgccagtcttggaatag

SEQ ID NO: 138348 - DNA, 456 bp, Artificial Sequence
  derived and/or modified sequence
atggaggccgaggagactatggagtgtttgcaggagttccccgagcatcacaagatgattctggatcggctgaacgagcagagggagcaggatagattcactgacataaccctgattgtggacggtcaccatttcaaagctcataaagctgtgttagctgcctgttccaagttcttctataaattcttccaagagttcacccaagaacctcttgttgagattgagggtgttagtaagatggcatttcgccatctcatagagtttacgtacactgctaagctcatgatccaaggggaagaagaggccaatgacgtgtggaaggctgcagaattcctgcagatgctggaagccattaaagcactcgaagtgcgtaacaaagagaacagcgccccactggaggaaaatactactggaaagaacgaagcaaagaagcggaaaatcgcagaaacctcgtag

SEQ ID NO: 138349 - DNA, 420 bp, Artificial Sequence
  derived and/or modified sequence
atggaagcagaagagacaatggagtgtctgcaggagtttccggagcaccataaaatgattctcgatcggctgaatgaacagagagagcaggatcgattcacggatatcactctgattgtggatggccatcatttcaaagctcacaaagccgtgcttgctgcttgctccaaattcttttacaagttctttcaggagttcactcaggaacccctcgtggagatcgagggagtgtcaaagatggcattcaggcacctgatcgagtttacatacacagctaaactaatgatccagggcgaggaagaagccaacgacgtttggaaagcagccgagttcctccagatgctggaagcaatcaaagcccttgaggtgcgcaacaaagaaaatagcgcccctctcgaagagaacacgaccgggaaatag

SEQ ID NO: 138350 - DNA, 1770 bp, Artificial Sequence
  derived and/or modified sequence
atggaagccgaggaaacgatggaatgcctacaggaatttcccgagcaccacaagatgatcttggatcggctcaatgaacagcgagagcaagatcgcttcacggatatcaccctcatcgtcgacggccaccattttaaagcacataaagccgtactggccgcttgctccaagtttttctacaagttcttccaggagtttacacaagagcccttggtcgagatagagggcgtgtcaaagatggcgtttaggcacctgatcgaattcacttataccgcgaagctaatgattcagggagaagaagaggcaaatgatgtgtggaaggctgcagaatttctgcagatgttggaagccattaaggctttggaggtgcgtaacaaagaaaattccgccccactggaagaaaacactactggcaagaacgaagccaaaaagagaaaaatcgccgagacgtcaaacgtcattacagagagcctgccaagtgcggagagcgagcccgtggaaatcgaggtagagatcgcagagggtaccatagaagtggaagacgaaggaattgagacgctggaggaggtagcctccgctaagcagtctgtcaagtacatacagtcgacaggaagctccgatgacagcgcgctggctctgctggcagatatcacgagtaagtaccgccagggcgatagaaaggggcagataaaggaagatggttgtccctcggacccaacttccaagcaggagcatatgaaatctcatagcactgaatcatttaaatgcgaaatttgcaataagcgatacctgcgcgagagtgcttggaagcagcacctcaactgttatcacttagaggagggcggagttagcaagaagcaaagaactggcaagaagatccatgtgtgtcagtactgcgaaaaacagtttgatcacttcggacactttaaagagcatctcaggaagcatacaggtgaaaaaccttttgagtgtccaaactgccacgaacggtttgcacggaatagtacccttaagtgccatctcaccgcatgtcaaaccggcgtgggcgcaaagaaggggaggaaaaagctctatgagtgccaagtctgtaattccgtcttcaattcatgggaccaatttaaggaccacctggtgatacacacgggcgataaacccaaccactgtacactatgcgacttgtggtttatgcagggtaatgagctcaggagacacctctcagatgcgcacaatatatccgagaggcttgtcacagaagaagtactgtccgtggagacccgcgttcagaccgaaccagtgacaagcatgacgataatagagcaggttggtaaagtgcatgtgcttcctttgcttcaggtccaggtggattcggcccaggtgactgttgagcaggtgcatcccgatctgctgcaggattctcaggtgcacgacagtcatatgagcgagttaccggaacaagtccaggtgtcctacctggaagtgggtagaattcagacagaggagggcacggaggtgcatgtggaagagcttcacgtggaacgcgtgaatcaaatgccggtggaggtgcaaactgaactcttggaagccgacctcgaccatgtgacccctgagatcatgaatcaggaggaacgggagtcgagccaagccgatgctgccgaagccgcacgcgaggaccacgaagacgcagaagacctggaaaccaagcctactgtcgattcagaagccgagaaagctgagaatgaagataggactgccctaccagtgctggagtag

SEQ ID NO: 138351 - DNA, 798 bp, Artificial Sequence
  derived and/or modified sequence
atggaggcagaggagacaatggaatgtcttcaagaatttcctgaacaccacaagatgattttggataggctcaatgagcaacgagaacaggatagattcaccgatattaccctgatcgtggacggccatcactttaaggcccacaaagcggtgctggcagcctgctccaagttcttctataaattttttcaggaatttactcaggagccgcttgtcgaaatcgaaggtgtgagtaaaatggcttttcggcacctgatcgaattcacatataccgctaagctgatgattcaaggagaggaagaggcaaatgacgtctggaaagcggctgaatttctccagatgttagaggctattaaggccctggaagttcgaaacaaagagaattctgcccctctcgaggagaacacaacaggaaagaatgaggcgaaaaaacgaaaaatcgctgagacctctaacgtgattactgaaagcctgccaagcgccgagagtgagcctgtcgaaatagaggttgagatcgcagagggcactatagaagtggaggatgagggcattgagacactggaggaggtggctagtgctaagcagtccgtcaagtatatccagtcaacaggttcgagcgacgacagtgcactggctctactggcggacatcacatctaagtatcgccaaggcgatagaaagggacagattaaggaggacggctgcccctccgaccctacatcaaagcaggaacatatgaaatctcatagcacagaaagtttcaaatgtgaaatctgtaataagcgctacctgcggtag

SEQ ID NO: 138352 - DNA, 2400 bp, Artificial Sequence
  derived and/or modified sequence
gcaagcctgggccgctcctccttccctcaagcagcccgacggccatggaggctgaagagacgatggaatgccttcaggagttccctgaacatcataaaatgatcctcgaccgattgaatgaacagcgagagcaggaccggtttactgacatcaccctaattgtcgacggacaccattttaaggctcacaaggctgttttggctgcttgtagtaagttcttctacaaattctttcaggagtttacccaagaaccattggtggagatagaaggtgttagtaaaatggcctttcgccatttaattgagttcacatatacagcaaaattaatgatacaaggagaagaagaagccaatgatgtatggaaagcagcagagtttctacaaatgctagaagctatcaaagcccttgaagtcaggaacaaagaaaactcagctcccttagaggaaaataccacaggaaaaaatgaggccaaaaaaaggaagattgcagaaacttcaaatgttatcactgagtcattgccatctgcagaatcagaacctgttgaaattgaggtagagattgccgaaggcaccattgaagtggaagatgaaggcatcgaaacattagaggaagtggcttctgccaagcagtccgtaaagtacatacagagcacaggttcctctgatgattctgctctagcactgttggcagatattaccagcaagtaccgtcaaggtgacagaaaagggcagattaaagaagatggctgtccatctgaccccacgagcaaacaggagcacatgaaatcacactccactgagagtttcaagtgtgaaatatgcaataaacgatatcttcgagagagcgcatggaaacagcacctaaattgttaccaccttgaagaaggtggagtcagtaagaagcaaagaactgggaaaaaaattcatgtatgtcagtactgtgagaaacagtttgaccattttggacattttaaagaacatcttcgaaaacatacaggtgaaaaaccttttgaatgtccaaattgtcatgaacgatttgctagaaatagcactctgaaatgtcacctcactgcatgccaaactggagtaggggcaaaaaaaggaaggaagaagctctacgaatgccaggtctgcaacagtgtgtttaacagctgggaccagttcaaagatcacttggtaatacacactggagataaacccaaccattgtactttatgtgatttgtggtttatgcaaggaaatgaattaaggaggcatctcagtgatgctcacaatatttcagagcgtctagtaacggaagaagttctttcagtagaaacacgtgtgcaaactgaacctgtaacatcaatgactattatagaacaagttgggaaggtgcatgtgctaccattgcttcaggttcaggtggattcagcacaagtgactgtggaacaagtccatccagatctgctccaggacagccaggtgcacgattcacacatgagtgagcttccagagcaggtccaagtgagttatctagaagtgggccgaattcagactgaagaaggtactgaagtacatgtagaggagctgcatgttgaacgggtcaatcaaatgccagtggaagtacaaactgaacttctagaagcagatttggaccacgtgaccccagaaatcatgaaccaagaggagagagagtctagccaagcagatgctgctgaggctgccagggaagatcacgaagatgctgaggatttagagaccaagccaacagtggattctgaagcagaaaaggcagagaatgaggacagaacagctctgccagttttagaatgaaattacacatgaatatatttttaaatttacttgttgggtttttgaactgattatgggcagtttgactgtccttaattaagcctaacagacaagtggaccaaagttaagctgtttcctgttgtgctgaactgttgtccgttgaaacacattgattcccctccccctacttattgccacagaggagggatcttttccataactgaaggggagttttgagaagtatatttctggaaacttaaatggattatattcttattatatagttgggtacgaatgtatctattttcattgtggtaaaagttcttccttttctctttcccaggtcatgttcttcctcaaattttttccatattgtaaaatcaaacttaaatcattagaatacaagtttatgtattctaatgcatgttagaaaattgaataatataggaaacacaaggctgcatgatgaaaagtgcattgttactgtgcagttaaattttggcttctggctttctttagtttgaacaaacgttcttgtctaccccagtagtcacagatgccatctttgcaacagaaagagtggtggtggcaaaatttctagaatgtt

SEQ ID NO: 138353 - DNA, 3125 bp, Artificial Sequence
  derived and/or modified sequence
gagaagagggagggcgggggagggagaggcgacccgagagtcgttgtgggtcgcgggccggaccgggtcccggggcggtgggagccccggccgggcagaagggcttggcgggccgttagaggaccgccacggctgtcgagtcccctcccttgttggacttgcgcgccctggcgctcggaacctccggcgctgtgcccaccccgctctagctcgcgtctcccgactccaattagagcagcccgacggccatggaggctgaagagacgatggaatgccttcaggagttccctgaacatcataaaatgatcctcgaccgattgaatgaacagcgagagcaggaccggtttactgacatcaccctaattgtcgacggacaccattttaaggctcacaaggctgttttggctgcttgtagtaagttcttctacaaattctttcaggagtttacccaagaaccattggtggagatagaaggtgttagtaaaatggcctttcgccatttaattgagttcacatatacagcaaaattaatgatacaaggagaagaagaagccaatgatgtatggaaagcagcagagtttctacaaatgctagaagctatcaaagcccttgaagtcaggaacaaagaaaactcagctcccttagaggaaaataccacaggaaaaaatgaggccaaaaaaaggaagattgcagaaacttcaaatgttatcactgagtcattgccatctgcagaatcagaacctgttgaaattgaggtagagattgccgaaggcaccattgaagtggaagatgaaggcatcgaaacattagaggaagtggcttctgccaagcagtccgtaaagtacatacagagcacaggttcctctgatgattctgctctagcactgttggcagatattaccagcaagtaccgtcaaggtgacagaaaagggcagattaaagaagatggctgtccatctgaccccacgagcaaacaggagcacatgaaatcacactccactgagagtttcaagtgtgaaatatgcaataaacgatatcttcgagagagcgcatggaaacagcacctaaattgttaccaccttgaagaaggtggagtcagtaagaagcaaagaactgggaaaaaaattcatgtatgtcagtactgtgagaaacagtttgaccattttggacattttaaagaacatcttcgaaaacatacaggtgaaaaaccttttgaatgtccaaattgtcatgaacgatttgctagaaatagcactctgaaatgtcacctcactgcatgccaaactggagtaggggcaaaaaaaggaaggaagaagctctacgaatgccaggtctgcaacagtgtgtttaacagctgggaccagttcaaagatcacttggtaatacacactggagataaacccaaccattgtactttatgtgatttgtggtttatgcaaggaaatgaattaaggaggcatctcagtgatgctcacaatatttcagagcgtctagtaacggaagaagttctttcagtagaaacacgtgtgcaaactgaacctgtaacatcaatgactattatagaacaagttgggaaggtgcatgtgctaccattgcttcaggttcaggtggattcagcacaagtgactgtggaacaagtccatccagatctgctccaggacagccaggtgcacgattcacacatgagtgagcttccagagcaggtccaagtgagttatctagaagtgggccgaattcagactgaagaaggtactgaagtacatgtagaggagctgcatgttgaacgggtcaatcaaatgccagtggaagtacaaactgaacttctagaagcagatttggaccacgtgaccccagaaatcatgaaccaagaggagagagagtctagccaagcagatgctgctgaggctgccagggaagatcacgaagatgctgaggatttagagaccaagccaacagtggattctgaagcagaaaaggcagagaatgaggacagaacagctctgccagttttagaatgaaattacacatgaatatatttttaaatttacttgttgggtttttgaactgattatgggcagtttgactgtccttaattaagcctaacagacaagtggaccaaagttaagctgtttcctgttgtgctgaactgttgtccgttgaaacacattgattcccctccccctacttattgccacagaggagggatcttttccataactgaaggggagttttgagaagtatatttctggaaacttaaatggattatattcttattatatagttgggtacgaatgtatctattttcattgtggtaaaagttcttccttttctctttcccaggtcatgttcttcctcaaattttttccatattgtaaaatcaaacttaaatcattagaatacaagtttatgtattctaatgcatgttagaaaattgaataatataggaaacacaaggctgcatgatgaaaagtgcattgttactgtgcagttaaattttggcttctggctttctttagtttgaacaaacgttcttgtctaccccagtagtcacagatgccatctttgcaacagaaagagtggtggtggcaaaatttctagaatgttaaaaaaaaaaaaaaatccacacccatgtgccttctcaaaaccaactgaacttctataaagcatctctggttctttcaaagtttgtgttgtaaggagcaatgtagatgatgctataatactttatatttttggttataatgacaaccaccagttctttttcacttaagttaggttgagaaattttatttaatggccactgaagggccattttcaattgggaaaatttatttacatctgtggtaaactttattttgatgaaaagttgcactagtattttaccaccagatgagaaaaagatgagcagcatttaaaaattaatgtatttaaaataaagtacagagaaagacatgtatataattatcaggctttgttttgaatggaatcttttcccccaattcttaatgtaaagatcttgtgctataacttttaaagccatacaaataagagtgctaaactgtggacttaaaagtaggtgtgtaaatatttttaatcagtattacttggaaaataaaatataacaa

SEQ ID NO: 138354 - DNA, 501 bp, Artificial Sequence
  derived and/or modified sequence
gtgacgcgcaagcctgggccgctcctccttccctcacccgacggccatggaggctgaagagacgatggaatgccttcaggagttccctgaacatcataaaatgatcctcgaccgattgaatgaacagcgagagcaggaccggtttactgacatcaccctaattgtcgacggacaccattttaaggctcacaaggctgttttggctgcttgtagtaagttcttctacaaattctttcaggagtttacccaagaaccattggtggagatagaaggtgttagtaaaatggcctttcgccatttaattgagttcacatatacagcaaaattaatgatacaaggagaagaagaagccaatgatgtatggaaagcagcagagtttctacaaatgctagaagctatcaaagcccttgaagtcaggaacaaagaaaactcagctcccttagaggaaaataccacaggaaaaaatgaggccaaaaaaaggaagattgcagaaacttcaaa

SEQ ID NO: 138355 - DNA, 572 bp, Artificial Sequence
  derived and/or modified sequence
ggccgggcagaagggcttggcgggccgttagaggaccgccacggctgtcgagtcccctcccttgttggacttgcgcgccctggcgctcggaacctccggcgctgtgcccaccccgctctagctcgcgtctcccgactccaattagcccgacggccatggaggctgaagagacgatggaatgccttcaggagttccctgaacatcataaaatgatcctcgaccgattgaatgaacagcgagagcaggaccggtttactgacatcaccctaattgtcgacggacaccattttaaggctcacaaggctgttttggctgcttgtagtaagttcttctacaaattctttcaggagtttacccaagaaccattggtggagatagaaggtgttagtaaaatggcctttcgccatttaattgagttcacatatacagcaaaattaatgatacaaggagaagaagaagccaatgatgtatggaaagcagcagagtttctacaaatgctagaagctatcaaagcccttgaagtcaggaacaaagaaaactcagctcccttagaggaaaataccacaggaaaa

SEQ ID NO: 138356 - DNA, 3340 bp, Artificial Sequence
  derived and/or modified sequence
gaagagggagggcgggggagggagaggcgacccgagagtcgttgtgggtcgcgggccggaccgggtcccggggcggtgggagccccggccgggcagaagggcttggcgggccgttagaggaccgccacggctgtcgagtcccctcccttgttggacttgcgcgccctggcgctcggaacctccggcgctgtgcccaccccgctctagctcgcgtctcccgactccaattaggtcaggctcggagtcccgcggccgcggctccggtctcaacgctccggggccgctcggctcgcctttcttccctcgcctttctctcctcttgcttcaccctccccccttcttttcacgttgctggttttttttgttgttgttttatgctttaggggttttgttcctcggctcgagctcatgggtgtacattatcatgctcttcttttgtagagcagcccgacggccatggaggctgaagagacgatggaatgccttcaggagttccctgaacatcataaaatgatcctcgaccgattgaatgaacagcgagagcaggaccggtttactgacatcaccctaattgtcgacggacaccattttaaggctcacaaggctgttttggctgcttgtagtaagttcttctacaaattctttcaggagtttacccaagaaccattggtggagatagaaggtgttagtaaaatggcctttcgccatttaattgagttcacatatacagcaaaattaatgatacaaggagaagaagaagccaatgatgtatggaaagcagcagagtttctacaaatgctagaagctatcaaagcccttgaagtcaggaacaaagaaaactcagctcccttagaggaaaataccacaggaaaaaatgaggccaaaaaaaggaagattgcagaaacttcaaatgttatcactgagtcattgccatctgcagaatcagaacctgttgaaattgaggtagagattgccgaaggcaccattgaagtggaagatgaaggcatcgaaacattagaggaagtggcttctgccaagcagtccgtaaagtacatacagagcacaggttcctctgatgattctgctctagcactgttggcagatattaccagcaagtaccgtcaaggtgacagaaaagggcagattaaagaagatggctgtccatctgaccccacgagcaaacaggagcacatgaaatcacactccactgagagtttcaagtgtgaaatatgcaataaacgatatcttcgagagagcgcatggaaacagcacctaaattgttaccaccttgaagaaggtggagtcagtaagaagcaaagaactgggaaaaaaattcatgtatgtcagtactgtgagaaacagtttgaccattttggacattttaaagaacatcttcgaaaacatacaggtgaaaaaccttttgaatgtccaaattgtcatgaacgatttgctagaaatagcactctgaaatgtcacctcactgcatgccaaactggagtaggggcaaaaaaaggaaggaagaagctctacgaatgccaggtctgcaacagtgtgtttaacagctgggaccagttcaaagatcacttggtaatacacactggagataaacccaaccattgtactttatgtgatttgtggtttatgcaaggaaatgaattaaggaggcatctcagtgatgctcacaatatttcagagcgtctagtaacggaagaagttctttcagtagaaacacgtgtgcaaactgaacctgtaacatcaatgactattatagaacaagttgggaaggtgcatgtgctaccattgcttcaggttcaggtggattcagcacaagtgactgtggaacaagtccatccagatctgctccaggacagccaggtgcacgattcacacatgagtgagcttccagagcaggtccaagtgagttatctagaagtgggccgaattcagactgaagaaggtactgaagtacatgtagaggagctgcatgttgaacgggtcaatcaaatgccagtggaagtacaaactgaacttctagaagcagatttggaccacgtgaccccagaaatcatgaaccaagaggagagagagtctagccaagcagatgctgctgaggctgccagggaagatcacgaagatgctgaggatttagagaccaagccaacagtggattctgaagcagaaaaggcagagaatgaggacagaacagctctgccagttttagaatgaaattacacatgaatatatttttaaatttacttgttgggtttttgaactgattatgggcagtttgactgtccttaattaagcctaacagacaagtggaccaaagttaagctgtttcctgttgtgctgaactgttgtccgttgaaacacattgattcccctccccctacttattgccacagaggagggatcttttccataactgaaggggagttttgagaagtatatttctggaaacttaaatggattatattcttattatatagttgggtacgaatgtatctattttcattgtggtaaaagttcttccttttctctttcccaggtcatgttcttcctcaaattttttccatattgtaaaatcaaacttaaatcattagaatacaagtttatgtattctaatgcatgttagaaaattgaataatataggaaacacaaggctgcatgatgaaaagtgcattgttactgtgcagttaaattttggcttctggctttctttagtttgaacaaacgttcttgtctaccccagtagtcacagatgccatctttgcaacagaaagagtggtggtggcaaaatttctagaatgttaaaaaaaaaaaaaaatccacacccatgtgccttctcaaaaccaactgaacttctataaagcatctctggttctttcaaagtttgtgttgtaaggagcaatgtagatgatgctataatactttatatttttggttataatgacaaccaccagttctttttcacttaagttaggttgagaaattttatttaatggccactgaagggccattttcaattgggaaaatttatttacatctgtggtaaactttattttgatgaaaagttgcactagtattttaccaccagatgagaaaaagatgagcagcatttaaaaattaatgtatttaaaataaagtacagagaaagacatgtatataattatcaggctttgttttgaatggaatcttttcccccaattcttaatgtaaagatcttgtgctataacttttaaagccatacaaataagagtgctaaactgtggacttaaaagtaggtgtgtaaatatttttaatcagtattacttggaaaataaaatataacaaacccata

SEQ ID NO: 138357 - DNA, 1050 bp, Artificial Sequence
  derived and/or modified sequence
gaacgtgctcgcgcccgtagctgccgctgccggggccgcggccgcccgggtgcccaaccgaacgcacgtgcgccagcggggcccgagcagaaggggagccccggctctcacgaagaaaatggagggcgacccacgggttaggggtcaggaaaggcgtggggcgcattatgccctgggaggggaaagcacggaacaagaggctctgagggacggagaggaaggagggcgacccacgagctagagcagcccgacggccatggaggctgaagagacgatggaatgccttcaggagttccctgaacatcataaaatgatcctcgaccgattgaatgaacagcgagagcaggaccggtttactgacatcaccctaattgtcgacggacaccattttaaggctcacaaggctgttttggctgcttgtagtaagttcttctacaaattctttcaggagtttacccaagaaccattggtggagatagaaggtgttagtaaaatggcctttcgccatttaattgagttcacatatacagcaaaattaatgatacaaggagaagaagaagccaatgatgtatggaaagcagcagagtttctacaaatgctagaagctatcaaagcccttgaagtcaggaacaaagaaaactcagctcccttagaggaaaataccacaggaaaaaatgaggccaaaaaaaggaagattgcagaaacttcaaatgttatcactgagtcattgccatctgcagaatcagaacctgttgaaattgaggtagagattgccgaaggcaccattgaagtggaagatgaaggcatcgaaacattagaggaagtggcttctgccaagcagtccgtaaagtacatacagagcacaggttcctctgatgattctgctctagcactgttggcagatattaccagcaagtaccgtcaaggtgacagaaaagggcagattaaagaagatggctgtccatctgaccccacgagcaaacaggagcacatgaaatcacactccactgagagtttcaagtgtgaaatatgcaataaacgatatcttcg

SEQ ID NO: 138358 - protein, 706 aa, Artificial Sequence
  derived and/or modified sequence
MALPSPQVLMGLPALLMGPAQHTSWPCGSAVPTLKSMVTFEDVAVYFSQEEWELLDAAQRHLYHSVMLENLELVTSLGSWHGVEGEGAHPKQNVSVEVLQVRIPNADPSTKKANSCDMCGPFLKDILHLAEHQGTQSEEKPYTCGACGRDFWLNANLHQHQKEHSGGKPFRWYKDRDALMKSSKVHLSENPFTCREGGKVILGSCDLLQLQAVDSGQKPYSNLGQLPEVCTTQKLFECSNCGKAFLKSSTLPNHLRTHSEEIPFTCPTGGNFLEEKSILGNKKFHTGEIPHVCKECGKAFSHSSKLRKHQKFHTEVKYYECIACGKTFNHKLTFVHHQRIHSGERPYECDECGKAFSNRSHLIRHEKVHTGERPFECLKCGRAFSQSSNFLRHQKVHTQVRPYECSQCGKSFSRSSALIQHWRVHTGERPYECSECGRAFNNNSNLAQHQKVHTGERPFECSECGRDFSQSSHLLRHQKVHTGERPFECCDCGKAFSNSSTLIQHQKVHTGQRPYECSECRKSFSRSSSLIQHWRIHTGEKPYECSECGKAFAHSSTLIEHWRVHTKERPYECNECGKFFSQNSILIKHQKVHTGEKPYKCSECGKFFSRKSSLICHWRVHTGERPYECSECGRAFSSNSHLVRHQRVHTQERPYECIQCGKAFSERSTLVRHQKVHTRERTYECSQCGKLFSHLCNLAQHKKIHT

SEQ ID NO: 138359 - protein, 396 aa, Artificial Sequence
  derived and/or modified sequence
PTLKSMVTFEDVAVYFSQEEWELLDAAQRHLYHSVMLENLELVTSLGNALSQHVCLFPIESSVHPKARSWVLLPSRVSCCRCWGAEVLLGVEGEGAHPKQNVSVEVLQHQKEHSGGKPFRWYKDSSGQKPYSNLGQLPEVCTTQKLFECSNCGKAFLKSSTLPNHLRTHSEEIPFTCPTGGNFLEEKSILGNKKFHTGEIPHVCKECGKAFSHSSKLRKHQKFHTEVRPYECSQCGKSFSRSSALIQHWRIHTGEKPYECSECGKAFAHSSTLIEHWRVHTKERPYECNECGKFFSQNSILIKHQKVHTGEKPYKCSECGKFFSRKSSLICHWRVHTGERPYECSECGRAFSSNSHLVRHQRVHTQERPYECIQCGKAFSERSTLVRHQKVHTRER

SEQ ID NO: 138360 - DNA, 3048 bp, Artificial Sequence
  derived and/or modified sequence
gagccaatgaaagctcggaccagtggcaagtccgagctgtcattgagaggcgggacttccggcgccgccattgcggtcctcattttgctgctggtgggttgggctacagcaggcctctggagccacaccagggcacgggagtgggtgcagggaccgtcaccgcgccttcacacgcaccatagtgcccggctaattactctgcttttatgagccaaggtgttcccgaaagtggagccagcgccacgcgtctccagggtctccatacccagccttcgtccctgcggtgcccagaggccttgcgcgcattttgcatttgggaagacaggtcctgagtgcgaccgtcacccagcggaagtgtgagggttcggcccagcggcagggctagccctgggcctcctgttatggccctgcccagcccacaggttctaatggggttgccagcgttgctgatgggcccggcgcagcatacttcttggccctgtggctcagctgtccccacattgaagagcatggtaacctttgaagatgtggctgtatacttctcccaagaggagtgggagctccttgatgcagcccagaggcacctgtaccacagtgtgatgctggaaaaccttgagcttgtgacctcacttggttcttggcatggagtagagggtgagggggcccatcccaagcagaatgtttctgtagaagtgttacaggtcaggatccctaatgcagatccttccaccaagaaagctaactcctgtgacatgtgtgggccattcttgaaagacattttgcacctggctgagcatcagggaacacagtctgaggagaaaccctacacatgtggagcatgtgggagagacttttggttgaatgcaaaccttcaccagcaccagaaggagcacagtggagggaagccctttagatggtacaaggacagggacgcacttatgaagagctctaaagtccacctgtcagagaaccccttcacttgcagggaaggtgggaaggtcatcctgggcagctgtgacctcctccagcttcaagctgttgacagtgggcagaagccatattccaatcttgggcagcttccagaagtctgtaccacacagaaactcttcgagtgcagcaactgtggaaaagccttcctgaagagctccactctccccaaccatctgagaactcactctgaagagataccatttacatgcccaacaggtggaaatttcttagaggagaaatcaatccttggtaataaaaagtttcacactggggaaataccccatgtgtgtaaggagtgtgggaaggcctttagtcactcatctaagctgaggaagcaccagaaatttcacactgaagtaaaatattatgagtgcattgcatgtgggaaaaccttcaaccacaaactcacatttgttcatcatcagagaattcactcaggagaaagaccttatgagtgtgatgaatgtgggaaagccttcagtaacagatcacacctcattcggcatgagaaagttcacactggagaaaggccttttgagtgcctgaaatgtggaagagccttcagccaaagctccaatttccttcggcatcagaaagttcacacacaggtaagaccttatgagtgcagtcaatgtggtaaatccttcagccgaagctctgctctcattcagcactggagagttcacactggagaaagaccgtatgaatgcagtgaatgtggaagagcttttaacaataactccaaccttgctcagcaccagaaagttcacaccggagaacggccttttgagtgcagtgaatgtggaagagacttcagccaaagctcccatctccttcgacatcagaaagttcacactggagaacggccttttgaatgctgtgattgtggtaaagccttcagtaatagctccaccctcatccagcaccagaaagtacatactgggcaaaggccttatgagtgcagcgaatgtaggaaatccttcagccgcagctccagcctgattcagcactggagaattcacactggagaaaagccttacgagtgtagtgagtgtgggaaagcctttgctcacagctccactctcattgaacactggagagttcacacaaaagaaaggccttatgagtgcaatgaatgtgggaaattctttagccaaaactccattctcattaagcatcagaaagttcatactggagaaaagccttataaatgcagtgaatgtgggaaattctttagccgaaaatccagccttatttgtcactggagagttcacactggagaaaggccttacgaatgcagtgaatgtgggagagcctttagcagtaactcccacctggttcgtcatcagagagttcacacacaagaaaggccctatgagtgcatccagtgtggaaaagcctttagtgaaagatctacacttgttcggcaccagaaagttcacaccagagaaaggacttatgagtgtagccagtgtgggaaactcttcagccatctttgtaaccttgcacagcataaaaagattcatacctgagtggagccttatggaagtggtctttgtgagaaaatcttcagccaagtcaaacttcatgcagcagaatccccataccagaaaaattacctacatgtactgctaatgtggaaaagccttcagaagctactctgtttctgaccagcccaggaacctttgcagggccatctcacccatgcagcataaggcagaagccatagtcactttccatcttgcctggatccaaaaatttgcagcagtcctgtcctcatgcatggggaaaacagtaccctgagccttccttcctgtgttctctagggattcaggactgtgctcagctgaaccgatgctggttgaggggccttgagggaaatctaatttgagctcaggaagatgcacattccttgtggatgtggtcaagtctgtgtttaacccctaagatgtgtccattgaggccacaaatcaccctccactggaatcacctaccttgcctgcactaactggtgataataaagaccttattgatcaggtcaaaaaaaaaaaaaaaaaa

SEQ ID NO: 138361 - DNA, 2121 bp, Artificial Sequence
  derived and/or modified sequence
atggccctgcccagcccccaggtgctgatgggcctgcccgccctgctgatgggccccgcccagcacaccagctggccctgcggcagcgccgtgcccaccctgaagagcatggtgaccttcgaggacgtggccgtgtacttcagccaggaggagtgggagctgctggacgccgcccagagacacctgtaccacagcgtgatgctggagaacctggagctggtgaccagcctgggcagctggcacggcgtggagggcgagggcgcccaccccaagcagaacgtgagcgtggaggtgctgcaggtgagaatccccaacgccgaccccagcaccaagaaggccaacagctgcgacatgtgcggccccttcctgaaggacatcctgcacctggccgagcaccagggcacccagagcgaggagaagccctacacctgcggcgcctgcggcagagacttctggctgaacgccaacctgcaccagcaccagaaggagcacagcggcggcaagcccttcagatggtacaaggacagagacgccctgatgaagagcagcaaggtgcacctgagcgagaaccccttcacctgcagagagggcggcaaggtgatcctgggcagctgcgacctgctgcagctgcaggccgtggacagcggccagaagccctacagcaacctgggccagctgcccgaggtgtgcaccacccagaagctgttcgagtgcagcaactgcggcaaggccttcctgaagagcagcaccctgcccaaccacctgagaacccacagcgaggagatccccttcacctgccccaccggcggcaacttcctggaggagaagagcatcctgggcaacaagaagttccacaccggcgagatcccccacgtgtgcaaggagtgcggcaaggccttcagccacagcagcaagctgagaaagcaccagaagttccacaccgaggtgaagtactacgagtgcatcgcctgcggcaagaccttcaaccacaagctgaccttcgtgcaccaccagagaatccacagcggcgagagaccctacgagtgcgacgagtgcggcaaggccttcagcaacagaagccacctgatcagacacgagaaggtgcacaccggcgagagacccttcgagtgcctgaagtgcggcagagccttcagccagagcagcaacttcctgagacaccagaaggtgcacacccaggtgagaccctacgagtgcagccagtgcggcaagagcttcagcagaagcagcgccctgatccagcactggagagtgcacaccggcgagagaccctacgagtgcagcgagtgcggcagagccttcaacaacaacagcaacctggcccagcaccagaaggtgcacaccggcgagagacccttcgagtgcagcgagtgcggcagagacttcagccagagcagccacctgctgagacaccagaaggtgcacaccggcgagagacccttcgagtgctgcgactgcggcaaggccttcagcaacagcagcaccctgatccagcaccagaaggtgcacaccggccagagaccctacgagtgcagcgagtgcagaaagagcttcagcagaagcagcagcctgatccagcactggagaatccacaccggcgagaagccctacgagtgcagcgagtgcggcaaggccttcgcccacagcagcaccctgatcgagcactggagagtgcacaccaaggagagaccctacgagtgcaacgagtgcggcaagttcttcagccagaacagcatcctgatcaagcaccagaaggtgcacaccggcgagaagccctacaagtgcagcgagtgcggcaagttcttcagcagaaagagcagcctgatctgccactggagagtgcacaccggcgagagaccctacgagtgcagcgagtgcggcagagccttcagcagcaacagccacctggtgagacaccagagagtgcacacccaggagagaccctacgagtgcatccagtgcggcaaggccttcagcgagagaagcaccctggtgagacaccagaaggtgcacaccagagagagaacctacgagtgcagccagtgcggcaagctgttcagccacctgtgcaacctggcccagcacaagaagatccacacctag

SEQ ID NO: 138362 - DNA, 2121 bp, Artificial Sequence
  derived and/or modified sequence
atggctctgccttcaccccaagtgctgatgggtctgcccgctctgttaatgggtcccgcacaacacacctcttggccctgcggttccgctgtgcctacactgaaaagcatggtaaccttcgaggatgttgccgtgtatttttcccaggaggaatgggaattattggatgccgcccagcggcacctctaccacagtgttatgctcgaaaatctcgagctggtgacatcactgggaagctggcatggggtcgagggggaaggtgcccacccaaaacaaaatgtgtctgtcgaagtactacaggtgcggatccccaacgctgatccttccaccaagaaggccaacagctgtgacatgtgcggtccattcctgaaggatatcctacacctggccgaacaccagggaactcagtcagaagaaaagccctatacttgcggagcgtgcggtcgtgacttttggctcaacgctaatcttcatcagcatcagaaggaacactcaggcggcaaaccatttagatggtacaaagaccgcgacgcactgatgaaatcttcaaaggtgcacctgagtgagaacccatttacctgcagagaggggggcaaagttatccttgggtcgtgtgatttacttcagttgcaagccgtagattctggtcagaagccatactctaatcttggccagctgcccgaggtgtgtaccacacagaagctgtttgaatgcagcaattgtggcaaggcctttttgaagtcatccactttgccaaaccacctccggactcactctgaggaaattccttttacatgtccaaccggcgggaacttcttggaagagaagagcattctgggcaacaaaaaattccatactggggagatccctcatgtgtgtaaagaatgcgggaaagctttctcccactcttcgaagctgcgtaaacaccagaagtttcatactgaggtcaaatattatgagtgcatcgcctgtggaaagaccttcaatcacaaattgacctttgtccaccaccagagaattcacagcggtgaacgaccatacgaatgtgatgaatgcggcaaggcatttagcaaccggtcccacctcattagacatgaaaaagtgcacacaggtgagcgtccattcgagtgtctgaagtgcggtcgcgcatttagtcaaagtagtaattttttaagacaccagaaggtccatactcaagtgcgaccttatgagtgcagccagtgtggcaagtccttcagccggtccagcgccctgattcaacactggcgtgtgcacacaggagaacggccttatgagtgctcagaatgcggaagggcgttcaacaataattcgaacttagctcagcaccagaaagtgcacacaggcgagcgccccttcgaatgctcagagtgtggtcgggactttagtcagagcagccatctgctgcggcaccagaaggtacatacgggtgagcggccattcgagtgctgcgattgtggaaaagccttctccaacagcagcacactgattcagcatcagaaagtgcacacagggcaaaggccatatgagtgcagcgagtgccgtaaatcattctcccggagttcttctctgatccaacattggagaattcacaccggggagaagccgtacgaatgtagcgagtgcggcaaagcgttcgcgcatagctccaccctgattgagcattggcgggtccacaccaaggagcgtccctatgaatgcaatgagtgcggcaaatttttctcacagaatagtatccttatcaaacatcagaaagtgcacacgggagagaaaccctacaaatgctccgaatgcggcaagttcttctcaaggaagtcttctctgatctgccactggagggtccatacaggagaaaggccatacgagtgtagcgagtgcggaagggccttcagctccaactcacacctagtcagacatcaaagagtgcatactcaagaaaggccctatgagtgcatccagtgcgggaaggccttcagtgaacgatcaaccctagtacgacaccagaaggtacacacgcgagaacgcacgtacgagtgcagtcagtgtggtaaactgttcagtcacctgtgcaacttggcacagcataagaaaattcacacctag

SEQ ID NO: 138363 - DNA, 2121 bp, Artificial Sequence
  derived and/or modified sequence
atggccctgcccagcccccaggtgctgatgggcctgcctgccctgctgatgggccctgcccagcacacctcctggccctgtggcagcgctgtgcccaccctgaagtccatggtgacctttgaagatgtggccgtgtacttcagccaggaggagtgggagctgctggatgctgcccagaggcacctgtaccacagcgtgatgctggagaacctggagctggtgaccagcctgggctcctggcatggagtggagggggagggcgcccaccccaagcagaatgtgtctgtggaggtgctgcaggtgcgcatccccaatgctgaccccagcaccaagaaggccaacagctgtgacatgtgtggccccttcctgaaggacatcctgcacctggccgagcaccagggcacccagagcgaggagaagccctacacctgtggggcctgtggccgggacttctggctgaatgccaacctgcaccagcaccagaaggagcacagcggcggcaagcccttccgctggtacaaggacagagatgccctgatgaagagcagcaaggtgcacctgtctgagaaccccttcacctgccgggagggcggcaaggtgatcctgggcagctgtgacctgctgcagctgcaggccgtggacagcggccagaagccctacagcaacctgggccagctgcctgaggtgtgcaccacccagaagctgtttgaatgtagcaactgtgggaaggccttcctgaagagcagcaccctgcccaaccacctgcggacccacagcgaggagatccccttcacctgccccaccggcggcaacttcctggaggagaagagcatcctgggcaacaagaagttccacactggagagatcccccacgtgtgcaaggaatgtgggaaggccttcagccacagcagcaagctgaggaagcaccagaagttccacacagaggtgaagtactatgagtgcatcgcctgtgggaagaccttcaaccacaagctgacctttgtgcaccaccagaggatccacagcggggagcggccctatgaatgtgatgaatgtgggaaggccttcagcaacagaagccacctgatcagacatgagaaggtgcacactggagagcggccctttgagtgcctgaagtgtggccgggccttcagccagagcagcaacttcctgcggcaccagaaggtgcacacccaggtgcggccctatgagtgcagccagtgtgggaagagcttcagccgcagcagcgccctgatccagcactggagggtgcacactggagagcggccctatgagtgcagtgaatgtggccgggccttcaacaacaacagcaacctggcccagcaccagaaggtgcacactggagagcggccctttgagtgcagtgaatgtggccgggacttcagccagagcagccacctgctgcggcaccagaaggtgcacactggagagcggccctttgagtgctgtgactgtgggaaggccttcagcaacagcagcaccctcatccagcaccagaaggtgcacacaggccagaggccctatgagtgcagtgaatgtaggaagagcttcagccgcagcagcagcctcatccagcactggaggatccacactggagagaagccctatgagtgcagtgaatgtgggaaggcctttgcccacagcagcaccctgattgagcactggagggtgcacaccaaggagcggccctatgagtgcaatgaatgtgggaagttcttcagccagaacagcatcctgatcaagcaccagaaggtgcacactggagagaagccctacaagtgcagtgaatgtgggaagttcttcagcaggaagagcagcctcatctgccactggagggtgcacactggagagcggccctatgagtgcagtgaatgtggccgggccttcagcagcaacagccacctggtgcgccaccagagggtgcacacccaggagcggccctatgagtgcatccagtgtgggaaggccttcagcgagaggagcaccctggtgcgccaccagaaggtgcacacccgggagaggacctatgagtgcagccagtgtgggaagctgttcagccacctgtgcaacctggcccagcacaagaagatccacacctag

SEQ ID NO: 138364 - DNA, 2121 bp, Artificial Sequence
  derived and/or modified sequence
atggccctgcccagcccccaggtgctgatgggcctgcccgccctgttgatgggccccgcgcagcacaccagctggccatgcggctccgccgtgccaaccttgaaaagcatggttacattcgaggacgtggcagtgtatttcagccaagaagagtgggagctcctggatgccgcccagcggcatctctaccattctgtgatgttggaaaatctcgaattggtcacgtctttgggcagctggcacggagtcgaaggtgagggagctcacccaaaacagaatgtgagtgttgaggtcctccaggttaggatccccaatgctgaccctagcacaaagaaagccaacagttgcgatatgtgcggaccctttctcaaggacattctacatctggcggaacatcagggcacgcagagcgaggaaaaaccttatacttgtggggcatgtggccgtgacttctggctgaacgccaatctgcaccaacatcagaaagagcactctggtggcaagccgttcaggtggtataaggaccgagacgctttgatgaagagtagcaaagtgcacctgtctgagaaccccttcacctgtcgagaaggtggtaaagtgatcttagggtcttgcgatctcttgcagctgcaagcagtcgacagcgggcaaaagccttattccaatttagggcagttgcccgaggtgtgcactacgcaaaaattgttcgagtgtagcaattgcgggaaagctttccttaagtctagcaccctccccaaccatttgaggacacactcagaagagatcccatttacctgtcccacaggtgggaattttctcgaggagaaatcaatccttggaaacaagaagtttcacacaggggagattccccacgtttgcaaagagtgcggcaaggcattttcacattcctcaaaactgcgcaaacaccagaagttccataccgaagttaaatactatgagtgtatagcctgcggcaaaacattcaaccataagcttactttcgtgcaccaccagcggattcacagtggtgaaaggccctacgaatgcgacgagtgtgggaaggccttctccaaccgctcccacttgatccgccacgagaaggtgcatactggtgagcggccttttgaatgcctcaagtgtggtagggcgttcagtcagtccagcaacttcctcagacatcagaaagtgcacactcaagtccgtccctacgaatgcagccagtgcgggaaatcgttttcaaggtcatccgcccttatccagcactggcgcgtgcacaccggcgagcgcccatatgaatgttctgagtgcggccgcgctttcaataataatagcaacttagcccaacatcagaaagtacacactggcgaaaggcccttcgaatgcagtgagtgcggaagagacttctctcagtcctcgcacctgcttagacatcagaaggttcacaccggcgaaaggccttttgaatgctgtgattgtggcaaggcttttagcaacagcagtactctgatccagcaccagaaggtgcacacgggccagaggccatacgagtgttcagaatgccgtaaatcctttagtcgctcttcctccctgatacagcactggcggattcatacgggagagaagccttacgaatgcagtgagtgcgggaaggcgtttgcacacagttctactcttatagagcattggcgtgtgcacacaaaggagagaccatacgagtgtaacgagtgtggaaagttttttagccagaactccatcctcatcaaacatcagaaggtgcacaccggggaaaaaccctacaaatgttccgaatgcggcaaattcttttctcgaaagtcaagcctaatctgtcactggcgtgtccacactggggagcggccttatgaatgtagcgagtgcggtagggccttttcatccaatagccacctggtgaggcaccagagggtacatacgcaggaacgcccttatgagtgtatccagtgcggcaaggcgttctcagaacgatctacactggtacgccaccaaaaggtgcacaccagggagcgtacttatgagtgtagccagtgtggcaagctgttttctcatctatgcaacttagcgcagcacaagaagattcatacctag

SEQ ID NO: 138365 - DNA, 2121 bp, Artificial Sequence
  derived and/or modified sequence
atggccctcccatccccccaggtgctcatgggcctcccagcattactaatgggacctgcgcaacacacttcttggccgtgcggtagtgccgttcccacccttaagtccatggtgacctttgaagacgtcgctgtgtacttctcgcaggaggaatgggagctgctggatgccgcacagaggcacctttatcactcggtgatgctagagaacctcgaactggtgaccagtcttggaagctggcacggcgtggagggcgagggtgcccatcccaaacagaacgtgtccgttgaagtgctgcaggttcgcattccaaatgccgatccatccactaaaaaggctaattcttgtgatatgtgcggtccctttctcaaggacattctccacctggccgaacatcagggtacccagtctgaggagaaaccctacacgtgtggcgcttgtggtagagatttctggcttaacgctaacctgcatcagcaccagaaggagcactctggcggaaagccgttccggtggtataaggatagagacgcccttatgaaaagcagcaaagttcacctgtccgagaatccattcacctgcagagaaggcggaaaggtgatcctgggcagctgtgacctgctccagctgcaggcagtggatagcgggcagaagccatattcaaatctgggtcagctgcccgaggtgtgcaccacacaaaaattgttcgagtgttccaactgcggcaaagcttttcttaagagctccaccctgccaaaccacctgcgcactcacagcgaagaaatcccttttacatgcccaactggtggcaacttcctcgaggagaaatcaattctgggaaacaaaaagttccatactggcgagatccctcacgtgtgcaaagagtgtggtaaggcgtttagccacagcagcaagctgcgtaaacatcagaaattccatactgaggtgaagtattatgagtgcattgcatgcggcaaaacatttaaccacaagctaacttttgtccatcaccaaaggatccatagcggagaaaggccttacgaatgtgacgagtgcgggaaggccttctcgaatcgatcgcacctgatacgccacgaaaaagtccatacgggcgaaaggcctttcgaatgtctgaagtgtggacgcgctttttcacagagcagcaactttctacgccaccagaaagtgcatactcaggtgcgaccttatgagtgctcccaatgtggaaaaagcttcagtaggagttcggccttaatccagcactggagggtacataccggcgagcgaccatatgagtgctctgaatgcgggcgagccttcaataataattcaaacctggcacagcaccaaaaagtgcacaccggagaaagacccttcgaatgcagcgaatgcggaagagattttagccagagcagccatctcttgcgccaccaaaaggttcacaccggggagaggccatttgaatgttgtgattgcggaaaagcattttctaattcaagcacactgatacagcaccaaaaagttcatacagggcagaggccttacgagtgttctgagtgccggaagtcattctcccggtcttctagcctcattcaacactggcggatccatacaggcgaaaaaccctatgaatgtagtgagtgtggcaaggcttttgctcacagttctaccctcatcgagcattggagggtgcacactaaagaacgcccatacgaatgtaatgaatgcggaaagttttttagccagaactccattctgatcaaacatcagaaagtacacactggcgaaaaaccttacaaatgctctgagtgtggtaaattcttcagccgtaaaagttcattgatctgtcactggagggtacatactggggagagaccttatgaatgttccgagtgcggaagagctttttctagtaattcacatcttgtgcgtcaccagagggtccacactcaggaacgtccctatgagtgcatacagtgcgggaaggccttctccgaaagatccacactggtgagacaccagaaagtccacactcgggaacgcacgtatgagtgctcccagtgtgggaagctgttcagccacctgtgtaacctggcacaacataagaagatccatacctag

SEQ ID NO: 138366 - DNA, 3030 bp, Artificial Sequence
  derived and/or modified sequence
gagccaatgaaagctcggaccagtggcaagtccgagctgtcattgagaggcgggacttccggcgccgccattgcggtcctcattttgctgctggtgggttgggctacagcaggcctctggagccacaccagggcacgggagtgggtgcagggaccgtcaccgcgccttcacacgcaccatagtgcccggctaattactctgcttttatgagccaaggtgttcccgaaagtggagccagcgccacgcgtctccagggtctccatacccagccttcgtccctgcggtgcccagaggccttgcgcgcattttgcatttgggaagacaggtcctgagtgcgaccgtcacccagcggaagtgtgagggttcggcccagcggcagggctagccctgggcctcctgttatggccctgcccagcccacaggttctaatggggttgccagcgttgctgatgggcccggcgcagcatacttcttggccctgtggctcagctgtccccacattgaagagcatggtaacctttgaagatgtggctgtatacttctcccaagaggagtgggagctccttgatgcagcccagaggcacctgtaccacagtgtgatgctggaaaaccttgagcttgtgacctcacttggttcttggcatggagtagagggtgagggggcccatcccaagcagaatgtttctgtagaagtgttacaggtcaggatccctaatgcagatccttccaccaagaaagctaactcctgtgacatgtgtgggccattcttgaaagacattttgcacctggctgagcatcagggaacacagtctgaggagaaaccctacacatgtggagcatgtgggagagacttttggttgaatgcaaaccttcaccagcaccagaaggagcacagtggagggaagccctttagatggtacaaggacagggacgcacttatgaagagctctaaagtccacctgtcagagaaccccttcacttgcagggaaggtgggaaggtcatcctgggcagctgtgacctcctccagcttcaagctgttgacagtgggcagaagccatattccaatcttgggcagcttccagaagtctgtaccacacagaaactcttcgagtgcagcaactgtggaaaagccttcctgaagagctccactctccccaaccatctgagaactcactctgaagagataccatttacatgcccaacaggtggaaatttcttagaggagaaatcaatccttggtaataaaaagtttcacactggggaaataccccatgtgtgtaaggagtgtgggaaggcctttagtcactcatctaagctgaggaagcaccagaaatttcacactgaagtaaaatattatgagtgcattgcatgtgggaaaaccttcaaccacaaactcacatttgttcatcatcagagaattcactcaggagaaagaccttatgagtgtgatgaatgtgggaaagccttcagtaacagatcacacctcattcggcatgagaaagttcacactggagaaaggccttttgagtgcctgaaatgtggaagagccttcagccaaagctccaatttccttcggcatcagaaagttcacacacaggtaagaccttatgagtgcagtcaatgtggtaaatccttcagccgaagctctgctctcattcagcactggagagttcacactggagaaagaccgtatgaatgcagtgaatgtggaagagcttttaacaataactccaaccttgctcagcaccagaaagttcacaccggagaacggccttttgagtgcagtgaatgtggaagagacttcagccaaagctcccatctccttcgacatcagaaagttcacactggagaacggccttttgaatgctgtgattgtggtaaagccttcagtaatagctccaccctcatccagcaccagaaagtacatactgggcaaaggccttatgagtgcagcgaatgtaggaaatccttcagccgcagctccagcctgattcagcactggagaattcacactggagaaaagccttacgagtgtagtgagtgtgggaaagcctttgctcacagctccactctcattgaacactggagagttcacacaaaagaaaggccttatgagtgcaatgaatgtgggaaattctttagccaaaactccattctcattaagcatcagaaagttcatactggagaaaagccttataaatgcagtgaatgtgggaaattctttagccgaaaatccagccttatttgtcactggagagttcacactggagaaaggccttacgaatgcagtgaatgtgggagagcctttagcagtaactcccacctggttcgtcatcagagagttcacacacaagaaaggccctatgagtgcatccagtgtggaaaagcctttagtgaaagatctacacttgttcggcaccagaaagttcacaccagagaaaggacttatgagtgtagccagtgtgggaaactcttcagccatctttgtaaccttgcacagcataaaaagattcatacctgagtggagccttatggaagtggtctttgtgagaaaatcttcagccaagtcaaacttcatgcagcagaatccccataccagaaaaattacctacatgtactgctaatgtggaaaagccttcagaagctactctgtttctgaccagcccaggaacctttgcagggccatctcacccatgcagcataaggcagaagccatagtcactttccatcttgcctggatccaaaaatttgcagcagtcctgtcctcatgcatggggaaaacagtaccctgagccttccttcctgtgttctctagggattcaggactgtgctcagctgaaccgatgctggttgaggggccttgagggaaatctaatttgagctcaggaagatgcacattccttgtggatgtggtcaagtctgtgtttaacccctaagatgtgtccattgaggccacaaatcaccctccactggaatcacctaccttgcctgcactaactggtgataataaagaccttattgatcaggtc

SEQ ID NO: 138367 - protein, 563 aa, Artificial Sequence
  derived and/or modified sequence
MMTAESREATGLSPQAAQEKDGIVIVKVEEEDEEDHMWGQDSTLQDTPPPDPEIFRQRFRRFCYQNTFGPREALSRLKELCHQWLRPEINTKEQILELLVLEQFLSILPKELQVWLQEYRPDSGEEAVTLLEDLELDLSGQQVPGQVHGPEMLARGMVPLDPVQESSSFDLHHEATQSHFKHSSRKPRLLQSRALPAAHIPAPPHEGSPRDQAMASALFTADSQAMVKIEDMAVSLILEEWGCQNLARRNLSRDNRQENYGSAFPQGGENRNENEESTSKAETSEDSASRGETTGRSQKEFGEKRDQEGKTGERQQKNPEEKTRKEKRDSGPAIGKDKKTITGERGPREKGKGLGRSFSLSSNFTTPEEVPTGTKSHRCDECGKCFTRSSSLIRHKIIHTGEKPYECSECGKAFSLNSNLVLHQRIHTGEKPHECNECGKAFSHSSNLILHQRIHSGEKPYECNECGKAFSQSSDLTKHQRIHTGEKPYECSECGKAFNRNSYLILHRRIHTREKPYKCTKCGKAFTRSSTLTLHHRIHARERASEYSPASLDAFGAFLKSCV

SEQ ID NO: 138368 - protein, 527 aa, Artificial Sequence
  derived and/or modified sequence
MWGQDSTLQDTPPPDPEIFRQRFRRFCYQNTFGPREALSRLKELCHQWLRPEINTKEQILELLVLEQFLSILPKELQVWLQEYRPDSGEEAVTLLEDLELDLSGQQVPGQVHGPEMLARGMVPLDPVQESSSFDLHHEATQSHFKHSSRKPRLLQSRALPAAHIPAPPHEGSPRDQAMASALFTADSQAMVKIEDMAVSLILEEWGCQNLARRNLSRDNRQENYGSAFPQGGENRNENEESTSKAETSEDSASRGETTGRSQKEFGEKRDQEGKTGERQQKNPEEKTRKEKRDSGPAIGKDKKTITGERGPREKGKGLGRSFSLSSNFTTPEEVPTGTKSHRCDECGKCFTRSSSLIRHKIIHTGEKPYECSECGKAFSLNSNLVLHQRIHTGEKPHECNECGKAFSHSSNLILHQRIHSGEKPYECNECGKAFSQSSDLTKHQRIHTGEKPYECSECGKAFNRNSYLILHRRIHTREKPYKCTKCGKAFTRSSTLTLHHRIHARERASEYSPASLDAFGAFLKSCV

SEQ ID NO: 138369 - protein, 125 aa, Artificial Sequence
  derived and/or modified sequence
MMTAESREATGLSPQAAQEKDGIVIVKVEEEDEEDHMWGQDSTLQDTPPPDPEIFRQRFRRFCYQNTFGPREALSRLKELCHQWLRPEINTKEQILELLVLEQFLSILPKELQVWLQEYRPDSGE

SEQ ID NO: 138370 - protein, 350 aa, Artificial Sequence
  derived and/or modified sequence
MASALFTADSQAMVKIEDMAVSLILEEWGCQNLARRNLSRDNRQENYGSAFPQGGENRNENEESTSKAETSEDSASRGETTGRSQKEFGEKRDQEGKTGERQQKNPEEKTRKEKRDSGPAIGKDKKTITGERGPREKGKGLGRSFSLSSNFTTPEEVPTGTKSHRCDECGKCFTRSSSLIRHKIIHTGEKPYECSECGKAFSLNSNLVLHQRIHTGEKPHECNECGKAFSHSSNLILHQRIHSGEKPYECNECGKAFSQSSDLTKHQRIHTGEKPYECSECGKAFNRNSYLILHRRIHTREKPYKCTKCGKAFTRSSTLTLHHRIHARERASEYSPASLDAFGAFLKSCV

SEQ ID NO: 138371 - DNA, 1692 bp, Artificial Sequence
  derived and/or modified sequence
atgatgaccgccgagagcagagaggccaccggcctgagcccccaggccgcccaggagaaggacggcatcgtgatcgtgaaggtggaggaggaggacgaggaggaccacatgtggggccaggacagcaccctgcaggacacccccccccccgaccccgagatcttcagacagagattcagaagattctgctaccagaacaccttcggccccagagaggccctgagcagactgaaggagctgtgccaccagtggctgagacccgagatcaacaccaaggagcagatcctggagctgctggtgctggagcagttcctgagcatcctgcccaaggagctgcaggtgtggctgcaggagtacagacccgacagcggcgaggaggccgtgaccctgctggaggacctggagctggacctgagcggccagcaggtgcccggccaggtgcacggccccgagatgctggccagaggcatggtgcccctggaccccgtgcaggagagcagcagcttcgacctgcaccacgaggccacccagagccacttcaagcacagcagcagaaagcccagactgctgcagagcagagccctgcccgccgcccacatccccgcccccccccacgagggcagccccagagaccaggccatggccagcgccctgttcaccgccgacagccaggccatggtgaagatcgaggacatggccgtgagcctgatcctggaggagtggggctgccagaacctggccagaagaaacctgagcagagacaacagacaggagaactacggcagcgccttcccccagggcggcgagaacagaaacgagaacgaggagagcaccagcaaggccgagaccagcgaggacagcgccagcagaggcgagaccaccggcagaagccagaaggagttcggcgagaagagagaccaggagggcaagaccggcgagagacagcagaagaaccccgaggagaagaccagaaaggagaagagagacagcggccccgccatcggcaaggacaagaagaccatcaccggcgagagaggccccagagagaagggcaagggcctgggcagaagcttcagcctgagcagcaacttcaccacccccgaggaggtgcccaccggcaccaagagccacagatgcgacgagtgcggcaagtgcttcaccagaagcagcagcctgatcagacacaagatcatccacaccggcgagaagccctacgagtgcagcgagtgcggcaaggccttcagcctgaacagcaacctggtgctgcaccagagaatccacaccggcgagaagccccacgagtgcaacgagtgcggcaaggccttcagccacagcagcaacctgatcctgcaccagagaatccacagcggcgagaagccctacgagtgcaacgagtgcggcaaggccttcagccagagcagcgacctgaccaagcaccagagaatccacaccggcgagaagccctacgagtgcagcgagtgcggcaaggccttcaacagaaacagctacctgatcctgcacagaagaatccacaccagagagaagccctacaagtgcaccaagtgcggcaaggccttcaccagaagcagcaccctgaccctgcaccacagaatccacgccagagagagagccagcgagtacagccccgccagcctggacgccttcggcgccttcctgaagagctgcgtgtag

SEQ ID NO: 138372 - DNA, 1692 bp, Artificial Sequence
  derived and/or modified sequence
atgatgaccgccgagtcaagggaagccaccggactgagccctcaagctgcacaggaaaaagacggtattgtaattgttaaagtcgaagaggaggatgaggaggaccacatgtggggccaagatagtaccttgcaggacacacctcctccagatcccgaaatcttcagacagcggttcaggaggttctgctatcagaatacgtttggaccacgtgaggccctgagtcgactcaaggagctttgccatcagtggctgcgacccgaaattaatactaaagaacagatactggagctgctcgtgctcgagcaatttctctcgatcctccctaaggaactacaggtgtggctgcaggagtaccgccccgactctggggaggaagcggtaacgttgcttgaggatttggaactggatctgtcgggccagcaagttccaggtcaggtgcatggaccggaaatgctggcaaggggaatggtgccccttgatcccgttcaggagagtagctcgtttgacctccatcacgaggcaacacagtcccattttaagcattcctcacggaagccgcgactcctgcagagtagggctctacctgccgctcacatccctgcaccacctcacgaaggctctcccagggaccaagcgatggctagcgctttgttcacagctgacagccaggctatggtcaagatcgaggatatggccgtttcactgattctggaagaatggggatgccaaaacttggccaggcgcaacctgtctcgggataatcgccaggagaactatggatccgcctttccacagggtggcgagaaccggaatgaaaatgaggagtccactagtaaagccgagacgtcagaagatagcgcctctaggggcgaaaccacgggcagatctcagaaagaattcggcgaaaagcgagatcaggaaggaaagacaggtgaacgccagcaaaagaatccagaagagaagacacgaaaggagaaacgagacagcggacccgccataggcaaagataagaaaaccataacaggagaacgggggcctagagagaagggtaaaggtttagggcggagttttagtctctcaagtaacttcaccaccccagaagaagttcctaccggcacaaaatcacacagatgcgacgagtgcggcaagtgcttcacaagatcctcgagtctgattagacacaaaatcatccatacgggcgagaaaccttacgagtgctccgaatgtggaaaggccttttccctgaacagcaatctggtgctccaccaacgcatccatacaggcgagaagccccacgaatgcaacgagtgtgggaaagccttttcccattcctctaatctcattctccatcagcgcatccattccggggagaaaccatacgaatgtaatgagtgcggcaaggcattttcccagtctagcgatcttactaagcatcagaggatacacaccggcgagaagccatacgagtgttctgaatgcgggaaggctttcaacaggaacagctatttaattcttcatcggcgaattcacaccagagaaaagccctacaaatgcacgaaatgtggtaaagcattcacacgctctagtaccctgactcttcaccataggattcatgcgcgggaaagggccagtgagtattcccccgcaagccttgacgccttcggggcctttctgaaaagttgcgtgtag

SEQ ID NO: 138373 - DNA, 1692 bp, Artificial Sequence
  derived and/or modified sequence
atgatgacagctgagagccgggaggccaccggcctgagcccccaggccgcccaggagaaggatggcatcgtgattgtgaaggtggaggaggaggatgaggaggaccacatgtggggccaggacagcaccctgcaggacaccccacctccagaccctgagatcttccggcagcgcttccgccgcttctgctaccagaacaccttcggcccccgggaggccctgagccggctgaaggagctgtgccaccagtggctgcggcctgagatcaacaccaaggagcagatcctggagctgctggtgctggagcagttcctgagcatcctgcccaaggagctgcaggtgtggctgcaggagtacagaccagattctggagaggaggccgtgaccctgctggaggacctggagctggacctgagcggccagcaggtgcccggccaggtgcacggccctgagatgctggcccggggcatggtgcccctggaccctgtgcaggagagcagcagctttgacctgcaccacgaggccacccagagccacttcaagcacagcagcaggaagccccggctgctgcagagccgggccctgcctgctgcccacatcccagcccctcctcatgagggcagcccccgggaccaggccatggccagcgccctcttcaccgctgacagccaggccatggtgaagattgaggacatggctgtgtccctcatcctggaggagtggggctgccagaacctggcccggaggaacctgagccgggacaaccggcaggagaactacggcagcgccttcccccagggcggagaaaatagaaatgaaaatgaggagagcaccagcaaggccgagaccagtgaagattctgccagcagaggagagaccaccggccgcagccagaaggagtttggagagaagagggaccaggagggcaagacaggagagcggcagcagaagaaccctgaggagaagaccaggaaggagaagagggacagcggccctgccatcggcaaggacaagaagaccatcaccggggagcggggcccccgggagaagggcaagggcctgggccgctccttcagcctgagcagcaacttcaccaccccagaggaggtgcccaccggcaccaagagccaccgctgtgatgaatgtgggaagtgcttcaccaggagcagcagcctcatccgccacaagatcatccacactggagagaagccctatgagtgcagtgaatgtgggaaggccttcagcctgaacagcaacctggtgctgcaccagaggatccacactggagagaagccccatgagtgcaatgaatgtgggaaggccttcagccacagcagcaacctgatcctgcaccagaggatccacagcggggagaagccctatgagtgcaatgaatgtgggaaggccttcagccagagcagtgacctgaccaagcaccagaggatccacactggagagaagccctatgagtgcagtgaatgtgggaaggccttcaacagaaacagctacctgatcctgcaccggcgcatccacacccgggagaagccctacaagtgcaccaagtgtgggaaggccttcaccaggagcagcaccctgaccctgcaccaccgcatccacgcccgggagcgggccagcgagtacagccctgccagcctggatgcctttggagccttcctgaagagctgtgtgtag

SEQ ID NO: 138374 - DNA, 1692 bp, Artificial Sequence
  derived and/or modified sequence
atgatgaccgccgagagccgggaggccaccggcctgagcccccaggcggcgcaagaaaaggacgggatcgtaattgtcaaagtcgaagaggaggacgaggaggaccacatgtggggccaagattcaacgctccaggatacaccaccaccagatcccgagatttttcgccagaggtttcggcgattctgctaccagaacacctttggacctagggaggctctctcccgattgaaagaactgtgccaccaatggctgagacccgagatcaacaccaaggagcagattctcgagctcctagtgctcgaacagttcctctccatattacccaaggaactgcaggtctggctccaggagtaccgaccggacagtggcgaggaggcggttacactcctggaggatttagagctagacctgtcaggccagcaggtgcccggccaggttcatggtccagaaatgttggctcgcggtatggttcccctagatcccgtgcaggaaagcagttcctttgaccttcatcacgaggctacccaatctcacttcaagcactctagcaggaaaccacggctgctacaatctcgcgctctgcccgccgcccacattcctgcccccccacacgagggctcccccagggaccaggctatggccagcgccctgtttactgccgacagtcaggcaatggtaaaaattgaggacatggcggtgtccttgatcctcgaggagtggggatgtcagaacctggccaggagaaatctaagcagggataatcggcaggagaattacggaagcgcatttcctcagggaggagaaaatcggaacgaaaatgaggaatctacctctaaggcagagacatcagaagactcagccagccgtggtgaaaccacaggcagatcccagaaagaatttggtgaaaagcgggatcaggaaggaaaaacaggcgaacggcagcagaaaaaccccgaagaaaaaactcggaaagaaaagcgggacagcggacctgctatcggaaaggacaaaaagaccatcaccggcgagcgtggccccagggagaaggggaagggcctagggcgatcatttagtctatcctcaaactttaccacccctgaggaagtacccaccgggacaaagtcccacagatgcgacgaatgcggcaaatgcttcacccgatcaagtagcctcatccggcataaaatcatccatacaggtgagaaaccgtatgagtgctctgaatgcgggaaagcgttcagtctgaatagtaacctggtgctacatcagcggatccacactggagagaagcctcatgaatgcaacgaatgtgggaaggcatttagccactctagtaacctgattctacaccagcgcattcattctggtgagaaaccttacgaatgtaacgaatgtggaaaggcattttcacagagtagtgacttgacaaagcaccagcgaatccacactggggagaagccttacgagtgctcagagtgtgggaaggcctttaaccgcaactcctacttaattctgcaccggcgcatccacacacgcgagaagccatataagtgtacgaaatgtggcaaggcatttacacggagctccacactcacccttcaccacaggatccacgcaagggaacgcgcaagcgaatacagcccagcgtctttagatgcgttcggcgcctttctcaaatcctgcgtctag

SEQ ID NO: 138375 - DNA, 1692 bp, Artificial Sequence
  derived and/or modified sequence
atgatgacagcagagtctcgagaagccaccggactctcccctcaagctgcccaggaaaaagacggcatagtgatcgtgaaggtcgaagaggaggatgaggaggatcacatgtggggccaggattcaactctgcaggatacaccgccaccagacccagaaattttcagacagcggttccgcaggttctgttatcagaacaccttcggccctcgagaggcgcttagccgactgaaggagctgtgccatcagtggctacgcccagagatcaatacaaaggaacaaattttggagctattggtgcttgagcagttcctttccatattgcccaaagaactgcaggtgtggcttcaggaatacagacccgactcaggagaggaggccgtgaccctgctagaagacttagaactcgacctgagcgggcagcaggtacccggacaggtgcatgggccagaaatgcttgcccgtggtatggttcctctcgaccctgttcaggaatcttcttctttcgatctccaccacgaggcaactcagtcacacttcaaacattcctctaggaaaccgcgactgcttcagtctagagccctgcctgccgctcacatccccgcacctccacatgaggggagccccagggatcaagcaatggcctctgccctgttcaccgccgactcacaagccatggtcaagatagaggatatggccgtctcacttattcttgaagagtggggttgccagaacctagccaggcggaacctgtccagagacaatcgccaagaaaattacgggtctgccttcccacaggggggagaaaaccgcaatgaaaatgaagagtctacatccaaagccgaaacatcagaggatagcgcatctagaggagaaaccacagggagatcgcagaaagagttcggagagaaacgcgaccaagaaggaaagacgggcgagcgccagcagaagaaccctgaggaaaagacaaggaaagaaaaacgggattctgggccagcgattggcaaggacaagaagaccattacaggcgaacggggacccagggagaagggaaagggcttaggcagatctttctcactctcatcgaactttactactcctgaggaagtccctaccggcacgaagtcccacagatgcgacgaatgtgggaagtgcttcactcgttccagctctctgattagacataagataatccacacaggggaaaagccgtacgagtgcagcgaatgtggaaaggcattctctctcaattcaaacctggtgctccatcagaggattcacacaggcgagaaaccacatgagtgcaacgaatgtggaaaggcattctctcattcgtcaaatctgattctccaccagcggattcactcaggcgagaaaccatacgagtgtaacgaatgtggaaaagcttttagtcaaagctctgatctgaccaaacaccagcggattcacacaggggagaaaccctatgagtgcagtgagtgcggcaaggccttcaatagaaacagctatctaatattacaccgtcggatccatacacgtgagaaaccttacaaatgtactaagtgtggaaaggcatttacgaggtcttcaactctgaccctgcatcaccgaatacacgccagggagcgcgcaagcgaatactcgcctgcgagcctggatgcattcggggcttttctgaaatcctgtgtctag

SEQ ID NO: 138376 - DNA, 6737 bp, Artificial Sequence
  derived and/or modified sequence
acgcttccggcctttgtgactcattgtgtctgtgtcgaggcgtcgggagggcctaagtccgtgtgcggtgcccttcggccggcctgagccccagagtcagctcccctttctcgcccagcgcccccaggccgctcccggggctcacggaatagtaaagaaacacatcataaaacctcccaggacataaaggtgagcacagaccctgtttggatcaagtcagttcctggagcctgaatgatgactgctgaatcacgggaagccacgggtctgtccccacaggctgcacaggagaaggatggtatcgtaatagtgaaggtggaagaggaagatgaggaagaccacatgtgggggcaggattccaccctacaggacacgcctcctccagacccagagatattccgccaacgcttcaggcgcttctgttaccagaacacttttgggccccgagaggctctcagtcggctgaaggaactttgtcatcagtggctgcggccagaaataaacaccaaggaacagatcctggagcttctggtgctagagcagtttctttccatcctgcccaaggagctccaggtctggctgcaggaataccgccccgatagtggagaggaggccgtgacccttctagaagacttggagcttgatttatcaggacaacaggtcccaggtcaagttcatggacctgagatgctcgcaagggggatggtgcctctggatccagttcaggagtcctcgagctttgaccttcatcacgaggccacccagtcccacttcaaacattcgtctcggaaaccccgcctcttacagtcacgagctcttcctgctgcccacattcctgcaccccctcatgagggtagtcccagagaccaggcgatggcatctgcactattcacagcggattcccaggcaatggtgaagatcgaggacatggctgtgtccctcattctggaggaatggggatgtcagaatctggctcggaggaatctcagtagggacaacaggcaggagaattatgggagcgcatttccccagggtggtgaaaacaggaatgagaacgaggagtcaacctcaaaggctgaaacctcggaagattcagcatcacgcggggagacaacaggaagatcccagaaagagtttggagagaaacgtgaccaggagggcaaaacaggagaaagacagcagaaaaaccctgaggagaaaaccaggaaagagaaaagagattcagggccagctataggaaaggacaaaaaaaccatcacaggagagagaggtccaagggagaaggggaaaggattgggaagaagcttcagtctgagctccaacttcaccacccctgaagaagttcccacgggaacaaagtctcacagatgtgatgaatgtggtaaatgcttcacgagaagttcaagccttatccgccataaaataatccacactggagaaaagccctatgaatgtagtgagtgtgggaaagccttcagtcttaactccaaccttgtcctgcatcagaggatccacacaggagagaaacctcatgaatgtaacgagtgtggcaaggccttcagccacagttccaatctcatcctccatcagcgcatccactctggagagaaaccttatgaatgtaatgagtgcgggaaggccttcagccagagctcggacctcaccaagcatcagagaattcacacgggggagaaaccctatgaatgtagtgaatgtggaaaagctttcaaccgaaactcatacctgattttgcatcggagaattcacactcgagaaaagccctacaagtgcactaagtgtggcaaggccttcacccgcagctccaccctcactctgcatcacagaatccatgccagagagagagcctctgagtacagcccagcctcccttgatgcatttggcgcgttcctgaaaagttgtgtgtaaaggaagaatttgccatcaagccatttcccccttttgtttctaaaattatttcagagatgtgtgctcctggagggaaaaagaaatacagcctcaacagattaaaaaacaaaagtcacacttaaggatccttctagtcacatcagcagtgttctgcctttatgtagtagttgggcatataatccttccacacagcccctgcagggaaaggctaatcttacggataatccacgtgagatttccacacaagagaaaagcacacgcatagtgaaatgtcagtcttttcagtaatgaggatacctttaaggcactcttggactctcggcaaccacaacataatagttgaaagatcaagattggctccacgaaagtgatacggaggttaggatgctacttgctgcaaacaagccctactttggccaacatcctgcttatttctcaaaaaagagggacagtgaaaacaaaaacgacattgggacatgctgctcaaggtagttatatatacgataagttgtatatatgatcactggtagcctaccaaagctgtagaaatctaggactgtgctaatcagtatcaaaccaaagatttctatctcttcccgaaagagagggtatgtgcaccagtctacagttccaaaggactgcaacaaatgtagatggttctgtcctcatccctgagatcagttctactgaaatggcaacaacaactccaaatacatctctcccttcttgaaatccctaaagcactatcgcactcctaaatgcatttctccacaagttagcacttgattgtatactgtcttttaatccttcattgtttcatgtatgaagtttttaatcaccccctaacccccaaaaaagattcggttgtcaagggatatatttctatccctgccagcacagtgctggacatagtgagtactgaacacctaagaggcactcattcagactgacttctacaggacttctacgtgtgtgataaaagcctgtgaatcgtgagtccctgaaatatggtagcctggcccagcttctaaagaggaccttcgtagccacaaggcatgctaaacctctagggtctgatgctgtttttgttccaaatataaacgaaaggcactagtcagccgcctgcatagactttctaaacagtgagtaaataccatggaatgtcagaaatgactttatcatcgtcatcttgaagaaaaatatgaacactgatgaaggtcattttttttttttgacatctttctgtggcaaagctcttagaattctttgcagttagctgctgaacagtatgatgatttggggattttctgaatcatttgtacttagatactggagttcagaagatgtgatttttgttgcttttcagaaaaaggaacgtggtagggagtgttttttcccacgcttttccagtaactttgcaaaagcattaattgttcactggcaattactaaatgtattttgttgctctgagaaactcagcagtgtactgagatgtggctggctgtgccatcgtcatagtgcacagtgacttttctgtttcttatcactaaagactgaggtgaggttatgaaactttcattggtcccatcgttgtgcgcagggtgcaactggctacctagaagctgatggcaggagactgtttcacacacaggagattgtgagctgtgtaagtagtcatcgccactcaagtaggacaagggtcctacccaaggctaggaccgccctgcggaaacagaaacatagactgagaacaaacctcaagactatcagtgtgacctccccataacaagagaaccccatatatagtttgagactttcccttgagaaacttatactaaaactattactcatcagtcattcactgatcagcagctaaagtccatgagaccaaatggttttatatggaaccaacgaagtgggagctaaaactgcacagtggtcattctttggcctctccttggctttatgacttaaaccaactacaacttccctatagcttctaagcagtttcatcagcattacttgggaaaacgtgttgcaagtcaaccagtcactaggatatttctacccatgcaacggaagaaaaacccattactccagaagagtatatctaagtaactaaaatggaggcagaaaatgttttaaggattttcttcaaagaataagccacagcaatggttttgtagaaaactcctgtgcttttgagcaaggacttttgccctctagaaagcaactgaggccaggtgcggtggctcacgcctgtaatcccagcactttgggaggccgaggtgagcggatcacctgaggtcaggagttttgagaccagcctggccaacatggtaaaatcccgtctctactaaaattataaaaattagccgggcatgatggtgggcacctgtaatcccagctacttgggaggctgaggcaggagaatcacttgaacccaggaggcagaggttgcagtgagccaagattgcacactgcactccagcctgggtgactagcaaaactccatctcaaaaaaaaaaaaaagaaagaaagaaactgaaaagtgaggtgtggaactccaggcaacgacccaagcacttattttttaagagggaaaggactttggtcatgtttacattggcctttggtttttttttttctttcagccacaactatatgctgatataactcagccatcacttttgagttttgtttttaaatgaaggttaaatgtgacctgtgccctcacatttaattccgtttcatggagacatcttcctgactttgttggatagctgccactagggttgcttcgatcttcagccacatgctgtccttgaagcagctatttgaagatgtgttttctgaggaaaacaggctacaactgtttattaaaaccacttgcagtgcattcgtttatcagatgctcagtgcaaagtgtaattgggtcatggtcaaaaacgcttgcaacatctaattggcgttcaagatagtcattcaaaagttcttggcccgctgaagtctgttaacagttgaaacattctacagttaaccattagcatgctagttgtcctaatggaaatttttgaagagtttttcaatatataccctacccttgccaggaagagaagtaaaatcctcaggttgtggggtatttgtttctactccagcctggcaggcaaggctaaaacctgagattatcgatctatgagacatcttgatatgtaaagcacttaatattaaaggcataaaagtgaaactgctaaatatgtatagagaggttgacgtgtgatacgtgggacagttcacatagacatcagagaatttattccagaaaggagcctcctgaatgtgatgaatacggcaaagcctttaatcacatctcagcccttagcatcggaaagcttatactgtaaataaacttgatgaatattatatgtgaggaaaactttcatgtatagcactcattgcttcagacagaaaatgaattccgtcggtatgttccaatcgtgatgaatttgagaaacattgcaagagggagctcaatcttggccgggcgccgtggctcacgcctgtaatcgcagcactttgggaggccgaggcaggcggatcacgaggtcagtagttcgagaccagcctggccaacatggtgaaaccttgtctctactaaaaatacaaaaaaaaattagctgggcacagtggcgcacgcctgtagtcccagctactcgggaggctgaggcaggagaatggcttgaacctgcgaggcggaggttgcagtgagctaagatcatgccactggcactccagccttgagtgacagagcgaggctctgtatcaaaaaaaaaagttgcgggggggtgctcaatcttaactgcagaggatctacagatgaaaaaaaatgtggggaaatgctttaaaaaaatagcaaaatgtgcaacttcttacaaaaattgttaacgttaggtacttctatatattttatatgaccataatgtccgtgtgtgttttgtaccttcagtcccttgttattgttccgtatattacctgtaagcagatactgtattttattttagcctatttgacagaacacatcactcagaaaaagtgaagtttcagagcaaacagtgaagaaatcagtgtgattgtagacaaaaagtcggttcacagaacggagcagcggggagaggaagggaaaagcttcatagtttggtgcttatcacatcaagagattggtaaatttctgaggaaagacaggctaatggggcactgaaatggaacaactcctttaaacgtgcagccttttgaatttttcctcaaaaccaagaagttgacctctgagctgtcaggtgaccactgtgtgcaaaggggatggattctcttgtcagtagacggtcttctccatgaagcgagagtaggaagtgtactggaatggccaagtgggactgcttcagctgaccaggttcttttaaaccgtagtcatgctttcccactaactcttaaatccttatgcttagaaaattgaggataaggctgggcacagtggctcaggcctgtaatcccagcactttgggagaccaaggcgggtggatcacaaggtcaggagatcgagaccatcctggctaacatggcgaaaccccgtctctactaaaaatacaaaaaaatagctgggcgtggtggcgggcgcctgtagtcccagctactcaggaggctgaggcaggaggatcacttgaacatgggaggcggaggttgcagtgagccaagatggcgccactgcactccagcctgggtgatggcgtgagactccatgtcaaaaaaaaaaaaaa

SEQ ID NO: 138377 - DNA, 2011 bp, Artificial Sequence
  derived and/or modified sequence
actcattgtgtctgtgtcgaggcgtcgggagggcctaagtccgtgtgcggtgcccttcggccggcctgagccccagagtcagctcccctttctcgcccagcgcccccaggccgctcccggggctcacggagtctctctctgtcacccaggctggagtgcagtggcgcgttctcagctcactgcaccctccacctcccaggttcaagtgattctcctgcctcagcctcccgagtagctgagattacaggaatagtaaagaaacacatcataaaacctcccaggacataaaggctgcacaggagaaggatggtatcgtaatagtgaaggtggaagaggaagatgaggaagaccacatgtgggggcaggattccaccctacaggacacgcctcctccagacccagagatattccgccaacgcttcaggcgcttctgttaccagaacacttttgggccccgagaggctctcagtcggctgaaggaactttgtcatcagtggctgcggccagaaataaacaccaaggaacagatcctggagcttctggtgctagagcagtttctttccatcctgcccaaggagctccaggtctggctgcaggaataccgccccgatagtggagaggaggccgtgacccttctagaagacttggagcttgatttatcaggacaacaggtcccaggtcaagttcatggacctgagatgctcgcaagggggatggtgcctctggatccagttcaggagtcctcgagctttgaccttcatcacgaggccacccagtcccacttcaaacattcgtctcggaaaccccgcctcttacagtcacgagctcttcctgctgcccacattcctgcaccccctcatgagggtagtcccagagaccaggcgatggcatctgcactattcacagcggattcccaggcaatggtgaagatcgaggacatggctgtgtccctcattctggaggaatggggatgtcagaatctggctcggaggaatctcagtagggacaacaggcaggagaattatgggagcgcatttccccagggtggtgaaaacaggaatgagaacgaggagtcaacctcaaaggctgaaacctcggaagattcagcatcacgcggggagacaacaggaagatcccagaaagagtttggagagaaacgtgaccaggagggcaaaacaggagaaagacagcagaaaaaccctgaggagaaaaccaggaaagagaaaagagattcagggccagctataggaaaggacaaaaaaaccatcacaggagagagaggtccaagggagaaggggaaaggattgggaagaagcttcagtctgagctccaacttcaccacccctgaagaagttcccacgggaacaaagtctcacagatgtgatgaatgtggtaaatgcttcacgagaagttcaagccttatccgccataaaataatccacactggagaaaagccctatgaatgtagtgagtgtgggaaagccttcagtcttaactccaaccttgtcctgcatcagaggatccacacaggagagaaacctcatgaatgtaacgagtgtggcaaggccttcagccacagttccaatctcatcctccatcagcgcatccactctggagagaaaccttatgaatgtaatgagtgcgggaaggccttcagccagagctcggacctcaccaagcatcagagaattcacacgggggagaaaccctatgaatgtagtgaatgtggaaaagctttcaaccgaaactcatacctgattttgcatcggagaattcacactcgagaaaagccctacaagtgcactaagtgtggcaaggccttcacccgcagctccaccctcactctgcatcacagaatccatgccagagagagagcctctgagtacagcccagcctcccttgatgcatttggcgcgttcctgaaaagttgtgtgtaaaggaagaatttgccatcaagccatttcccccttttgtttctaaaattatttcagagatgtgtgctcctggaggg

SEQ ID NO: 138378 - protein, 474 aa, Artificial Sequence
  derived and/or modified sequence
MELLTFRDVAIEFSPEEWKCLDPDQQNLYRDVMLENYRNLVSLGVAISNPDLVTCLEQRKEPYNVKIHKIVARPPAMCSHFTQDHWPVQGIEDSFHKLILRRYEKCGHDNLQLRKGCKSLNECKLQKGGYNEFNECLSTTQSKILQCKASVKVVSKFSNSNKRKTRHTGEKHFKECGKSFQKFSHLTQHKVIHAGEKPYTCEECGKAFKWSLIFNEHKRIHTGEKPFTCEECGSIFTTSSHFAKHKIIHTGEKPYKCEECGKAFNRFTTLTKHKRIHAGEKPITCEECRKIFTSSSNFAKHKRIHTGEKPYKCEECGKAFNRSTTLTKHKRIHTGEKPYTCEECGKAFRQSSKLNEHKKVHTGERPYKCDECGKAFGRSRVLNEHKKIHTGEKPYKCEECGKAFRRSTDRSQHKKIHSADKPYKCKECDKAFKQFSLLSQHKKIHTVDKPYKCKDCDKAFKRFSHLNKHKKIHT

SEQ ID NO: 138379 - protein, 201 aa, Artificial Sequence
  derived and/or modified sequence
MELLTFRDVAIEFSPEEWKCLDPDQQNLYRDVMLENYRNLVSLGVAISNPDLVTCLEQRKEPYNVKIHKIVARPPAMCSHFTQDHWPVQGIEDSFHKLILRRYEKCGHDNLQLRKGCKSLNECKLQKGGYNEFNECLSTTQSKILQCKASVKVVSKFSNSNKRKTRHTGEKHFKECGKSFQKFSHLTQHKNSSISMTTSPF

SEQ ID NO: 138380 - DNA, 1643 bp, Artificial Sequence
  derived and/or modified sequence
ggcgcgggtctttgcgtctggctactaccagaccgcgggttaggggcttcatctctctgcgttctcagttgtgggaggccttggtgattcggccacagcctcagcctccgtcgctctgtgacctgcgggtattggatgattggtagctaagactcccgaatacttcagaagtggggaaatggaactcttaacattcagggatgtggccatagaattctctccagaagagtggaaatgcctggaccctgaccagcagaatttgtatagagatgtgatgttggagaactacaggaacctggtctccctgggtgttgctatctctaacccagacctggtcacctgtctggagcaaagaaaagagccctacaatgtgaagatacataagatcgtagccagacccccagctatgtgttctcatttcacccaagaccattggccagtgcagggcatagaagattcattccacaaacttatactgagaagatatgagaaatgtggacatgataatttacaattaagaaaaggctgtaaaagtttgaatgagtgtaagttgcagaaaggaggttataatgaatttaatgaatgcttgtcaactacccagagcaaaatacttcagtgtaaagcaagtgtcaaagttgttagtaaattttcaaattcaaacaaacgtaagacaagacatactggagagaaacactttaaagaatgtggcaaatcatttcagaagttttcacacctaactcaacataaggtaattcatgctggagagaaaccctacacttgtgaagaatgtggcaaagcctttaaatggtctttaatatttaatgaacataagagaattcatactggagagaaaccttttacttgtgaagaatgtggcagcatctttaccacatcctcacactttgctaagcataaaataattcatactggagaaaaaccctataaatgtgaagaatgtggcaaagcctttaataggttcacaacccttactaaacataagagaattcatgctggagagaaacccatcacatgtgaagaatgtaggaaaatctttacctcatcctcaaactttgccaaacataagcgaattcatactggagagaaaccctacaaatgtgaagaatgtggcaaagcctttaataggtccacaacccttactaaacataagagaattcatactggagagaaaccctacacatgtgaagaatgtggcaaagcttttagacagtcctcaaaactgaatgaacataagaaagttcatactggagagcggccctacaaatgtgatgaatgtggcaaagcctttggacggtccagggtcctgaatgaacataaaaaaattcatactggagagaaaccctacaaatgtgaagaatgtggcaaagcctttagacggtccacagatcggagtcaacataagaaaattcatagtgcagataaaccctacaaatgtaaagaatgtgacaaagcctttaaacaattttcgctcctgagtcaacataagaaaattcatactgtagataaaccctacaaatgtaaagattgtgacaaagcctttaaacggttctcacacctgaataaacataagaaaattcatacttgagagaaatcctacaaatgtaaagaatgtggcaaacctttgg

SEQ ID NO: 138381 - DNA, 1425 bp, Artificial Sequence
  derived and/or modified sequence
atggagctgctgaccttcagagacgtggccatcgagttcagccccgaggagtggaagtgcctggaccccgaccagcagaacctgtacagagacgtgatgctggagaactacagaaacctggtgagcctgggcgtggccatcagcaaccccgacctggtgacctgcctggagcagagaaaggagccctacaacgtgaagatccacaagatcgtggccagaccccccgccatgtgcagccacttcacccaggaccactggcccgtgcagggcatcgaggacagcttccacaagctgatcctgagaagatacgagaagtgcggccacgacaacctgcagctgagaaagggctgcaagagcctgaacgagtgcaagctgcagaagggcggctacaacgagttcaacgagtgcctgagcaccacccagagcaagatcctgcagtgcaaggccagcgtgaaggtggtgagcaagttcagcaacagcaacaagagaaagaccagacacaccggcgagaagcacttcaaggagtgcggcaagagcttccagaagttcagccacctgacccagcacaaggtgatccacgccggcgagaagccctacacctgcgaggagtgcggcaaggccttcaagtggagcctgatcttcaacgagcacaagagaatccacaccggcgagaagcccttcacctgcgaggagtgcggcagcatcttcaccaccagcagccacttcgccaagcacaagatcatccacaccggcgagaagccctacaagtgcgaggagtgcggcaaggccttcaacagattcaccaccctgaccaagcacaagagaatccacgccggcgagaagcccatcacctgcgaggagtgcagaaagatcttcaccagcagcagcaacttcgccaagcacaagagaatccacaccggcgagaagccctacaagtgcgaggagtgcggcaaggccttcaacagaagcaccaccctgaccaagcacaagagaatccacaccggcgagaagccctacacctgcgaggagtgcggcaaggccttcagacagagcagcaagctgaacgagcacaagaaggtgcacaccggcgagagaccctacaagtgcgacgagtgcggcaaggccttcggcagaagcagagtgctgaacgagcacaagaagatccacaccggcgagaagccctacaagtgcgaggagtgcggcaaggccttcagaagaagcaccgacagaagccagcacaagaagatccacagcgccgacaagccctacaagtgcaaggagtgcgacaaggccttcaagcagttcagcctgctgagccagcacaagaagatccacaccgtggacaagccctacaagtgcaaggactgcgacaaggccttcaagagattcagccacctgaacaagcacaagaagatccacacctag

SEQ ID NO: 138382 - DNA, 606 bp, Artificial Sequence
  derived and/or modified sequence
atggagctgctgaccttcagagacgtggccatcgagttcagccccgaggagtggaagtgcctggaccccgaccagcagaacctgtacagagacgtgatgctggagaactacagaaacctggtgagcctgggcgtggccatcagcaaccccgacctggtgacctgcctggagcagagaaaggagccctacaacgtgaagatccacaagatcgtggccagaccccccgccatgtgcagccacttcacccaggaccactggcccgtgcagggcatcgaggacagcttccacaagctgatcctgagaagatacgagaagtgcggccacgacaacctgcagctgagaaagggctgcaagagcctgaacgagtgcaagctgcagaagggcggctacaacgagttcaacgagtgcctgagcaccacccagagcaagatcctgcagtgcaaggccagcgtgaaggtggtgagcaagttcagcaacagcaacaagagaaagaccagacacaccggcgagaagcacttcaaggagtgcggcaagagcttccagaagttcagccacctgacccagcacaagaacagcagcatcagcatgaccaccagccccttctag

SEQ ID NO: 138383 - DNA, 1425 bp, Artificial Sequence
  derived and/or modified sequence
atggagctgctcacttttcgggacgtagccattgagttctcacctgaggagtggaagtgcttggatcctgaccagcagaacctctatcgggatgtgatgctggaaaattacaggaatcttgtgtcgcttggagtggccatttcaaaccctgacctggtaacgtgtctggaacagagaaaggagccttataacgttaaaatccacaagatagtggcccgtccaccagcgatgtgttcccacttcacccaggatcactggcctgtgcagggtattgaagactcttttcataaattgattttgaggaggtacgagaaatgtgggcatgataacctccagctccggaaaggctgtaagagccttaatgagtgcaaactacagaagggtgggtataatgagtttaatgagtgcctcagtacgacgcagtccaagatccttcaatgcaaagccagcgtaaaagtggtgtcaaaattttctaactccaacaaacgtaaaacccggcataccggcgaaaagcactttaaagaatgcgggaagagtttccagaagttctcacatcttacgcagcacaaggtgattcatgctggcgaaaagccatatacatgcgaagagtgcggaaaggctttcaagtggtcacttattttcaatgaacacaaaaggatacacacaggcgagaagcctttcacctgtgaggagtgcgggagcatctttaccacttcctcccactttgccaaacataagatcattcataccggtgaaaagccatacaagtgtgaggaatgtggcaaagcattcaatagatttaccacgctcacgaagcacaagcgaatccacgccggcgagaaacctattacctgcgaggaatgtaggaaaattttcacgtcttcaagcaatttcgctaagcataagcgcatacacacgggagagaagccttacaagtgtgaggagtgcggtaaagcgtttaaccgaagcacgacactcacaaaacataaaagaatccacaccggagaaaagccttacacgtgtgaagagtgcgggaaggcctttcgccaaagctcaaaactgaatgagcacaagaaggtccacactggcgagagaccatataagtgcgacgaatgtggaaaggcatttggacgctctcgagtgttaaacgagcacaaaaagatccacactggggaaaagccctacaaatgtgaggagtgtgggaaggcatttagaaggagcactgatagaagtcagcataagaagatccattcagcagataagccatacaagtgcaaggagtgtgataaggctttcaagcaattcagtcttctgagccagcacaagaaaatccacaccgtggataagccgtacaagtgtaaagattgtgacaaggcttttaaaaggttttcccacctgaataaacataaaaagatacatacttag

SEQ ID NO: 138384 - DNA, 606 bp, Artificial Sequence
  derived and/or modified sequence
atggagctgctgacatttcgggacgtggcaatcgagttctctccagaagagtggaagtgtctcgacccagatcaacagaatctttacagagacgtgatgctagagaattaccgcaatttagtcagcctgggtgtagccatctctaacccagatcttgtcacgtgcctagaacaaagaaaggagccctacaatgttaaaatccacaagatcgtggcaagaccaccggcaatgtgtagccacttcacacaggaccactggcctgtacaaggcatcgaggatagctttcataagttgatcctgcggcgatatgagaaatgcggccatgataatctgcagctgcggaaagggtgcaaaagcttaaacgagtgcaagctgcagaagggcggatataacgagtttaacgaatgtctatccaccacccagtccaaaatcctgcagtgcaaggcctctgttaaagtcgtgtcaaaattttctaatagcaataagaggaagacaaggcataccggtgaaaaacactttaaggagtgtgggaagtcatttcaaaaatttagtcatcttacccagcataagaactctagcatctccatgactacctccccattttag

SEQ ID NO: 138385 - DNA, 1425 bp, Artificial Sequence
  derived and/or modified sequence
atggagctgctgaccttcagagatgtggccatcgagttcagccctgaggagtggaagtgcctggaccctgaccagcagaacctgtacagagatgtgatgctggagaactacagaaacctggtgtccctgggcgtggccatcagcaacccagacctggtgacctgcctggagcagaggaaggagccctacaacgtgaagatccacaagatcgtggcccggcccccagccatgtgcagccacttcacccaggaccactggcctgtgcagggcatcgaggacagcttccacaagctgatcctgcggcgctatgaaaaatgtggccatgacaacctgcagctgaggaagggctgcaagagcctgaatgaatgcaagctgcagaagggcggctacaatgagttcaatgaatgtctgagcaccacccagagcaagatcctgcagtgcaaggcctctgtgaaggtggtgtccaagttcagcaacagcaacaagaggaagaccaggcacactggagagaagcacttcaaggaatgtgggaagagcttccagaagttcagccacctgacccagcacaaggtgattcatgctggggagaagccctacacctgtgaagaatgtgggaaggccttcaagtggagcctcatcttcaatgagcacaagaggatccacactggagagaagcccttcacctgtgaagaatgtggcagcatcttcaccaccagcagccactttgccaagcacaagatcatccacactggagagaagccctacaagtgtgaagaatgtgggaaggccttcaaccgcttcaccaccctgaccaagcacaagagaattcatgctggggagaagcccatcacctgtgaagaatgtaggaagatcttcaccagcagcagcaactttgccaagcacaagaggatccacactggagagaagccctacaagtgtgaagaatgtgggaaggccttcaacagaagcaccaccctgaccaagcacaagaggatccacactggagagaagccctacacctgtgaagaatgtgggaaggccttccggcagagcagcaagctgaatgagcacaagaaggtgcacactggagagcggccctacaagtgtgatgaatgtgggaaggccttcggccgcagccgggtgctgaatgagcacaagaagatccacactggagagaagccctacaagtgtgaagaatgtgggaaggccttcagaagaagcacagacaggagccagcacaagaagatccacagcgctgacaagccctacaagtgcaaggaatgtgacaaggccttcaagcagttcagcctgctgagccagcacaagaagatccacacagtggacaagccctacaagtgcaaggactgtgacaaggccttcaagcgcttcagccacctgaacaagcacaagaagatccacacctag

SEQ ID NO: 138386 - DNA, 606 bp, Artificial Sequence
  derived and/or modified sequence
atggagctgctgaccttcagagatgtggccatcgagttcagccctgaggagtggaagtgcctggaccctgaccagcagaacctgtacagagatgtgatgctggagaactacagaaacctggtgtccctgggcgtggccatcagcaacccagacctggtgacctgcctggagcagaggaaggagccctacaacgtgaagatccacaagatcgtggcccggcccccagccatgtgcagccacttcacccaggaccactggcctgtgcagggcatcgaggacagcttccacaagctgatcctgcggcgctatgaaaaatgtggccatgacaacctgcagctgaggaagggctgcaagagcctgaatgaatgcaagctgcagaagggcggctacaatgagttcaatgaatgtctgagcaccacccagagcaagatcctgcagtgcaaggcctctgtgaaggtggtgtccaagttcagcaacagcaacaagaggaagaccaggcacactggagagaagcacttcaaggaatgtgggaagagcttccagaagttcagccacctgacccagcacaagaacagcagcatctccatgaccaccagccccttctag

SEQ ID NO: 138387 - DNA, 1425 bp, Artificial Sequence
  derived and/or modified sequence
atggagctgctgaccttccgggacgtggccatcgagttcagccccgaggagtggaaatgtctggacccagaccagcagaatttataccgagacgtgatgctggagaactataggaatcttgtgtcattgggcgtagctatatcaaaccctgacctggtaacttgccttgaacagcggaaagagccgtacaatgtaaaaattcacaagattgtcgcaaggcccccagcaatgtgttctcactttacccaggatcattggcctgttcagggcattgaggattcctttcacaagctgattttacggcgttatgaaaagtgcggccacgacaacttgcaactgagaaaggggtgcaagtcactcaacgaatgcaagcttcagaagggtgggtacaacgaattcaacgagtgcttgtctaccacccagtcaaagattctgcagtgcaaagcgtccgtaaaagtagtctctaagtttagtaacagcaacaaacgcaaaaccagacatacgggcgagaagcatttcaaggagtgcggcaagagctttcagaagttttctcatctgacccagcataaggtgatccacgcgggagaaaagccatacacttgtgaggagtgtggaaaggccttcaaatggtctcttatctttaacgaacacaagagaattcacactggagagaagcctttcacatgtgaggaatgtgggtcaatttttaccacaagctcccacttcgctaagcataagatcattcatactggagagaaaccgtataagtgtgaagagtgtggtaaggctttcaaccgctttaccacactcacaaagcacaagaggattcacgcgggcgagaagccgatcacttgcgaggagtgcagaaaaattttcacctcctctagcaatttcgccaagcacaagagaatacataccggtgaaaaaccctacaagtgcgaagaatgtgggaaggctttcaatagaagtacaactctcacgaagcacaagaggatccataccggggagaaaccctacacgtgcgaggagtgcggtaaggcattccggcagtcctccaaacttaacgaacataagaaggtgcacaccggagaaagaccatataaatgtgacgaatgtggcaaagctttcggccggtcacgggtgctgaatgagcacaaaaagatccataccggagaaaagccatataaatgtgaggaatgtggtaaagcgttccggagaagcacagatagatctcagcacaagaaaatccacagcgccgacaagccttataaatgcaaggaatgtgacaaggcattcaagcagttcagccttctcagccagcataagaagatccataccgtagataagccatataagtgcaaagattgcgataaggcatttaaacgtttttctcacctcaataagcacaagaagatacacacttag

SEQ ID NO: 138388 - DNA, 606 bp, Artificial Sequence
  derived and/or modified sequence
atggagctgctgaccttccgggacgtggccatcgagttcagccccgaggaatggaaatgcctcgaccccgatcagcaaaatctgtatcgtgacgttatgctggagaactataggaacttggttagtctaggcgtggccattagcaatcccgacttggtaacctgtctcgagcaaaggaaagagccttataacgttaagattcataagatagttgcaaggcccccagctatgtgctcccacttcacgcaggatcactggccagtgcaggggattgaggactcatttcacaagctgatcctccgccgctatgaaaagtgtggacacgacaacctgcagctcagaaagggctgcaaatcgctcaacgagtgcaagctgcagaagggtggatataacgagtttaacgagtgcctctcaaccacacagtcaaaaattctccagtgcaaagcttcagtcaaggtagtgagcaaattctctaactccaataagaggaagacacgacacacgggcgagaaacattttaaggaatgcggcaagtccttccaaaaattctcccacctgacacagcacaaaaatagctcaatctcgatgacaaccagcccattctag

SEQ ID NO: 138389 - DNA, 1425 bp, Artificial Sequence
  derived and/or modified sequence
atggaattgctgacatttcgtgacgtagccatagagtttagtcctgaggagtggaagtgcctggatcctgaccaacagaatctctatcgggacgtgatgctcgaaaactatcgtaatctagttagcctgggcgtggctatcagtaatcctgacttagtaacctgtttggagcagagaaaagaaccatacaacgtcaagatccacaagattgtcgccaggccacctgccatgtgtagccatttcactcaggatcattggccagtccaggggattgaggattcatttcacaagctgatactgcgcagatatgaaaaatgtgggcacgataaccttcagttacgcaaagggtgcaaaagcttgaatgagtgcaaattgcagaagggcggttacaatgaattcaatgagtgtcttagcacaactcagtctaagatcctgcagtgtaaggcctctgtcaaagtggtttctaagttcagcaacagcaacaaacgcaaaacacgacataccggggagaagcacttcaaagaatgcgggaagagcttccagaaatttagccatctgacccagcataaagtcatacacgccggtgaaaaaccttacacctgtgaggagtgtgggaaggcatttaagtggtcgctgatatttaatgaacacaagcgaattcacaccggcgaaaaaccgtttacctgtgaagagtgcgggtcaatattcacgacatcgtctcactttgccaaacacaagataattcacaccggcgaaaagccttataagtgcgaggagtgcggaaaagctttcaatcgcttcactaccctgaccaagcacaagaggatccatgccggtgaaaagcccattacatgtgaagaatgtcggaagatattcacttcgtcctccaactttgccaaacacaagcgcatccataccggcgaaaaaccctataagtgcgaggaatgtggtaaggcctttaatcggagtactacacttactaagcacaaacgcatccatacgggcgaaaagccctacacttgtgaagagtgtggtaaagcgtttagacagagttctaagctgaatgaacacaagaaagtgcacaccggcgaaaggccttacaaatgcgacgagtgcggcaaggctttcgggaggtcccgggtcttaaatgaacataagaaaattcacacaggggaaaagccctacaaatgtgaagagtgcgggaaggccttccgtagaagcacggaccggtcacagcacaagaagattcactcggccgataaaccatataaatgcaaggagtgtgacaaggcctttaaacagttttcacttctctctcagcacaagaaaatacatacagtggataaaccatataagtgcaaagattgcgacaaggcctttaaacgcttctctcatctgaataagcataagaagattcatacatag

SEQ ID NO: 138390 - DNA, 606 bp, Artificial Sequence
  derived and/or modified sequence
atggagctgttaacattccgtgatgtcgctattgagtttagcccggaggagtggaagtgtctggatcccgatcagcagaacttgtatcgcgatgtcatgcttgaaaattaccggaatctggtctccctgggcgtagccatttcaaatccggatttagtaacatgtctggagcagcgtaaggagccctataatgtaaagattcacaagattgtggccagacctccagcgatgtgcagccacttcactcaggatcattggcctgtgcaaggaattgaggacagctttcacaaactcatccttcgccgatacgagaaatgcggtcacgataatctgcagctgcgaaagggctgtaaatccctcaacgagtgtaaactccagaaagggggttacaatgaattcaatgagtgcctgtccaccacgcagagcaaaattctccagtgtaaggccagtgtgaaagtcgtctccaagtttagtaacagcaacaagaggaagactagacacaccggtgaaaagcattttaaagagtgcgggaaatcgtttcaaaagttctcacacctgactcaacacaaaaacagtagcatctccatgacaactagccctttttag

SEQ ID NO: 138391 - DNA, 2970 bp, Artificial Sequence
  derived and/or modified sequence
cagaccgcgggttaggggcttcatctctctgcgttctcagttgtgggaggccttggtgattcggccacagctcagcctccgtcgctctgtgacctgcgggtattggatgattggtagctaagactcccgaatacttcagaagtggggaaatggaactcttaacattcagggatgtggccatagaattctctccagaagagtggaaatgcctggaccctgaccagcagaatttgtatagagatgtgatgttggagaactacaggaacctggtctccctgggtgttgctatctctaacccagacctggtcacctgtctggagcaaagaaaagagccctacaatgtgaagatacataagatcgtagccagacccccagctatgtgttctcatttcacccaagaccattggccagtgcagggcatagaagattcattccacaaacttatactgagaagatatgagaaatgtggacatgataatttacaattaagaaaaggctgtaaaagtttgaatgagtgtaagttgcagaaaggaggttataatgaatttaatgaatgcttgtcaactacccagagcaaaatacttcagtgtaaagcaagtgtcaaagttgttagtaaattttcaaattcaaacaaacgtaagacaagacatactggagagaaacactttaaagaatgtggcaaatcatttcagaagttttcacacctaactcaacataaggtaattcatgctggagagaaaccctacacttgtgaagaatgtggcaaagcctttaaatggtctttaatatttaatgaacataagagaattcatactggagagaaaccttttacttgtgaagaatgtggcagcatctttaccacatcctcacactttgctaagcataaaataattcatactggagaaaaaccctataaatgtgaagaatgtggcaaagcctttaataggttcacaacccttactaaacataagagaattcatgctggagagaaacccatcacatgtgaagaatgtaggaaaatctttacctcatcctcaaactttgccaaacataagcgaattcatactggagagaaaccctacaaatgtgaagaatgtggcaaagcctttaataggtccacaacccttactaaacataagagaattcatactggagagaaaccctacacatgtgaagaatgtggcaaagcttttagacagtcctcaaaactgaatgaacataagaaagttcatactggagagcggccctacaaatgtgatgaatgtggcaaagcctttggacggtccagggtcctgaatgaacataaaaaaattcatactggagagaaaccctacaaatgtgaagaatgtggcaaagcctttagacggtccacagatcggagtcaacataagaaaattcatagtgcagataaaccctacaaatgtaaagaatgtgacaaagcctttaaacaattttcgctcctgagtcaacataagaaaattcatactgtagataaaccctacaaatgtaaagattgtgacaaagcctttaaacggttctcacacctgaataaacataagaaaattcatacttgagagaaatcctacaaatgtaaagaatgtggcaaacctttggatgatccacaaaccttaatgaacatgagaaaatttatactgtagagaaaccctggaaatgtgaagaacgtggcaaagttctttacctcattctcaaaccttgataaacataagagaattcataccggagagaaactgtacaaatgtgaagaatatggcaaagcctgtgaatggtccacaaacctgaatgagcagaagaaaattattactggagataaaccctgcaaatgtaaagagtgtaacaaaacctttaaacagccctcaccggtgaataaacataagaaaaatcatgctggagggaagccctacacatgtggcagaatgtggcaaagcatttaattggtcctcaatgcttaataaatataattcatgctggagagaaacttcacatgtgaaccgtgtggcaaagcctttaaatggtcctcaacccttaatgaacgtaagtgaattcatgctggagcaaaatgcttcacatgcgaagaatgtggcacagtctttaccacatcctcaaactttgttaaacataagagaatttataccagagagaaaccctacacatgtaaagaatgtggcaaagccttcaataggttctcaacccttactgtgcacaagataattcattctggggaaaaaaatgctacaaatgtgaaaaacgtggcagagccttcagaccatccacaaacctttatgaaaattcatatttgagagtagaagattcattccacaaacttacattgagaagatatgaaagatgaatataagaattcatcctagatataaaaccatagaaatgtaaaagatgtgacaaaacctttaagccatactccaggcttcttaaacataatgagaactcatactggaggaaagtcttacaaatgtgaagaatgtggcagtctttaaatcttcctcagtcttttctaatcataagataattcacactgaagagaaactgcaaacgtggaaagtgtgacaaagcttgcaaccacactcaatctattctaaatataagagaaatgatattggtgagaagccacaaaaatatgaaaaatgtggcaaagccttcaaatgcttgtcacatcttactgtatatatataattcctactgaagaaatcccctggaaatgcaaaaaatgtggcaggatttttaccaatgctcatctttttgcacatgatatcctttatattcgagaaaagttatagaaatataaaaaatatagaaaagtcatatctcctcacattttactaactagcaatgttcatacttaataaaaacattataaatgtaatttctgttgaaagacttcagaaaatataggcctttaaagtgaagaagagtattcttaagacaaacaataca

SEQ ID NO: 138392 - DNA, 1611 bp, Artificial Sequence
  derived and/or modified sequence
gcgtctggctactaccagaccgcgggttaggggcttcatctctctgcgttctcagttgtgggaggccttggtgattcggccacagctcagcctccgtcgctctgtgacctgcgggtattggatgattggtagctaagactcccgaatacttcagaagtggggaaatggaactcttaacattcagggatgtggccatagaattctctccagaagagtggaaatgcctggaccctgaccagcagaatttgtatagagatgtgatgttggagaactacaggaacctggtctccctgggtgttgctatctctaacccagacctggtcacctgtctggagcaaagaaaagagccctacaatgtgaagatacataagatcgtagccagacccccagctatgtgttctcatttcacccaagaccattggccagtgcagggcatagaagattcattccacaaacttatactgagaagatatgagaaatgtggacatgataatttacaattaagaaaaggctgtaaaagtttgaatgagtgtaagttgcagaaaggaggttataatgaatttaatgaatgcttgtcaactacccagagcaaaatacttcagtgtaaagcaagtgtcaaagttgttagtaaattttcaaattcaaacaaacgtaagacaagacatactggagagaaacactttaaagaatgtggcaaatcatttcagaagttttcacacctaactcaacataagaattcttccatctctatgacaacaagcccattttagctttctggagaatagcatctgagaaaagccaaagtgcctcagtttacagacagctcactcacagaagcagagccacctaattcaccagcatctaaccactcacacctgaaggagccaaactgagcccagaagaatggcccggctgagcccagcctaaatttctaaccagctcaatcctgagctagtatgtttcgggattgttatgcagttataagttagtaatatatacacccattaaagacaggatctcaggacagattgatcacaaataacctgcaaatgcttgccaccctgtaagtattgattttcttttttcctttatttaaagttagatttgttgtaagatgatattgagttacacagaagttaggcaggagaatagggtttggaggcagggaacttaaggccaattcgtgctgacttcctacaagaaaaaacaccaaggtctgggagcagggaacctaaagccagttaacgtgaacttcctacatctaaaccaaaaggaaagacctcatctacacccgagtagcaaaggatcgaaggcgactgtcgctacaaccctcccccttgtaccagttctctgatagaaaaggacagtgccttggagtggccgtgggccaagcacaggccatgccttcatctgcatagggtaccaattcgcctcaacctttgattagccaaggaccaaatccttcattcagataaggggtagctgataggaacctcaaaaggagtacttaaaacccagaaaacattgtaaccgggtccttgggcggcttgctggggctcacacccaccctgtagagtgctttctcactttaataaaatcttgcttttgcta

SEQ ID NO: 138393 - protein, 638 aa, Artificial Sequence
  derived and/or modified sequence
MLLAQINRDSQGMTEFPGGGMEAQHVTLCLTEAVTVADGDNLENMEGVSLQAVTLADGSTAYIQHNSKDAKLIDGQVIQLEDGSAAYVQHVPIPKSTGDSLRLEDGQAVQLEDGTTAFIHHTSKDSYDQSALQAVQLEDGTTAYIHHAVQVPQSDTILAIQADGTVAGLHTGDATIDPDTISALEQYAAKVSIDGSESVAGTGMIGENEQEKKMQIVLQGHATRVTAKSQQSGEKAFRCEYDGCGKLYTTAHHLKVHERSHTGDRPYQCEHAGCGKAFATGYGLKSHVRTHTGEKPYRCSEDNCTKSFKTSGDLQKHIRTHTGERPFKCPFEGCGRSFTTSNIRKVHVRTHTGERPYYCTEPGCGRAFASATNYKNHVRIHTGEKPYVCTVPGCDKRFTEYSSLYKHHVVHTHSKPYNCNHCGKTYKQISTLAMHKRTAHNDTEPIEEEQEAFFEPPPGQGEDVLKGSQITYVTGVEGDDVVSTQVATVTQSGLSQQVTLISQDGTQHVNISQADMQAIGNTITMVTQDGTPITVPAHDAVISSAGTHSVAMVTAEGTEGEQVAIVAQDLAAFHTASSEMGHQQHSHHLVTTETRPLTLVATSNGTQIAVQLGEQPSLEEAIRIASRIQQGETPGLDD

SEQ ID NO: 138394 - protein, 136 aa, Artificial Sequence
  derived and/or modified sequence
MLLAQINRDSQGMTEFPGGGMEAQHVTLCLTEAVTVADGDNLENMEGVSLQAVTLADGSTAYIQHNSKDAKLIDGQVIQLEDGSAAYVQHVPIPKSTGDSLRLEDGQAVQLEDGTTAFIHHTSKDSYDQSALQAVQ

SEQ ID NO: 138395 - DNA, 1917 bp, Artificial Sequence
  derived and/or modified sequence
atgctgctggcccagatcaacagagacagccagggcatgaccgagttccccggcggcggcatggaggcccagcacgtgaccctgtgcctgaccgaggccgtgaccgtggccgacggcgacaacctggagaacatggagggcgtgagcctgcaggccgtgaccctggccgacggcagcaccgcctacatccagcacaacagcaaggacgccaagctgatcgacggccaggtgatccagctggaggacggcagcgccgcctacgtgcagcacgtgcccatccccaagagcaccggcgacagcctgagactggaggacggccaggccgtgcagctggaggacggcaccaccgccttcatccaccacaccagcaaggacagctacgaccagagcgccctgcaggccgtgcagctggaggacggcaccaccgcctacatccaccacgccgtgcaggtgccccagagcgacaccatcctggccatccaggccgacggcaccgtggccggcctgcacaccggcgacgccaccatcgaccccgacaccatcagcgccctggagcagtacgccgccaaggtgagcatcgacggcagcgagagcgtggccggcaccggcatgatcggcgagaacgagcaggagaagaagatgcagatcgtgctgcagggccacgccaccagagtgaccgccaagagccagcagagcggcgagaaggccttcagatgcgagtacgacggctgcggcaagctgtacaccaccgcccaccacctgaaggtgcacgagagaagccacaccggcgacagaccctaccagtgcgagcacgccggctgcggcaaggccttcgccaccggctacggcctgaagagccacgtgagaacccacaccggcgagaagccctacagatgcagcgaggacaactgcaccaagagcttcaagaccagcggcgacctgcagaagcacatcagaacccacaccggcgagagacccttcaagtgccccttcgagggctgcggcagaagcttcaccaccagcaacatcagaaaggtgcacgtgagaacccacaccggcgagagaccctactactgcaccgagcccggctgcggcagagccttcgccagcgccaccaactacaagaaccacgtgagaatccacaccggcgagaagccctacgtgtgcaccgtgcccggctgcgacaagagattcaccgagtacagcagcctgtacaagcaccacgtggtgcacacccacagcaagccctacaactgcaaccactgcggcaagacctacaagcagatcagcaccctggccatgcacaagagaaccgcccacaacgacaccgagcccatcgaggaggagcaggaggccttcttcgagcccccccccggccagggcgaggacgtgctgaagggcagccagatcacctacgtgaccggcgtggagggcgacgacgtggtgagcacccaggtggccaccgtgacccagagcggcctgagccagcaggtgaccctgatcagccaggacggcacccagcacgtgaacatcagccaggccgacatgcaggccatcggcaacaccatcaccatggtgacccaggacggcacccccatcaccgtgcccgcccacgacgccgtgatcagcagcgccggcacccacagcgtggccatggtgaccgccgagggcaccgagggcgagcaggtggccatcgtggcccaggacctggccgccttccacaccgccagcagcgagatgggccaccagcagcacagccaccacctggtgaccaccgagaccagacccctgaccctggtggccaccagcaacggcacccagatcgccgtgcagctgggcgagcagcccagcctggaggaggccatcagaatcgccagcagaatccagcagggcgagacccccggcctggacgactag

SEQ ID NO: 138396 - DNA, 1917 bp, Artificial Sequence
  derived and/or modified sequence
atgctgctggcccagattaaccgtgactcacagggaatgaccgagttccccggtggcgggatggaagctcagcacgtcacactttgtctcaccgaggctgtcacggtggccgacggcgacaatctcgaaaacatggagggcgtgagcttacaggccgtaacactagcagacggctccactgcatacatccaacacaactcaaaggatgcaaagctgatcgatggccaagtgatacagctggaggatggaagtgcagcatacgtgcagcacgtacccattcccaaaagcactggcgattctcttcggttagaggacgggcaggctgtgcagctggaggatggaactactgcttttattcaccatacgtcaaaagatagctatgatcaatcggcattacaggccgttcagctcgaggacggtactacagcttatatacatcacgctgtacaggttccgcagtctgatacaatccttgctattcaggctgacggaacagtagccggccttcacaccggggacgccacgattgacccggatacaatctcagcactggagcaatatgcagctaaagtttcgatcgatggctcagagtccgtagcaggcaccggaatgataggtgagaacgaacaagagaagaaaatgcaaatagtcctgcagggccacgccacccgcgtgaccgcaaagtcccagcaatccggcgaaaaggctttcaggtgtgaatatgacgggtgcggtaaactgtacaccaccgcccatcacctaaaagtgcatgagcgctcgcacactggggacagaccttatcaatgcgagcatgcaggctgcggaaaagcgttcgccacgggatacggcctcaagagtcacgtgcgaacccacaccggagaaaaaccatacagatgttcggaagataactgtaccaagtcattcaaaacctccggcgaccttcagaaacatattaggacccacacaggagaacgcccgttcaaatgtccttttgaaggatgtggcagaagcttcacaacatctaacataagaaaggtgcacgtccgcacacatactggagagcgtccatactactgtaccgagcccggatgcgggcgcgcgttcgcctctgcaacgaactacaaaaaccacgttcgaattcatacaggcgagaaaccgtatgtctgcacggtgcctggatgcgacaagcgcttcacagaatattccagcttgtataagcaccacgttgttcacacccacagcaaaccgtataattgcaaccactgtggcaaaacttacaaacagatatcaaccctagcaatgcacaaacgcactgcccacaatgatactgagccaatcgaagaggagcaggaggcctttttcgaaccgcctcccggtcaaggcgaggacgttctgaaaggaagccagatcacctatgtcaccggggtggaaggagacgatgtggttagcacacaggtggcgacagtcacccagagtggcctgagccaacaggttacgctcatctcgcaagacggaactcagcacgtaaacatttcccaggccgacatgcaagctattggcaacaccataaccatggtgactcaggatggcacccccatcaccgtccccgcccacgatgctgtcataagtagcgcaggaactcactctgtcgcaatggtgactgcagagggcaccgaaggagaacaggtggccatcgtggcgcaggaccttgccgcatttcacaccgcttcgtccgagatgggtcatcagcagcattcccaccaccttgtgactacagaaaccagacccctgactctcgtggctacaagcaacggcacgcagattgccgtacagctgggggaacagccatcattggaggaagcaatcaggatcgctagccggattcagcagggagaaactccaggcctggatgattag

SEQ ID NO: 138397 - DNA, 1917 bp, Artificial Sequence
  derived and/or modified sequence
atgctgctggcccagatcaacagagacagccagggcatgacagagttccctgggggcggcatggaggcccagcacgtgaccctgtgcctgacagaagctgtgacagtggctgatggagacaacctggagaacatggagggcgtgtccctgcaggccgtgaccctggctgatggcagcacagcctacatccagcacaacagcaaggatgccaagctgattgatggccaggtgatccagctggaggatggcagcgctgcctacgtgcagcacgtgcccatccccaagagcactggagacagcctgcggctggaggatggccaggccgtgcagctggaggatggcaccacagccttcatccaccacaccagcaaggacagctatgaccagagcgccctgcaggccgtgcagctggaggatggcaccacagcctacatccaccacgctgtgcaggtgccccagagcgacaccatcctggccatccaggctgatggcaccgtggccggcctgcacactggagatgccaccatcgaccctgacaccatcagcgccctggagcagtatgctgccaaggtgtccattgatggcagcgagagcgtggccggcaccggcatgattggagaaaatgagcaggagaagaagatgcagatcgtgctgcagggccacgccaccagggtgacagccaagagccagcagagcggggagaaggccttccgctgtgaatatgatggctgtgggaagctgtacaccacagcccaccacctgaaggtgcatgagaggagccacactggagaccggccctaccagtgtgaacatgctggctgtgggaaggcctttgccaccggctacggcctgaagagccacgtgaggacccacactggagagaagccctaccgctgcagcgaggacaactgcaccaagagcttcaagaccagcggggacctgcagaagcacatccgcacccacactggagagcggcccttcaagtgcccctttgagggctgcggccgctccttcaccaccagcaacatcaggaaggtgcacgtgaggacccacactggagagcggccctactactgcacagagcccggctgcggccgggcctttgccagcgccaccaactacaagaaccacgtgcgcatccacactggagagaagccctacgtgtgcaccgtgcccggctgtgacaagcgcttcacagagtacagcagcctgtacaagcaccacgtggtgcacacccacagcaagccctacaactgcaaccactgtgggaagacctacaagcagatcagcaccctggccatgcacaagaggacagcccacaatgacacagagcccatcgaggaggagcaggaggccttctttgagcccccacctggccagggagaagatgtgctgaagggcagccagatcacctacgtgactggagtggagggagatgatgtggtgtccacccaggtggccaccgtgacccagagcggcctgagccagcaggtgaccctcatcagccaggacggcacccagcacgtgaacatcagccaggccgacatgcaggccatcggcaacaccatcaccatggtgacccaggacggcacccccatcaccgtgcctgcccatgatgctgtgatcagcagcgctggcacccacagcgtggccatggtgacagctgagggcacagaaggagagcaggtggccatcgtggcccaggacctggccgccttccacacagccagcagcgagatgggccaccagcagcacagccaccacctggtgaccacagagacccggcccctgaccctggtggccaccagcaatggcacccagattgctgtgcagctgggggagcagcccagcctggaggaggccatccgcatcgccagccgcatccagcagggcgagaccccaggcctggatgactag

SEQ ID NO: 138398 - DNA, 1917 bp, Artificial Sequence
  derived and/or modified sequence
atgctgctggcccagatcaaccgggacagccagggcatgaccgagtttccaggaggggggatggaggcccagcacgtgacgctttgtctaaccgaggccgtgaccgtggccgatggtgataacctcgagaacatggagggagtgtctctacaggctgtaaccctagccgatggaagcacagcctatattcaacacaattccaaagacgctaaactgatcgatggtcaggtgattcagctagaggacgggagcgccgcgtacgtgcagcacgtacccattccaaagtccacgggcgatagcctgcgcctggaagatggacaggccgtccagttagaagatggcacgaccgctttcattcaccatacctcgaaggatagctatgatcagtccgctcttcaggctgtccagcttgaggacggaaccaccgcttatatccatcacgcagtccaggttccgcagagcgatactatactggcaatccaggccgacggcaccgttgctggcctccacacgggagacgcaaccatcgacccggacacgatcagcgcactggaacagtacgcagccaaggtgtcaattgacgggtcggagagtgtagctgggactggcatgattggtgagaacgaacaagagaaaaaaatgcaaatcgtgttacaaggccacgccactagagtgactgctaaatcccagcagtcgggggagaaggcattcaggtgtgagtacgacgggtgtggtaaactctacactacagcccaccacctcaaggtccacgagcggagtcatactggtgaccggccatatcagtgcgaacacgctggctgcggaaaagcgttcgcaaccgggtatgggttgaaatcccacgtacggacacacacaggtgagaagccgtatcggtgctctgaagataactgtactaaaagctttaagacatcgggtgacctccaaaagcacatccgaacccacacaggtgagaggccttttaaatgtcccttcgaaggttgtggacgctcctttaccacatcaaatatacgcaaagtgcacgtccggacccacacaggtgagaggccttattactgcacagaacctggctgcggccgggccttcgcttccgccactaactacaagaatcacgtgaggatacacacgggagaaaagccttatgtgtgtacagttcccgggtgtgataagagattcacagaatattctagcttatacaaacaccacgtggtccacacccactccaagccctataattgcaatcattgtggcaaaacctataaacagatttctacactggcaatgcacaaaaggacagcccataatgacaccgagccaatcgaagaggaacaagaggccttcttcgaaccaccaccaggtcagggcgaggatgtcctgaaagggtctcagattacatacgttactggcgttgagggagacgacgtggtttcaactcaggtcgcaaccgttacgcagtccggcctgagccagcaggtgacactcatctctcaagacggcacccagcatgtcaatatctctcaggccgatatgcaggctatcgggaatacaattacaatggttactcaggacggaaccccgataactgttccggcccatgacgctgtgatctcttctgccggcacacattcggttgccatggtgaccgctgaagggaccgaaggagaacaagtggccattgtggctcaggatctcgccgctttccacactgcaagctctgagatggggcaccagcagcactctcatcacctggtcaccacagaaacaaggcccctgactctggtggctacatccaacggcacccaaattgctgtgcaactgggagagcagccttcactggaagaggccatccgtattgcgtctcgtatccagcaaggtgaaacacctggactcgatgattag

SEQ ID NO: 138399 - DNA, 1917 bp, Artificial Sequence
  derived and/or modified sequence
atgttgcttgctcagattaatcgggactcgcagggaatgaccgagtttcccggaggcggtatggaggcccagcacgtcaccctctgcctgactgaagccgtaactgttgccgacggagataaccttgaaaatatggaaggcgtttctctgcaggccgttactttggcagatggatccacagcctatatccagcataattcaaaggacgccaaactcatcgacggccaggtgattcagctggaggacggtagcgccgcatacgtccaacacgtgcccatccccaagtccactggcgactccctgcggctagaggatgggcaggccgttcaattggaagacggaactacagcgttcatccatcacactagtaaggactcgtacgaccaatccgccctccaggccgtgcaacttgaggacgggactacagcctacattcatcatgccgtgcaggtgccccagtccgataccatcctcgctatccaggcggatggaacagtggcaggactgcatactggcgacgcaacaatcgacccggatactatctccgctcttgaacagtatgcagccaaggtctctatcgacggatctgagtctgtggcgggaactggcatgatcggcgagaatgagcaggaaaagaagatgcagatcgtactccaaggacacgctacgcgcgtcaccgcaaaatcccagcagtccggagagaaagcctttaggtgcgagtacgacgggtgcggaaagctgtacaccactgcccaccatctaaaggtccacgaacgctctcataccggagacaggccatatcaatgtgagcatgccggttgcgggaaggcctttgccacgggctacggcctgaaatctcacgtgagaactcatacgggtgagaaaccctaccgatgctcagaggacaattgtactaagagttttaagacatccggcgacttacagaagcacataagaacccacaccggcgagcggccatttaaatgtccattcgagggttgtggcaggtcattcacaacctccaacatcaggaaggttcatgtaaggacccacacaggtgagcggccttattactgcactgagcctggctgtggcagagcatttgcctccgcaaccaactacaagaaccacgtgcggattcataccggagagaaaccatatgtctgcacagtccccggttgcgacaagaggttcactgaatactcatccctgtacaaacatcacgtcgtccacactcactcaaagccatataactgcaaccattgtggtaaaacgtataaacagatctcaaccttggcaatgcacaagagaacagcccacaatgacacagaacccatcgaagaagagcaggaggcctttttcgaacctccgcctggacagggtgaggacgtacttaagggctctcagataacctatgtgacaggtgtagagggagacgatgtagtgtctactcaggtggcaactgttactcagagcggcctgtctcagcaagtgacactgatttctcaggatggcacacagcatgttaatatttcccaagctgacatgcaggccatcggcaacactatcaccatggtgacacaggatggtacaccgatcacagtccccgcacacgatgcggtgatttcctctgctggaactcacagcgtcgctatggtaacagcagaagggactgagggcgagcaggtcgctatagtcgcccaggatctcgcagcgttccacaccgccagtagtgagatgggtcaccagcagcactctcaccatctggttacgactgagacccgtcctcttacccttgtggccacctcaaatggaacccagatcgcagtccagctgggagaacagcctagtctcgaagaggcaattagaattgcctcccgtatacagcagggggagacacctggcctagatgactag

SEQ ID NO: 138400 - protein, 412 aa, Artificial Sequence
  derived and/or modified sequence
MSLGGSDTMLKGADTSESGAVIRGNYRLGLSKKSSLFSHQKHHVCPECGRGFCQRSDLIKHQRTHTGEKPYLCPECGRRFSQKASLSIHQRKHSGEKPYVCRECGRHFRYTSSLTNHKRIHSGERPFVCQECGRGFRQKIALLLHQRTHLEEKPFVCPECGRGFCQKASLLQHQSSHTGERPFLCLECGRSFRQQSLLLSHQVTHSGEKPYVCAECGHSFRQKVTLIRHQRTHTGEKPYLCPQCGRGFSQKVTLIGHQRTHTGEKPYLCPDCGRGFGQKVTLIRHQRTHTGEKPYLCPKCGRAFGFKSLLTRHQRTHSEEELYVDRVCGQGLGQKSHLISDQRTHSGEKPCICDECGRGFGFKSALIRHQRTHSGEKPYVCRECGRGFSQKSHLHRHRRTKSGHQLLPQEVF

SEQ ID NO: 138401 - DNA, 1667 bp, Artificial Sequence
  derived and/or modified sequence
gaattccagccaagttttccccacctggtgccttttctagctcgcagctcctcagacaatatgcgctaagtggccatcccacacagatcttcccaagctcatctgcaggaggtgacttccaactagaagctccaagatgctctagtgaaaaaggagaaagtggagagacagaaggccccgacagctcattaagaaagaggccaagcagaatttctaggacattcttcagcccacatcaaggtgacccagtagaatgggtagaagggaacagagaaggaggaacagaccttcgcctggcccaaaggatgagtcttggggggtcagacacaatgttgaagggagcagacacttcagaatctggagcagtcatacgtggaaactatagactgggacttagcaaaaagtcaagcctgttcagccaccagaagcatcatgtgtgccctgaatgcgggagaggcttttgccagagatcagaccttatcaagcaccagaggacacacaccggggagaagccatacctgtgtcctgagtgtgggcgtcggtttagccagaaggctccctctcccatacaccagaggaagcactcgggggagaagccgtatgtgtgcagggaatgtgggcgacacttcaggtatacatcctctctcactaatcacaagaggattcactccggggagaggccctttgtatgtcaggagtgtgggcgaggctttcgccagaagatagccctccttctacaccagaggacgcacttggaggagaagcccttcgtgtgtctgagtgtgggagaggctttgcagaaggcatcactcctccagcaccagagctcacacacaggggagaggcccttcctctcccttgagtgtgggcgtacgttcaggcagcagtcactcctccttagtcaccaggtcacacactcaggagagaagccttatgtctgtgctgagtgtgggcacagctttcgccaaaaggtcactctcatcaggcaccagaggacacacacaggggagaagccttacctgtgcccccagtgtgggcggggttttagccagaaggtcaccctcattggacaccagaggacacacacaggggagaagccctacctgtgccctgattgtgggcgtggctttggtcagaatggcaccctcatcagacaccagaggacacacacaggggagaagccttatctgtgccccaagtgtgggcgtgcatttggctttaagtcgctcctcacccgacaccagaggacacactcagaggaggagctttacgtagacagggtgtgtggacaaggacttggccagaagtcacaccttatctctgaccaaaggacacactcaggagagaagccctgcatttgcgatgaatgtgggcgcggctttggctttaagtctgccctcatccgacatcagcggacccattctggggagaagccgtatgtctgcagggagtgtgggcgtggctttagccagaagtctcacttgcatagacacaggaggaccaagtctggtcatcacctcctaccccaagaggtcttctgacctttcctttccccgtgagtgtgaagctggcagaaatcactagtaaatgcttcagtttactgaaatggaatggaaaaaaaaaaaatgttgctttcgtttcatcgatcatagtagtgatttgttctt

SEQ ID NO: 138402 - DNA, 1239 bp, Artificial Sequence
  derived and/or modified sequence
atgagcctgggcggcagcgacaccatgctgaagggcgccgacaccagcgagagcggcgccgtgatcagaggcaactacagactgggcctgagcaagaagagcagcctgttcagccaccagaagcaccacgtgtgccccgagtgcggcagaggcttctgccagagaagcgacctgatcaagcaccagagaacccacaccggcgagaagccctacctgtgccccgagtgcggcagaagattcagccagaaggccagcctgagcatccaccagagaaagcacagcggcgagaagccctacgtgtgcagagagtgcggcagacacttcagatacaccagcagcctgaccaaccacaagagaatccacagcggcgagagacccttcgtgtgccaggagtgcggcagaggcttcagacagaagatcgccctgctgctgcaccagagaacccacctggaggagaagcccttcgtgtgccccgagtgcggcagaggcttctgccagaaggccagcctgctgcagcaccagagcagccacaccggcgagagacccttcctgtgcctggagtgcggcagaagcttcagacagcagagcctgctgctgagccaccaggtgacccacagcggcgagaagccctacgtgtgcgccgagtgcggccacagcttcagacagaaggtgaccctgatcagacaccagagaacccacaccggcgagaagccctacctgtgcccccagtgcggcagaggcttcagccagaaggtgaccctgatcggccaccagagaacccacaccggcgagaagccctacctgtgccccgactgcggcagaggcttcggccagaaggtgaccctgatcagacaccagagaacccacaccggcgagaagccctacctgtgccccaagtgcggcagagccttcggcttcaagagcctgctgaccagacaccagagaacccacagcgaggaggagctgtacgtggacagagtgtgcggccagggcctgggccagaagagccacctgatcagcgaccagagaacccacagcggcgagaagccctgcatctgcgacgagtgcggcagaggcttcggcttcaagagcgccctgatcagacaccagagaacccacagcggcgagaagccctacgtgtgcagagagtgcggcagaggcttcagccagaagagccacctgcacagacacagaagaaccaagagcggccaccagctgctgccccaggaggtgttctag

SEQ ID NO: 138403 - DNA, 1239 bp, Artificial Sequence
  derived and/or modified sequence
atgtcactcggtggctccgataccatgctaaagggggcagacacaagtgagtccggggcagtcatcagaggcaactaccgtttgggcctgagtaaaaagagttctcttttctcccaccagaaacatcacgtatgcccagagtgcgggcggggcttctgccaaagatctgacctgatcaagcaccagcggacccacacaggcgaaaagccttatctatgtcccgagtgcgggagaagattcagccagaaggcaagtttgtcgatccaccagcgtaaacatagcggcgagaagccttacgtttgccgcgagtgcgggcggcactttcgctacacttcttcattaacaaaccacaaacggatccactctggggagcggccttttgtttgccaagagtgcggcagggggttccggcagaagatcgctctcctactccatcagcgaacgcatttagaagaaaagcccttcgtttgccccgaatgtgggcgcggattttgccagaaagcctccctgctgcagcatcagtcaagccacacaggcgagcgaccattcctgtgtctggagtgcggaaggagcttcaggcagcagagcttgttgttgtctcatcaggtgacccattcgggagaaaagccatatgtgtgcgccgaatgcggccactctttcaggcagaaggtgactctcattcggcatcagcgaacccataccggcgagaagccttatctgtgcccccagtgcgggcggggctttagccagaaggtcactttgatcggacatcagagaacacacacaggggaaaaaccatacctctgccctgattgtgggcgaggatttggtcaaaaagtcaccttgattcggcaccaacgcacacacactggcgaaaaaccatacttgtgcccaaagtgtggaagagctttcggattcaaaagcctgctcacccgccaccagaggacccactccgaggaagagctctatgtggaccgcgtgtgcggtcagggcctgggacagaaatcacacctgatatccgatcaaagaactcactctggcgagaagccctgcatttgcgacgaatgcggaagaggctttggtttcaagtcagcattaatccgccatcaacgcacccactccggcgaaaaaccctacgtgtgcagagaatgcggacgcgggttttctcaaaaaagtcaccttcatcgtcacagacgaactaagtccggccatcagttgttgccccaggaggtgttttag

SEQ ID NO: 138404 - DNA, 1239 bp, Artificial Sequence
  derived and/or modified sequence
atgagcctgggcggcagtgacaccatgctgaagggagctgacaccagcgagagcggggccgtcatccggggcaactaccgcctgggcctgagcaagaagagcagcctcttcagccaccagaagcaccacgtgtgcccagaatgtggccggggcttctgccagaggagtgacctgatcaagcaccagaggacccacactggagagaagccctacctgtgcccagaatgtggccgccgcttcagccagaaggccagcctgagcatccaccagaggaagcacagcggggagaagccctacgtgtgcagagaatgtggccgccacttccgctacaccagcagcctgaccaaccacaagaggatccacagcggggagcggccctttgtgtgccaggagtgtggccggggcttccggcagaagatcgccctgctgctgcaccagaggacccacctggaggagaagccctttgtgtgcccagaatgtggccggggcttctgccagaaggccagcctgctgcagcaccagagcagccacactggagagcggcccttcctgtgcctggagtgtggccgctccttccggcagcagagcctgctgctgagccaccaggtgacccacagcggggagaagccctacgtgtgtgctgaatgtggccacagcttccggcagaaggtgaccctcatccgccaccagaggacccacactggagagaagccctacctgtgcccccagtgtggccggggcttcagccagaaggtgaccctgattggccaccagaggacccacactggagagaagccctacctgtgcccagactgtggccggggcttcggccagaaggtgaccctcatccgccaccagaggacccacactggagagaagccctacctgtgccccaagtgtggccgggccttcggcttcaagagcctgctgaccaggcaccagaggacccacagcgaggaggagctgtatgtggacagagtgtgtggccagggcctgggccagaagagccacctgatcagtgaccagaggacccacagcggggagaagccctgcatctgtgatgaatgtggccggggcttcggcttcaagagcgccctgatccgccaccagaggacccacagcggggagaagccctacgtgtgcagagaatgtggccggggcttcagccagaagagccacctgcaccgccacaggaggaccaagagcggccaccagctgctgccccaggaggtgttctag

SEQ ID NO: 138405 - DNA, 1239 bp, Artificial Sequence
  derived and/or modified sequence
atgagcctgggcggcagcgacaccatgctgaagggcgccgacacctccgagtccggggctgtgatcaggggcaactatcgcctgggcctttccaaaaagtcaagcctattcagccaccagaagcatcacgtgtgcccagaatgcggcaggggcttctgtcagcggagtgacttgattaaacaccagcgcacacacacaggcgagaaaccttatttatgccccgagtgtggacgaagattttcccaaaaagcctctctgtcgattcatcagcggaaacacagtggagagaagccatatgtttgccgcgagtgtggcagacatttccgatacacttcatccctgacaaatcacaaacgtatccatagtggggagaggcccttcgtttgccaagagtgcgggagaggcttccgccaaaagattgcgctcctgcttcaccagcggacccacctggaggagaagccctttgtgtgccctgagtgtggacgggggttctgccagaaggcaagcctcctccagcatcaatcatctcacactggcgagcgcccctttctctgccttgagtgcggaagaagcttccgtcagcagtctttgcttcttagtcatcaagtgactcactccggggagaagccctatgtgtgtgctgaatgcggtcactccttccgccagaaagtcacgctgattcgacaccagcgcacgcacaccggagagaagccatacctatgtcctcagtgcggtagaggatttagccaaaaggtgacacttattgggcaccagaggacccatacaggtgagaaaccctatctgtgccctgattgtggcagaggatttgggcagaaggtaactcttatccggcaccaacgaacccacaccggcgagaagccatacctatgtcccaagtgcggacgggcattcggctttaaatcccttctcacgcggcaccaaaggactcactcggaggaggaactgtacgtagaccgggtgtgtggccaaggcctcgggcagaaaagccacctcatatcagatcagcgtacacattctggagagaagccctgtatctgcgatgaatgtggacgaggatttggtttcaaaagtgcgctgatccgccaccaacgcactcactccggcgaaaaaccgtatgtgtgtagggagtgtggcaggggcttttcacagaagtctcaccttcacagacaccgcaggacaaagtccgggcaccaactgctcccccaggaagttttctag

SEQ ID NO: 138406 - DNA, 1239 bp, Artificial Sequence
  derived and/or modified sequence
atgtcacttgggggttctgataccatgctgaaaggcgctgacactagtgaaagtggcgcagtcatcaggggaaattatcgactcggattaagtaagaagagctccctgttctcgcatcaaaagcaccacgtttgtcccgagtgcggcaggggattttgccagagatcggatttgatcaaacaccagagaacacacacaggcgagaagccctatctttgcccagagtgcgggaggcgattctctcagaaagcttccctgtcaatccaccagaggaagcacagcggggaaaagccttatgtgtgtcgtgaatgcggtcggcacttcagatatacaagctccctcaccaaccacaagcgcatccatagcggagaacgacctttcgtctgccaggagtgtgggagaggcttcaggcaaaaaatcgcgctccttctgcaccaaagaacccatttggaggagaaaccttttgtgtgtcctgagtgcggaaggggcttctgccaaaaggccagcctcctgcagcatcagagcagccacactggtgaacggcctttcctgtgtttggagtgcggcaggtcttttcgacagcagagcttgctcttgtctcaccaggtcacccattcaggagaaaagccgtatgtgtgcgccgaatgcgggcattcttttaggcagaaggtgacactcatccgccaccagcggacacatacgggagagaagccctacctgtgcccccagtgcggcagaggtttctctcagaaggtaactctaatcggacaccagagaacacatacaggcgaaaaaccatatctatgcccggattgcggcagaggttttggccaaaaagtcaccctgatcagacaccagcgcacgcatactggggagaaaccttatctctgtcctaaatgcggtcgcgcttttggattcaaatctttgctaacacggcaccaacgcacccacagcgaagaggaactctatgtggacagagtttgtggacaggggttggggcaaaaatcccacctgattagtgatcagaggacccacagcggagaaaagccatgtatttgcgacgaatgcggtcggggatttggttttaaatcggcactcatcaggcaccagcgaacacacagtggtgagaaaccatatgtctgcagagaatgcggacggggattctctcagaaatcccaccttcacagacatagaaggactaagtccggtcatcagctcttgccccaagaagtcttctag

SEQ ID NO: 138407 - DNA, 2319 bp, Artificial Sequence
  derived and/or modified sequence
gatttgcctctgcaacttgactctcctctaggaagagtactccagagagcagggatatgtcaccaggactcctgacaaccaggaaggaggcattgatggccttccgggatgtggctgtggccttcacccagaaggagtggaagctattgagttctgctcagaggaccctgtacagggaggtgatgctggagaactacagccatctggtctccctgggaattgcattttccaaaccaaaactcatcgaacagctggagcaaggcgacgaaccttggagagaggagaacgaacatcttctggacctttgtccagctcagacaccaagttcttggctcttgcataaacagcaggccgaacaaatgtttctcaggcaaggtttaataggcttgagctggagcaaaagcaagggagcggcgcccaagaaaggaagataaatgtgtaactctacttgcagcaatttatagagctgaagctgcctgtgatgcttttttgaaccttttagtttggctgataggactagtttgtagtgtgggttttctgtgctgcaatagagcatgtaatgtgcccttgtgggttggaagataagtctttgttgtgaacatctgaagaaaactgctgggcaggtattacaatccatggtcacctgtggtgattctgaccaagactttctctctagcagagcctagaacagaattccagccaagttttccccacctggtggccttttctagctcgcagctcctcagacaatatgcgctaagtggccatcccacacagatcttcccaagctcatctgcaggaggtgacttccaactagaagctccaagatgctctagtgaaaaaggagaaagtggagagacagaaggccccgacagctcattaagaaagaggccaagcagaatttctaggacattcttcagcccacatcaaggtgacccagtagaatgggtagaagggaacagagaaggaggaacagaccttcgcctggcccaaaggatgagtcttggggggtcagacacaatgttgaagggagcagacacttcagaatctggagcagtcatacgtggaaactatagactgggacttagcaaaaagtcaagcctgttcagccaccagaagcatcatgtgtgccctgaatgcgggagaggcttttgccagagatcagaccttatcaagcaccagaggacacacaccggggagaagccatacctgtgtcctgagtgtgggcgtcggtttagccagaaggcctccctctccatacaccagaggaagcactcgggggagaagccgtatgtgtgcagggaatgtgggcgacacttcaggtatacatcctctctcactaatcacaagaggattcactccggggagaggccctttgtatgtcaggagtgtgggcgaggctttcgccagaagatagccctccttctacaccagaggacgcacttggaggagaagcccttcgtgtgtcctgagtgtgggagaggcttttgccagaaggcatcactcctccagcaccagagctcacacacaggggagaggcccttcctgtgccttgagtgtgggcgtagcttcaggcagcagtcactcctccttagtcaccaggtcacacactcaggagagaagccttatgtctgtgctgagtgtgggcacagctttcgccaaaaggtcactctcatcaggcaccagaggacacacacaggggagaagccttacctgtgcccccagtgtgggcggggttttagccagaaggtcaccctcattggacaccagaggacacacacaggggagaagccctacctgtgccctgattgtgggcgtggctttggtcagaaggtcaccctcatcagacaccagaggacacacacaggggagaagccttatctgtgccccaagtgtgggcgtgcatttggctttaagtcgctcctcacccgacaccagaggacacactcagaggaggagctttacgtagacagggtgtgtggacaaggacttggccagaagtcacaccttatctctgaccaaaggacacactcaggagagaagccctgcatttgcgatgaatgtgggcgcggctttggctttaagtctgccctcatccgacatcagcggacccattctggggagaagccgtatgtctgcagggagtgtgggcgtggctttagccagaagtctcacttgcatagacacaggaggaccaagtctggtcatcagctcctaccccaagaggtcttctgacctttcctttccccgtgagtgtgaagctggcagaaatcactagtaaatgcttcagtttcctgaaatggaatggaaaaaaaaaaa

SEQ ID NO: 138408 - protein, 321 aa, Artificial Sequence
  derived and/or modified sequence
MAAGWLTTWSQNSVTFQEVAVDFSQEEWALLDPAQKNLYKDVMLENFRNLASVGYQLCRHSLISKVDQEQLKTDERGILQGDCADWETQLKPKDTIAMQNIPGGKTSNGINTNCVRTHSGEMPYECSDCGKAFIFQSSLKKHMRSHTGEKPYECDHCGKSFSQSSHLNVHKRTHTGEKPYDCKECGKAFTVPSSLQKHVRTHTGEKPYECSDCGKAFIDQSSLKKHTRSHTGEKPYECNQCGKSFSTGSYLIVHKRTHTGEKTYECKECGKAFRNSSCLRVHVRTHTGEKPYKCIQCEKAFSTSTNLIMHKRIHNGQKLHE

SEQ ID NO: 138409 - DNA, 348 bp, Artificial Sequence
  derived and/or modified sequence
acatatcacatgtgccaatttcattgcaggtatgtaaataatcatagtggagagaaactctatgaatgtaatgaacgttctaaagccttttcatgtcccagtcatctccaatgtcataaaagaagacaaattggagagaaaacacatgaacataaccaatgtggtaaagcctttccaacacccagtcatcttcaatatcatgaaagaacccatactggagagaaaccttatgaatgtcatcaatgtggtcaagcctttaaaaaatgcagtcttctccaacgtcataaaagaacacatactggagagaaaccatatgaatgtaatcaatgtggtaaagcctttgcacaa

SEQ ID NO: 138410 - DNA, 2274 bp, Artificial Sequence
  derived and/or modified sequence
cgccatctcccatagctgtcgcctgcagctgagaaagggttgctgtcccagcaggccaggtccagggctgggtataagtaagcaagaagagggcctgggagaagagtctgacgagcaaggggaaggtagccaaggatggagtgaaatacagggtgacctgtgtttttcccctggctgctttggaaattatgggaaaaaatcaaataccaaggaagaaaaatctataatgaaattagatgtggatttctttttatgtattcagcttgggggcttatgatacttctagtacccaaagagatgcggtcttgctgtgttgcctaggctggtctcaaactcctgctctcaagtgatcctcctgcctcagcctcctgagtacatttatatttaaagtaattattgatggctctgcctgcttaggactctgcccagccaggaaggaaacctacaggaggaagaatggctgcagggtggctgacaacctggtcacagaactcagtaaccttccaggaagtggcagtggacttttcccaggaggagtgggcattgctggaccctgctcaaaaaaatctatacaaagatgtgatgctggagaactttaggaacctggcctcagtagggtatcagctctgcagacacagtctgatctccaaggtggatcaagaacagctgaagacagatgaaagaggaattttacaaggtgactgtgcagactgggaaactcaacttaaaccaaaagatacaattgctatgcagaacattcctgggggaaaaacatccaatggcataaacacgaactgtgtcagaactcactctggagagatgccctatgaatgcagtgactgtgggaaagccttcatttttcagtcttcccttaagaaacacatgagatctcatactggagagaagccttatgagtgtgatcactgtggaaaatcctttagccagagctctcatctgaatgtgcacaaaagaactcacactggagagaaaccctatgactgtaaggaatgtgggaaggctttcactgttccttcatcccttcagaaacatgtgagaacccacactggagagaaaccctatgaatgcagtgactgtggaaaagccttcatcgatcagtcatcccttaagaaacacacacgctctcacactggagagaagccttatgagtgtaaccagtgtggaaagtccttcagcacaggctcttaccttattgtgcacaagagaactcacactggtgagaaaacctatgagtgtaaagaatgtgggaaggcctttaggaattcctcttgcctgagggtacacgtgagaactcacactggagagaagccttataaatgtattcagtgtgaaaaagcctttagcacaagcactaaccttataatgcacaagcgaatccacaatggccagaaactccatgaatgaaatgactcagggaagtgtttgttgcccctcatgcctcctttctcactttagaacatatattggagagaagccctgttatggtcacctggaaacagccttctggcccaactctggatgcctgttatactgggacaaaccttataaatgttatagctatgattgtttttatcagtgagtatttcattcttatatgtgtcacaactgtagatcctatgaatattttagttatcttttcagtttaattgcattgtgaacagaacacatggtcttcaatatgtagattctgtgtgacatagatttgaacataattgctggacactgactgatgtactgtggcagacagaactagttgctgtctcaatatccattcctcccttctttcttaaagtaataaaatttaccatttagttcaagctggcaatgtggacagttttcacccagcttcccttacagctgtgagcggccaaatatgttcacatccctagcccatgcaaagtaggcagaagtcactggatacagctgctaaggaagctcatggaaatgggaatatctcatctggtgtttttttcttaactatttgccctttgtcttgtcccttatttcctagaaaatatatacaccaagaggaggacagagaaaggatactaaatgaaacaacaggggagatacaatattatctggttgcactaatcctgtgctgcttatctctggatttcatgttacatgagaaaaattaactgccatgtggtttaaaccactcttgtgggaagttcctctttcagctgatttcagtcccaactgttacatctaataaatggtcaagttttaggaatcgttcaaaaaaaaaaaaaa

SEQ ID NO: 138411 - DNA, 966 bp, Artificial Sequence
  derived and/or modified sequence
atggccgccggctggctgaccacctggagccagaacagcgtgaccttccaggaggtggccgtggacttcagccaggaggagtgggccctgctggaccccgcccagaagaacctgtacaaggacgtgatgctggagaacttcagaaacctggccagcgtgggctaccagctgtgcagacacagcctgatcagcaaggtggaccaggagcagctgaagaccgacgagagaggcatcctgcagggcgactgcgccgactgggagacccagctgaagcccaaggacaccatcgccatgcagaacatccccggcggcaagaccagcaacggcatcaacaccaactgcgtgagaacccacagcggcgagatgccctacgagtgcagcgactgcggcaaggccttcatcttccagagcagcctgaagaagcacatgagaagccacaccggcgagaagccctacgagtgcgaccactgcggcaagagcttcagccagagcagccacctgaacgtgcacaagagaacccacaccggcgagaagccctacgactgcaaggagtgcggcaaggccttcaccgtgcccagcagcctgcagaagcacgtgagaacccacaccggcgagaagccctacgagtgcagcgactgcggcaaggccttcatcgaccagagcagcctgaagaagcacaccagaagccacaccggcgagaagccctacgagtgcaaccagtgcggcaagagcttcagcaccggcagctacctgatcgtgcacaagagaacccacaccggcgagaagacctacgagtgcaaggagtgcggcaaggccttcagaaacagcagctgcctgagagtgcacgtgagaacccacaccggcgagaagccctacaagtgcatccagtgcgagaaggccttcagcaccagcaccaacctgatcatgcacaagagaatccacaacggccagaagctgcacgagtag

SEQ ID NO: 138412 - DNA, 966 bp, Artificial Sequence
  derived and/or modified sequence
atggcagcagggtggctgaccacttggtcgcagaatagcgtgactttccaggaggttgccgtcgatttctcccaggaggaatgggcactcctcgatcccgctcagaagaacctctacaaggatgtcatgctggagaactttcgcaatctcgcttccgtggggtaccagttatgcagacacagcttaatctcaaaggttgatcaggagcagttaaaaaccgatgagagaggaattctacagggagactgcgctgattgggagacccagctgaagccgaaggataccattgcgatgcagaacattcctggtggcaagacttccaatggtataaacaccaactgtgtgaggactcatagcggagaaatgccctacgaatgctcagactgcgggaaagcattcatcttccaatcgtcactcaagaaacacatgagatctcatacaggggagaagccttacgagtgtgaccattgtggaaagagcttcagccaaagctcccatctcaacgtccataaacggacccacaccggggagaagccctatgattgtaaagagtgcggaaaagcttttactgtcccgagcagtctccagaaacatgtgagaactcatactggcgaaaaaccttatgagtgctccgattgtggcaaggctttcatagatcagtcttcactgaagaaacatactagatcccatacgggggagaaaccgtacgagtgcaaccagtgtggcaagagctttagcacaggctcatacctgatcgttcataaacgaacacacactggcgagaaaacgtacgagtgcaaagaatgcgggaaagctttcagaaattccagctgcctgcgtgttcacgtgaggacccacacaggtgaaaagccctacaagtgtatacagtgtgagaaagcgttcagtaccagtaccaatctgattatgcataaacggatccacaacgggcagaagctccatgagtag

SEQ ID NO: 138413 - DNA, 966 bp, Artificial Sequence
  derived and/or modified sequence
atggcagcaggatggctaacaacctggagccagaattcagtaaccttccaagaggtggccgttgacttctctcaggaggagtgggctctgctggaccctgcccaaaagaacctctacaaggacgtcatgctcgagaacttcagaaatctggcttctgttgggtatcagttgtgtcggcacagtctcattagcaaagtggatcaagagcaactgaaaacagatgagcggggaatacttcaaggcgactgcgccgattgggagacccaacttaagcctaaggacacaatcgcaatgcagaacatccccggcggtaaaacctcgaacggcataaataccaattgcgtgaggacacattctggggaaatgccctacgaatgtagcgactgcggaaaagcttttattttccagtcctctctgaaaaaacacatgcgatctcacacgggggagaagccgtatgaatgcgaccactgtggtaaaagctttagtcagtcaagccatcttaacgtacacaaacgaacccacacaggcgagaaaccatacgattgcaaagagtgtggcaaggctttcaccgtacccagctctttacagaaacatgtgagaacacatacaggagaaaagccctatgagtgtagcgactgtggaaaggctttcattgaccagtcaagcttgaagaagcacacgagatcccataccggtgagaaaccctatgaatgtaatcagtgtggtaaaagcttctctacggggtcttatctgatcgtacacaagaggacccacacaggggaaaagacttacgagtgcaaggaatgtggcaaagctttccgcaatagttcctgcctgcgcgtgcacgtccggacccacacgggcgaaaagccttataagtgcatacagtgcgaaaaagctttcagtacaagcacgaacttaatcatgcataaaaggattcataatggccaaaaactgcacgagtag

SEQ ID NO: 138414 - DNA, 966 bp, Artificial Sequence
  derived and/or modified sequence
atggctgctggctggctgaccacctggagccagaacagcgtgaccttccaggaggtggccgtggacttcagccaggaggagtgggccctgctggaccctgcccagaagaacctgtacaaggatgtgatgctggagaacttcaggaacctggcctctgtgggctaccagctgtgccgccacagcctcatcagcaaggtggaccaggagcagctgaagacagatgagcggggcatcctgcagggcgactgtgccgactgggagacccagctgaagcccaaggacaccatcgccatgcagaacatccctgggggcaagaccagcaatggcatcaacaccaactgtgtgaggacccacagcggggagatgccctatgaatgtagtgactgtgggaaggccttcatcttccagagcagcctgaagaagcacatgaggagccacactggagagaagccctatgaatgtgaccactgcggcaagagcttcagccagagcagccacctgaatgtgcacaagaggacccacactggagagaagccctatgactgcaaggaatgtgggaaggccttcaccgtgcccagcagcctgcagaagcacgtgaggacccacactggagagaagccctatgaatgtagtgactgtgggaaggccttcatcgaccagagcagcctgaagaagcacaccaggagccacactggagagaagccctatgagtgcaaccagtgtgggaagagcttcagcacaggcagctacctgattgtgcacaagaggacccacactggagagaagacctatgagtgcaaggaatgtgggaaggccttcaggaacagcagctgcctgcgggtgcacgtgaggacccacactggagagaagccctacaagtgcatccagtgtgagaaggccttcagcaccagcaccaacctgatcatgcacaagaggatccacaacggccagaagctgcacgagtag

SEQ ID NO: 138415 - DNA, 966 bp, Artificial Sequence
  derived and/or modified sequence
atggccgccggctggctgaccacctggagccagaacagcgtgacctttcaggaagtggccgtggactttagccaggaagaatgggcactgctcgatccagcccagaagaatctctataaggatgtgatgctcgaaaacttccgtaacctcgcgagcgtgggttaccagttatgcaggcacagccttatcagcaaggtggaccaagagcagctgaagactgacgagaggggaattctccagggagactgcgctgattgggagacacaactcaaacccaaagatacaatcgccatgcagaatatacctggcgggaagacttctaacgggatcaacactaattgcgttcggacgcacagtggcgagatgccttacgaatgctctgactgtgggaaagcctttatctttcagtcatcccttaagaagcatatgagaagccacaccggggaaaagccttatgagtgcgatcactgtggcaaaagcttctcccaatcctcccatctaaacgtccacaagaggacgcataccggcgaaaaaccatatgattgtaaagagtgcggaaaagctttcaccgtcccctctagcctgcaaaaacacgtgcgtacccacaccggcgaaaagccttacgagtgctcggattgtgggaaggcatttattgaccagagctccctgaagaagcatacacgatcccacactggggagaaaccctatgaatgcaaccagtgcggcaagtccttctctacaggcagctacctgattgttcacaagcgtacacataccggagaaaagacatatgagtgcaaagagtgcggaaaagcgttcagaaacagttcctgccttcgggtccatgtgcggacacatacaggtgaaaagccgtacaagtgcatccagtgcgaaaaagccttcagcacatcaactaatctgattatgcacaagcgaatccacaatggacagaagctccacgaatag

SEQ ID NO: 138416 - DNA, 966 bp, Artificial Sequence
  derived and/or modified sequence
atggccgccggctggctgaccacctggagccagaacagcgtgacctttcaggaggtggccgtcgatttcagtcaggaggagtgggccctgctcgacccagctcagaagaatctctataaagacgtcatgctcgagaacttcaggaacctggcttccgttgggtaccagttatgccgccatagtttgatttccaaggtagatcaagagcaactaaagaccgatgaacgaggtattctccagggggattgcgccgattgggagacacagctgaaacctaaggatacgatagcgatgcagaatatccctggcggaaagaccagcaatgggatcaacacaaattgcgtgagaacccactcaggcgaaatgccttacgagtgctccgactgcgggaaggccttcattttccaaagcagcctaaagaaacacatgcggtctcatacaggcgagaagccatacgagtgtgatcactgtggcaagtccttctctcagtccagccatctcaatgtccataagcgcacacacacaggtgagaaaccatatgattgcaaggagtgtggcaaggccttcaccgtcccatccagtcttcagaagcacgtgcgcactcataccggtgagaagccatacgagtgcagtgactgcggtaaggcatttattgatcagtcttctctgaagaaacacactcgcagtcatacgggggaaaagccttacgagtgtaaccagtgcgggaagtctttctccaccggtagttatctgatcgtacacaagcggactcacacgggagagaaaacctacgagtgtaaggaatgtgggaaggctttcagaaattcctcctgtctccgcgttcatgtaagaacgcacacaggagagaaaccatacaagtgtatccagtgcgagaaggcctttagtacatcaacaaacctgatcatgcataagcggattcacaacgggcagaagttacatgaatag

SEQ ID NO: 138417 - DNA, 966 bp, Artificial Sequence
  derived and/or modified sequence
atggcagccggatggctgactacttggtcccaaaattctgtgacttttcaagaagtcgccgtggacttcagtcaggaggaatgggccttactggacccagcccagaagaatctttataaggatgttatgcttgaaaactttcgcaacctggcatccgttgggtaccagctctgcaggcattcgctcatcagcaaagttgatcaagaacagctgaagactgacgagcggggaatcctgcagggagactgtgcagactgggagacacagttgaagcctaaagacacaattgccatgcaaaatatccctggaggaaaaacttcgaacggcataaacactaactgtgtgcggactcatagcggtgagatgccatatgaatgctccgactgcggcaaagccttcatttttcagagttctctgaagaagcacatgcgaagccatactggcgagaaaccttatgagtgcgatcactgcgggaagtcattttcccaaagctcacacttgaatgtccacaagaggacacacaccggagagaagccctatgactgtaaggagtgtgggaaggcattcaccgtgccttcatctctgcaaaagcacgtaaggacccacacaggggagaaaccctacgagtgcagcgattgcggtaaagcattcatagatcaatctagccttaaaaagcacacgcggtcccataccggggaaaaaccgtatgagtgtaaccagtgtggaaagtctttctcaacaggaagctacttaattgtacacaagcggactcatactggagagaagacctatgaatgtaaagagtgcggtaaagcctttaggaattccagctgtctccgggtgcacgtgaggacgcacaccggagaaaagccttataagtgtatccaatgcgaaaaagcattctcaaccagtacaaatctcatcatgcacaagcgcatccacaacggccaaaaactgcacgagtag

SEQ ID NO: 138418 - DNA, 966 bp, Artificial Sequence
  derived and/or modified sequence
atggccgctggctggctcacaacttggtcgcaaaattccgtaaccttccaagaagttgccgtagatttcagccaggaagagtgggcactcctggacccagcccagaaaaatctttacaaggacgtgatgctcgaaaactttagaaatctggctagtgtggggtatcaattgtgccgacattctctcatctccaaggttgatcaagagcagctgaaaaccgacgaaaggggaatcctgcagggggactgtgccgattgggaaacccagctcaagccgaaggatacgatagcaatgcaaaatattcccggaggaaagaccagcaacggcatcaataccaattgcgtgcggactcacagtggtgagatgccttatgaatgcagtgattgtggtaaagccttcatctttcagtcgtcattaaagaagcatatgaggagccacaccggcgaaaagccttatgaatgtgaccattgcgggaaaagcttcagtcaatccagccatctgaatgttcataaacgtacacatactggagagaagccatacgattgtaaggagtgcggcaaggcttttacagtgccatcttctctgcagaaacacgtgcgaactcacacaggagagaagccctacgagtgctccgactgtggaaaggcctttattgaccagtcctcgctgaaaaagcatactcgcagccacaccggggagaaaccctacgagtgcaatcagtgcgggaagtcattctctacggggtcttatcttatcgtgcacaagaggacccatactggcgaaaaaacatatgagtgtaaggagtgtggcaaggcattcaggaattcgtcctgtctcagggtacatgtacgcactcacactggcgagaagccttataaatgcatccagtgtgagaaggcattttctacatccacaaatctgatcatgcataagcgtatacacaacgggcaaaaattgcacgaatag

SEQ ID NO: 138419 - DNA, 2260 bp, Artificial Sequence
  derived and/or modified sequence
cgccatctcccatagctgtcgcctgcagctgagaaagggttgctgtcccagcaggccaggtccagggctgggtataagtaagcaagaagagggcctgggagaagagtctgacgagcaaggggaaggtagccaaggatggagtgaaatacagggtgacctgtgtttttcccctggctgctttggaaattatgggaaaaaatcaaataccaaggaagaaaaatctataatgaaattagatgtggatttctttttatgtattcagcttgggggcttatgatacttctagtacccaaagagatgcggtcttgctgtgttgcctaggctggtctcaaactcctgctctcaagtgatcctcctgcctcagcctcctgagtacatttatatttaaagtaattattgatggctctgcctgcttaggactctgcccagccaggaaggaaacctacaggaggaagaatggctgcagggtggctgacaacctggtcacagaactcagtaaccttccaggaagtggcagtggacttttcccaggaggagtgggcattgctggaccctgctcaaaaaaatctatacaaagatgtgatgctggagaactttaggaacctggcctcagtagggtatcagctctgcagacacagtctgatctccaaggtggatcaagaacagctgaagacagatgaaagaggaattttacaaggtgactgtgcagactgggaaactcaacttaaaccaaaagatacaattgctatgcagaacattcctgggggaaaaacatccaatggcataaacacgaactgtgtcagaactcactctggagagatgccctatgaatgcagtgactgtgggaaagccttcatttttcagtcttcccttaagaaacacatgagatctcatactggagagaagccttatgagtgtgatcactgtggaaaatcctttagccagagctctcatctgaatgtgcacaaaagaactcacactggagagaaaccctatgactgtaaggaatgtgggaaggctttcactgttccttcatcccttcagaaacatgtgagaacccacactggagagaaaccctatgaatgcagtgactgtggaaaagccttcatcgatcagtcatcccttaagaaacacacacgctctcacactggagagaagccttatgagtgtaaccagtgtggaaagtccttcagcacaggctcttaccttattgtgcacaagagaactcacactggtgagaaaacctatgagtgtaaagaatgtgggaaggcctttaggaattcctcttgcctgagggtacacgtgagaactcacactggagagaagccttataaatgtattcagtgtgaaaaagcctttagcacaagcactaaccttataatgcacaagcgaatccacaatggccagaaactccatgaatgaaatgactcagggaagtgtttgttgcccctcatgcctcctttctcactttagaacatatattggagagaagccctgttatggtcacctggaaacagccttctggcccaactctggatgcctgttatactgggacaaaccttataaatgttatagctatgattgtttttatcagtgagtatttcattcttatatgtgtcacaactgtagatcctatgaatattttagttatcttttcagtttaattgcattgtgaacagaacacatggtcttcaatatgtagattctgtgtgacatagatttgaacataattgctggacactgactgatgtactgtggcagacagaactagttgctgtctcaatatccattcctcccttctttcttaaagtaataaaatttaccatttagttcaagctggcaatgtggacagttttcacccagcttcccttacagctgtgagcggccaaatatgttcacatccctagcccatgcaaagtaggcagaagtcactggatacagctgctaaggaagctcatggaaatgggaatatctcatctggtgtttttttcttaactatttgccctttgtcttgtcccttatttcctagaaaatatatacaccaagaggaggacagagaaaggatactaaatgaaacaacaggggagatacaatattatctggttgcactaatcctgtgctgcttatctctggatttcatgttacatgagaaaaattaactgccatgtggtttaaaccactcttgtgggaagttcctctttcagctgatttcagtcccaactgttacatctaataaatggtcaagttttaggaatcgttc

SEQ ID NO: 138420 - DNA, 2429 bp, Artificial Sequence
  derived and/or modified sequence
atttcgagcatcttgtgggctctcccaagtcgcggcccctcctctgagagccacagtcaggaacagcatctctgccttcctgttcacggtgaccttcgcttggtgtcctcctggcctcagcaacctgacaattctgtcgtgtcccgatcatctttctcaagatgttttctgtcttcatgagtcaaaatttgaagaggaaaggatggtggctgggtggttgacaaattactctcagttgctttgattagaaagtttggctttgctgagatacgtagttggaaaagagagaagcattttcagtttcttcagtgtactagatggctgactgggaagattccagggtcccaacaggcttcagagttgcgaaggctctagagggctgggtataagtaagcaagaagagggcctgggagaagagtctgacgagcaaggggaaggtagccaaggatggagtgaaatacaggagatgcggtcttgctgtgttgcctaggctggtctcaaactcctgctctcaagtgatcctcctgcctcagcctcctgagtacatttatatttaaagtaattattgatggctctgcctgcttaggactctgcccagccaggaaggaaacctacaggaggaagaatggctgcagggtggctgacaacctggtcacagaactcagtaaccttccaggaagtggcagtggacttttcccaggaggagtgggcattgctggaccctgctcaaaaaaatctatacaaagatgtgatgctggagaactttaggaacctggcctcagtagggtatcagctctgcagacacagtctgatctccaaggtggatcaagaacagctgaagacagatgaaagaggaattttacaaggtgactgtgcagactgggaaactcaacttaaaccaaaagatacaattgctatgcagaacattcctgggggaaaaacatccaatggcataaacacgaactgtgtcagaactcactctggagagatgccctatgaatgcagtgactgtgggaaagccttcatttttcagtcttcccttaagaaacacatgagatctcatactggagagaagccttatgagtgtgatcactgtggaaaatcctttagccagagctctcatctgaatgtgcacaaaagaactcacactggagagaaaccctatgactgtaaggaatgtgggaaggctttcactgttccttcatcccttcagaaacatgtgagaacccacactggagagaaaccctatgaatgcagtgactgtggaaaagccttcatcgatcagtcatcccttaagaaacacacacgctctcacactggagagaagccttatgagtgtaaccagtgtggaaagtccttcagcacaggctcttaccttattgtgcacaagagaactcacactggtgagaaaacctatgagtgtaaagaatgtgggaaggcctttaggaattcctcttgcctgagggtacacgtgagaactcacactggagagaagccttataaatgtattcagtgtgaaaaagcctttagcacaagcactaaccttataatgcacaagcgaatccacaatggccagaaactccatgaatgaaatgactcagggaagtgtttgttgcccctcatgcctcctttctcactttagaacatatattggagagaagccctgttatggtcacctggaaacagccttctggcccaactctggatgcctgttatactgggacaaaccttataaatgttatagctatgattgtttttatcagtgagtatttcattcttatatgtgtcacaactgtagatcctatgaatattttagttatcttttcagtttaattgcattgtgaacagaacacatggtcttcaatatgtagattctgtgtgacatagatttgaacataattgctggacactgactgatgtactgtggcagacagaactagttgctgtctcaatatccattcctcccttctttcttaaagtaataaaatttaccatttagttcaagctggcaatgtggacagttttcacccagcttcccttacagctgtgagcggccaaatatgttcacatccctagcccatgcaaagtaggcagaagtcactggatacagctgctaaggaagctcatggaaatgggaatatctcatctggtgtttttttcttaactatttgccctttgtcttgtcccttatttcctagaaaatatatacaccaagaggaggacagagaaaggatactaaatgaaacaacaggggagatacaatattatctggttgcactaatcctgtgctgcttatctctggatttcatgttacatgagaaaaattaactgccatgtggtttaaaccactcttgtgggaagttcctctttcagctgatttcagtcccaactgttacatctaataaatggtcaagttttaggaatcgttc

SEQ ID NO: 138421 - protein, 584 aa, Artificial Sequence
  derived and/or modified sequence
MMENYGNLVSLDVLNRDKDEEPTVKQEIEEIEEEVEPQGVIVTRIKSEIDQDPMGRETFELVGRLDKQRGIFLWEIPRESLTQEQRMFRENTNIIRKRPNSEEKCHKCEECGKGFVRKAHFIQHQRVHTGEKPFQCNECGKSFSRSSFVIEHQRIHTGERPYECNYCGKTFSVSSTLIRHQRIHTGERPYQCNQCKQSFSQRRSLVKHQRIHTGEKPHKCSDCGKAFSWKSHLIEHQRTHTGEKPYHCTKCKKSFSRNSLLVEHQRIHTGERPHKCGECGKAFRLSTYLIQHQKIHTGEKPFLCIECGKSFSRSSFLIEHQRIHTGERPYQCKECGKSFSQLCNLTRHQRIHTGDKPHKCEECGKAFSRSSGLIQHQRIHTREKTYPYNETKESFDPNCSLVIQQEVYPKEKSYKCDECGKTFSVSAHLVQHQRIHTGEKPYLCTVCGKSFSRSSFLIEHQRIHTGERPYLCRQCGKSFSQLCNLIRHQGVHTGNKPHKCDECGKAFSRNSGLIQHQRIHTGEKPYKCEKCDKSFSQQRSLVNHQKIHAEVKTQETHECDACGEAFNCRISLIQHQKLHTAWMQ

SEQ ID NO: 138422 - protein, 626 aa, Artificial Sequence
  derived and/or modified sequence
MASPSPPPESKGLLTFEDVAVFFTQEEWDYLDPAQRSLYKDVMMENYGNLVSLDVLNRDKDEEPTVKQEIEEIEEEVEPQGVIVTRIKSEIDQDPMGRETFELVGRLDKQRGIFLWEIPRESLTQEQRMFRENTNIIRKRPNSEEKCHKCEECGKGFVRKAHFIQHQRVHTGEKPFQCNECGKSFSRSSFVIEHQRIHTGERPYECNYCGKTFSVSSTLIRHQRIHTGERPYQCNQCKQSFSQRRSLVKHQRIHTGEKPHKCSDCGKAFSWKSHLIEHQRTHTGEKPYHCTKCKKSFSRNSLLVEHQRIHTGERPHKCGECGKAFRLSTYLIQHQKIHTGEKPFLCIECGKSFSRSSFLIEHQRIHTGERPYQCKECGKSFSQLCNLTRHQRIHTGDKPHKCEECGKAFSRSSGLIQHQRIHTREKTYPYNETKESFDPNCSLVIQQEVYPKEKSYKCDECGKTFSVSAHLVQHQRIHTGEKPYLCTVCGKSFSRSSFLIEHQRIHTGERPYLCRQCGKSFSQLCNLIRHQGVHTGNKPHKCDECGKAFSRNSGLIQHQRIHTGEKPYKCEKCDKSFSQQRSLVNHQKIHAEVKTQETHECDACGEAFNCRISLIQHQKLHTAWMQ

SEQ ID NO: 138423 - DNA, 3186 bp, Artificial Sequence
  derived and/or modified sequence
ggaactggcagcggggaggaggctctagcgaggcctgaaaggctgcgtaaccaggcaggagtaggggttggggttcggggttgggggacagccagggatcgcgtctgatatgctgttggggtcgtgaccgtctgggggccgaggcaggcactggccagacccagccagggatcctcgtattcgtcgagcctaatttccagcagccgggtaggcctcaccagaggctcctttccgtgaggccgcccccaattcctgcccctattctctgcctgggagatggcttccccgagccccccgccggagtcgaaggggttgctgacatttgaggatgtggctgtgttttttacccaggaggagtgggattatctggacccagctcagagaagcctgtataaagatgtcatgatggagaattatggaaacctggtctcactggatgttttgaacagagataaggatgaggagccaactgtaaaacaagagattgaagaaattgaggaagaagtggaaccacagggtgtaatagttacaagaatcaaaagtgaaattgaccaggatcctatgggtagagaaacatttgaacttgttggtaggttagataaacaaagagggatcttcctatgggaaataccaagggaatctttgacccaggaacagagaatgttcagagaaaacactaacattatccgtaaaagaccaaactcagaagagaaatgccataaatgtgaagaatgtggaaagggttttgtccgcaaggcccatttcattcaacatcaaagggtccatactggtgagaaaccttttcagtgcaatgaatgtgggaaaagttttagtcgcagttcatttgttattgaacatcagagaattcacactggggaaaggccctatgagtgtaattactgtggaaaaacctttagtgtgagctcaacccttattagacatcagagaatccacactggagaaagaccctatcagtgtaatcagtgtaaacagagcttcagccagagaaggagccttgttaaacatcaaaggattcatacaggtgagaaaccccataaatgtagtgactgtgggaaagccttcagttggaaatcacaccttattgagcatcaaagaactcacactggtgagaaaccttatcactgtaccaaatgtaagaagagctttagtcgaaattcattgcttgttgagcatcaaagaattcacactggggaaagaccccataaatgtggtgaatgtgggaaagcctttcgattaagcacataccttatacaacaccaaaaaattcacactggcgagaagccttttctttgtattgagtgtggaaaaagtttcagtcggagctcattccttattgaacatcagaggatccatactggtgaaagaccttatcagtgcaaagagtgtgggaaaagtttcagtcagctttgcaaccttactcgtcatcagagaattcacacaggagacaagccccataaatgtgaggaatgtggaaaagcctttagtagaagctcaggtcttattcagcatcagagaattcacaccagggagaagacttatccatacaatgaaactaaggaaagttttgatccaaattgcagtcttgttatacagcaggaagtctaccctaaggagaaatcttataaatgtgatgaatgtgggaaaacttttagtgttagtgctcatcttgtacaacatcaaagaatccacactggtgaaaagccctatctatgtactgtctgtgggaaaagcttcagccggagctcatttcttattgaacatcagagaatccacactggtgagagaccctatctgtgcagacagtgtggaaaaagctttagtcagctttgtaatcttattcgacatcagggtgttcacacaggtaataaaccccataaatgtgatgaatgtggaaaggcctttagccggaactcgggtcttattcagcatcagagaatacacacaggagagaaaccttataagtgtgagaagtgcgacaaaagtttcagtcaacagcgcagtcttgtcaaccatcagaagatccatgcagaggtgaaaacccaagaaacccatgaatgtgacgcttgtggtgaagcctttaattgccgtatttctcttattcagcatcagaaattgcacacagcatggatgcaataaatgtagagcaatacataagctcaatttgatttgagactagtacccaagtgcagttttagtatggctcaacatgggtcagatttagtgataaagcaaattctccttggcctcaggcaaatagtttctaaagattctgtgaatagtggacaactgcccatgagcatttgacttcccttactctttgatgatcgtagagaaagacttggtaatttatctaagtatctttaataaatctttcagcagagagattaaacctaggttcagagcatgggtgctctgagggacaaagttggattagtataagggagctggagcagctgatagtggaaaacagaataatgattcaaagagtcttctgtcaccatgtcatattgtggttctttcagttccatgatatgtttggctctgcatgccaaagtccagtgattaagcatatataagttgtcaaggaaacaaagcccaaatgtttttaaaacaagtatacagtttttgtcattgtttaagaaagccagttgtttggcatgtgagttaaaggcagttccaatgcctgatggttcccagatctatgaaatgagtggaccattaaccttacatgtaaagattatgttagtaattaagaaacctaacaaaggtgttaccaaggaacctttgggagtgccttttttgtttttcaagatggacccaaaaaagtggaggaagatattgttcttttgtgccctcctacctgtgagagatatttgtagtcctatgtgaatgagcttatccctccacaaccaggtgcatatgaaagtgtacatattatgactgccaagtattggaaatgaaaagacctggagtctatgctaggaagctgagatattttggtattgcattggtttttatggtaactaggttttgcatgcaattaaaaatccttatttcttgttctagggcttcccttagttaatggttattataaacctattaattcatctgttttaaccattaaaacctgttttgtttttagctttgaaaaaaaaaaaaaaaaaa

SEQ ID NO: 138424 - DNA, 1881 bp, Artificial Sequence
  derived and/or modified sequence
atggccagccccagccccccccccgagagcaagggcctgctgaccttcgaggacgtggccgtgttcttcacccaggaggagtgggactacctggaccccgcccagagaagcctgtacaaggacgtgatgatggagaactacggcaacctggtgagcctggacgtgctgaacagagacaaggacgaggagcccaccgtgaagcaggagatcgaggagatcgaggaggaggtggagccccagggcgtgatcgtgaccagaatcaagagcgagatcgaccaggaccccatgggcagagagaccttcgagctggtgggcagactggacaagcagagaggcatcttcctgtgggagatccccagagagagcctgacccaggagcagagaatgttcagagagaacaccaacatcatcagaaagagacccaacagcgaggagaagtgccacaagtgcgaggagtgcggcaagggcttcgtgagaaaggcccacttcatccagcaccagagagtgcacaccggcgagaagcccttccagtgcaacgagtgcggcaagagcttcagcagaagcagcttcgtgatcgagcaccagagaatccacaccggcgagagaccctacgagtgcaactactgcggcaagaccttcagcgtgagcagcaccctgatcagacaccagagaatccacaccggcgagagaccctaccagtgcaaccagtgcaagcagagcttcagccagagaagaagcctggtgaagcaccagagaatccacaccggcgagaagccccacaagtgcagcgactgcggcaaggccttcagctggaagagccacctgatcgagcaccagagaacccacaccggcgagaagccctaccactgcaccaagtgcaagaagagcttcagcagaaacagcctgctggtggagcaccagagaatccacaccggcgagagaccccacaagtgcggcgagtgcggcaaggccttcagactgagcacctacctgatccagcaccagaagatccacaccggcgagaagcccttcctgtgcatcgagtgcggcaagagcttcagcagaagcagcttcctgatcgagcaccagagaatccacaccggcgagagaccctaccagtgcaaggagtgcggcaagagcttcagccagctgtgcaacctgaccagacaccagagaatccacaccggcgacaagccccacaagtgcgaggagtgcggcaaggccttcagcagaagcagcggcctgatccagcaccagagaatccacaccagagagaagacctacccctacaacgagaccaaggagagcttcgaccccaactgcagcctggtgatccagcaggaggtgtaccccaaggagaagagctacaagtgcgacgagtgcggcaagaccttcagcgtgagcgcccacctggtgcagcaccagagaatccacaccggcgagaagccctacctgtgcaccgtgtgcggcaagagcttcagcagaagcagcttcctgatcgagcaccagagaatccacaccggcgagagaccctacctgtgcagacagtgcggcaagagcttcagccagctgtgcaacctgatcagacaccagggcgtgcacaccggcaacaagccccacaagtgcgacgagtgcggcaaggccttcagcagaaacagcggcctgatccagcaccagagaatccacaccggcgagaagccctacaagtgcgagaagtgcgacaagagcttcagccagcagagaagcctggtgaaccaccagaagatccacgccgaggtgaagacccaggagacccacgagtgcgacgcctgcggcgaggccttcaactgcagaatcagcctgatccagcaccagaagctgcacaccgcctggatgcagtag

SEQ ID NO: 138425 - DNA, 1881 bp, Artificial Sequence
  derived and/or modified sequence
atggccagtccttcccccccccctgaaagcaagggcttactgactttcgaagacgtggcagtgttttttactcaagaagaatgggactatcttgaccccgcacagcggtccttgtataaggacgtgatgatggagaactacggaaatctcgtgagtctggacgtcctaaatcgcgacaaggacgaggagcctacagtcaagcaggaaatcgaggagattgaagaggaggtagaaccccaaggagtcattgtcacaagaatcaagtccgagatagaccaggaccctatgggtcgggagactttcgagttggttgggaggctggacaaacagcggggcatttttctgtgggagatccccagggagtcgcttacccaggagcagagaatgttcagggagaacacaaatataatacggaaacgccctaatagtgaagaaaaatgccacaaatgtgaggagtgcggtaaaggcttcgtgagaaaagcacacttcattcagcatcagcgcgttcatacgggcgagaaacctttccaatgtaacgagtgcggtaagtcattctcccgttcttccttcgtcatcgaacaccaacgaatccacaccggtgaacgtccctatgagtgtaactactgcgggaagaccttctccgtgtcgagcacactcatcaggcaccaacggatccacaccggagagaggccataccaatgcaatcagtgtaagcagtccttttcccagcgtcggtcactcgtaaaacaccagcgaatacacacaggtgagaagcctcataagtgctccgactgtggcaaggcgttttcatggaagagccacctgattgaacaccaacggacccatacgggagagaaaccgtaccattgcaccaaatgcaagaagagctttagcaggaattccttactggttgaacaccagcgcatccacactggggagcgaccccataagtgtggggagtgtggaaaggccttccggttatctacatacctgatccagcatcagaaaatccacaccggcgaaaaacccttcctatgtatcgaatgcgggaagagcttcagcaggtccagttttctgatagagcatcagaggatccacactggtgaaaggccctaccagtgcaaagagtgcggaaaatccttctcccaattgtgcaacctcacacgccaccaaaggatccatactggggacaagccccacaagtgcgaagagtgcgggaaagcctttagccgcagcagcgggctgattcagcatcaaagaatccatacaagagagaaaacgtatccttataatgaaactaaagaaagctttgacccaaattgttctctcgtgatccagcaggaggtgtaccctaaggagaagagttataagtgcgacgaatgcgggaagacctttagcgttagtgcccacctcgttcaacatcagaggatacataccggcgagaagccctacctgtgtactgtctgtggcaagtctttttctagatcctctttcctcatagagcaccagcgaatacatactggcgagcgcccatacctttgcaggcagtgcggcaaatccttttcccagttatgcaacctcataaggcatcaaggtgtgcacaccggcaacaagccacacaagtgcgatgagtgcgggaaagctttctcacggaacagtggactgatacagcaccagagaatccatacaggcgaaaagccctataaatgcgaaaaatgcgataaatccttcagccagcagagaagtttggtcaaccatcagaagatccatgccgaggtcaagacacaagagacacacgagtgtgatgcgtgtggggaagccttcaattgtaggatctccttgattcagcatcagaagcttcacactgcgtggatgcaatag

SEQ ID NO: 138426 - DNA, 1881 bp, Artificial Sequence
  derived and/or modified sequence
atggccagccccagccccccacctgagagcaagggcctgctgacctttgaagatgtggccgtgttcttcacccaggaggagtgggactacctggaccctgcccagaggagcctgtacaaggatgtgatgatggagaactacggcaacctggtgtccctggatgtgctgaacagagacaaggatgaggagcccaccgtgaagcaggagattgaggagattgaggaggaggtggagccccagggcgtgattgtgacccgcatcaagtcagaaattgaccaggaccccatgggccgggagacctttgagctggtgggccgcctggacaagcagaggggcatcttcctgtgggagatcccccgggagagcctgacccaggagcagaggatgttccgggagaacaccaacatcatcaggaagaggcccaacagcgaggagaagtgccacaagtgtgaggagtgtgggaaaggatttgtgaggaaggcccacttcatccagcaccagagggtgcacactggagagaagcccttccagtgcaatgaatgtgggaagagcttcagccgcagcagctttgtgattgagcaccagaggatccacactggagagcggccctatgagtgcaactactgcggcaagaccttctctgtgagcagcaccctcatccgccaccagaggatccacactggagagcggccctaccagtgcaaccagtgcaagcagagcttcagccagaggaggagcctggtgaagcaccagaggatccacactggagagaagccccacaagtgcagcgactgtgggaaggccttctcctggaagagccacctgattgagcaccagaggacccacactggagagaagccctaccactgcaccaagtgcaagaagagcttcagcaggaacagcctgctggtggagcaccagaggatccacactggagagcggccccacaagtgtggggagtgtgggaaggccttccggctgagcacctacctgatccagcaccagaagatccacactggagagaagcccttcctgtgcattgaatgtgggaagagcttcagccgcagcagcttcctgattgagcaccagaggatccacactggagagcggccctaccagtgcaaggaatgtgggaagagcttcagccagctgtgcaacctgaccaggcaccagaggatccacactggagacaagccccacaagtgtgaggagtgtgggaaggccttcagccgcagcagcggcctcatccagcaccagaggatccacacccgggagaagacctacccctacaatgagaccaaggagagctttgaccccaactgcagcctggtgatccagcaggaggtgtaccccaaggagaagagctacaagtgtgatgaatgtgggaagaccttctctgtgtctgcccacctggtgcagcaccagaggatccacactggagagaagccctacctgtgcaccgtgtgtgggaagagcttcagccgcagcagcttcctgattgagcaccagaggatccacactggagagcggccctacctgtgccggcagtgtgggaagagcttcagccagctgtgcaacctgatccgccaccagggcgtgcacactggaaacaagccccacaagtgtgatgaatgtgggaaggccttcagcagaaattctggcctcatccagcaccagaggatccacactggagagaagccctacaagtgtgagaagtgtgacaagagcttcagccagcagaggagcctggtgaaccaccagaagatccatgctgaggtgaagacccaggagacccatgaatgtgatgcctgtggggaggccttcaactgccgcatcagcctcatccagcaccagaagctgcacacagcctggatgcagtag

SEQ ID NO: 138427 - DNA, 1881 bp, Artificial Sequence
  derived and/or modified sequence
atggccagccccagccccccccccgagagcaagggcctgctgaccttcgaggacgtcgccgtgtttttcacccaagaagaatgggactacctggaccctgctcagcgcagtttgtataaggatgttatgatggaaaactatggaaacctcgtgtcccttgacgtcttgaacagggataaggatgaagaacctacagtgaagcaagagatcgaggaaatcgaggaggaggtggaaccccagggagtgatcgtcactaggatcaaatctgaaatcgaccaggacccaatgggccgcgaaacgtttgagttagtggggcgcttagacaagcagaggggaatttttctgtgggagatccccagagagagtcttacacaggaacaaagaatgttcagggagaataccaatatcataagaaaacggccaaatagcgaggaaaagtgccacaagtgtgaggagtgcggtaagggattcgttcgcaaagcacacttcatccagcaccaacgcgtgcacaccggagaaaagccgtttcaatgtaatgagtgtgggaaatcctttagtcgctctagctttgtaatcgagcatcagcgcatacacaccggtgagcggccgtatgaatgcaactattgtggcaagacgttcagcgtgagcagtacactaatacggcatcagcggatccatacgggtgaaaggccctaccaatgtaatcagtgcaaacagtctttctctcagaggaggtctcttgtcaaacaccagagaatccacaccggcgaaaaacctcataagtgctccgattgtggtaaagcattctcatggaaaagccaccttatcgagcaccagcggacgcacaccggagaaaagccttaccactgtaccaaatgcaaaaagtccttttctcggaacagccttctcgtcgaacatcagcgcatacacaccggggagcgaccccataaatgtggagagtgcggtaaggcattccgcctgagtacatacctgatccaacatcagaaaatccacacaggggaaaagccttttttgtgtatcgagtgtggcaaaagcttcagccgctcgagttttctaatagagcaccagcgaattcataccggcgaacggccctatcagtgtaaggagtgtggcaagtcattctcgcaactgtgcaacctcacaagacatcaaaggatccacactggagacaagccccacaaatgtgaagagtgcggcaaggcatttagccgtagctccggtctgatacagcaccaacgtatccatacacgcgaaaagacttatccttacaacgaaaccaaagagtcattcgatccgaactgctcactcgttattcagcaggaggtgtaccccaaggagaagtcttacaaatgcgacgagtgtggtaagacattcagtgtttccgctcacctcgtgcagcaccagcgaatccatacaggagagaaaccctatttgtgtacagtatgtgggaagtccttttcaaggtcgtcgttcttgatagagcaccagagaatccatactggggaacgcccatacttatgtaggcaatgtggaaagtcattttctcagctgtgtaatctgattaggcaccagggggttcatacaggaaacaaaccacataaatgtgacgaatgtgggaaggctttcagtcgaaatagcgggctaatccagcatcaaagaatccacacaggcgaaaagccctataaatgtgaaaaatgcgacaagtcttttagccagcagagaagtctggtgaatcaccagaaaatacatgcagaagtgaagactcaagaaacccacgagtgcgatgcctgcggggaagcatttaactgccggatctctttaatccagcaccaaaagcttcatacagcttggatgcaatag

SEQ ID NO: 138428 - DNA, 1881 bp, Artificial Sequence
  derived and/or modified sequence
atggcgtccccttccccccctcctgagtcaaaaggcttactcacgttcgaagacgtcgcggtgttttttacacaagaggaatgggactatctggatccagcacagagatccttgtataaggatgtgatgatggagaattacggaaatctggtatctctggacgtcctcaaccgggataaggacgaggagccaactgtcaaacaggaaattgaagagatagaagaggaagtggagccccagggcgtgatagtcacacgcattaagagtgaaattgatcaagaccctatgggcagagagactttcgagctggtcgggagactggataagcaacgagggatcttcttatgggagatcccgagggagtccctgacccaggaacaacgaatgtttcgggaaaacaccaacataattcgaaagaggcccaacagcgaagaaaaatgccataagtgtgaagagtgtggtaaaggattcgttcgcaaggcacacttcatccagcatcagcgggtacacacaggggaaaaacctttccaatgtaatgaatgtggaaagtccttctctcggagttccttcgtgattgagcatcaacgtatccataccggcgaacgcccatacgaatgcaactattgcgggaaaacgttctccgtatcttcgacactgatcaggcaccaaaggattcacaccggtgagcggccatatcagtgcaaccagtgcaaacagagcttcagccagcgtagaagcttagtcaagcatcagcggatccacaccggggaaaagcctcacaaatgttcagactgcgggaaggcctttagctggaagagccatttgattgagcaccagagaacacacaccggggagaaaccctatcattgcaccaagtgcaaaaagtctttctcacgtaattcgctgcttgtggagcatcagcgcatccacactggagagaggccccataaatgtggggagtgcggtaaggcgttcaggctgtctacatacctgatccagcaccagaagattcacaccggcgagaaacccttcttatgtattgaatgtggcaagtcctttagccgatctagtttcctgatagaacaccagagaatccacaccggggaaaggccataccagtgcaaggaatgcggaaaatccttttcacagctgtgcaatctgacgaggcaccagcgtatccatacaggagacaagccacacaaatgcgaagagtgtgggaaggcctttagcaggagcagtggcctcatccagcaccagcgaatccacacccgggagaaaacttatccttataacgagacgaaggagtccttcgaccccaactgtagcctggtgattcaacaggaagtgtaccccaaagaaaaaagttataaatgtgacgaatgcggaaaaactttttctgtgtccgctcatctggtacaacaccagcgcatacacaccggagagaagccctacctctgtaccgtctgcggaaagtccttcagccgctccagctttttgattgaacaccaaaggatacacaccggcgaacggccttatctctgtcggcagtgtggtaagtctttttcccaattgtgcaatctgattcgccatcagggagttcacactggcaataagcctcacaagtgtgatgagtgcggtaaagctttcagtagaaactctggcctgattcagcaccagcgaattcacaccggggaaaaaccttataaatgtgaaaaatgtgataaaagcttttcacagcagaggtctctagttaaccaccagaaaatccatgcagaggtcaagacccaagagacccatgaatgtgatgcttgtggcgaggctttcaactgccgcatcagccttattcagcatcaaaagcttcatacggcatggatgcagtag

SEQ ID NO: 138429 - DNA, 3021 bp, Artificial Sequence
  derived and/or modified sequence
gcactggccagacccagccagggatcctcgtattcgtcgagcctaatttccagcagccgggtaggcctcaccagaggctcctttccgtgaggccgcccccaattcctgcccctattctctgcctgggagatggcttccccgagccccccgccggagtcgaaggggttgctgacatttgaggatgtggctgtgttttttacccaggaggagtgggattatctggacccagctcagagaagcctgtataaagatgtcatgatggagaattatggaaacctggtctcactggatgttttgaacagagataaggatgaggagccaactgtaaaacaagagattgaagaaattgaggaagaagtggaaccacagggtgtaatagttacaagaatcaaaagtgaaattgaccaggatcctatgggtagagaaacatttgaacttgttggtaggttagataaacaaagagggatcttcctatgggaaataccaagggaatctttgacccaggaacagagaatgttcagagaaaacactaacattatccgtaaaagaccaaactcagaagagaaatgccataaatgtgaagaatgtggaaagggttttgtccgcaaggcccatttcattcaacatcaaagggtccatactggtgagaaaccttttcagtgcaatgaatgtgggaaaagttttagtcgcagttcatttgttattgaacatcagagaattcacactggggaaaggccctatgagtgtaattactgtggaaaaacctttagtgtgagctcaacccttattagacatcagagaatccacactggagaaagaccctatcagtgtaatcagtgtaaacagagcttcagccagagaaggagccttgttaaacatcaaaggattcatacaggtgagaaaccccataaatgtagtgactgtgggaaagccttcagttggaaatcacaccttattgagcatcaaagaactcacactggtgagaaaccttatcactgtaccaaatgtaagaagagctttagtcgaaattcattgcttgttgagcatcaaagaattcacactggggaaagaccccataaatgtggtgaatgtgggaaagcctttcgattaagcacataccttatacaacaccaaaaaattcacactggcgagaagccttttctttgtattgagtgtggaaaaagtttcagtcggagctcattccttattgaacatcagaggatccatactggtgaaagaccttatcagtgcaaagagtgtgggaaaagtttcagtcagctttgcaaccttactcgtcatcagagaattcacacaggagacaagccccataaatgtgaggaatgtggaaaagcctttagtagaagctcaggtcttattcagcatcagagaattcacaccagggagaagacttatccatacaatgaaactaaggaaagttttgatccaaattgcagtcttgttatacagcaggaagtctaccctaaggagaaatcttataaatgtgatgaatgtgggaaaacttttagtgttagtgctcatcttgtacaacatcaaagaatccacactggtgaaaagccctatctatgtactgtctgtgggaaaagcttcagccggagctcatttcttattgaacatcagagaatccacactggtgagagaccctatctgtgcagacagtgtggaaaaagctttagtcagctttgtaatcttattcgacatcagggtgttcacacaggtaataaaccccataaatgtgatgaatgtggaaaggcctttagccggaactcgggtcttattcagcatcagagaatacacacaggagagaaaccttataagtgtgagaagtgcgacaaaagtttcagtcaacagcgcagtcttgtcaaccatcagaagatccatgcagaggtgaaaacccaagaaacccatgaatgtgacgcttgtggtgaagcctttaattgccgtatttctcttattcagcatcagaaattgcacacagcatggatgcaataaatgtagagcaatacataagctcaatttgatttgagactagtacccaagtgcagttttagtatggctcaacatgggtcagatttagtgataaagcaaattctccttggcctcaggcaaatagtttctaaagattctgtgaatagtggacaactgcccatgagcatttgacttcccttactctttgatgatcgtagagaaagacttggtaatttatctaagtatctttaataaatctttcagcagagagattaaacctaggttcagagcatgggtgctctgagggacaaagttggattagtataagggagctggagcagctgatagtggaaaacagaataatgattcaaagagtcttctgtcaccatgtcatattgtggttctttcagttccatgatatgtttggctctgcatgccaaagtccagtgattaagcatatataagttgtcaaggaaacaaagcccaaatgtttttaaaacaagtatacagtttttgtcattgtttaagaaagccagttgtttggcatgtgagttaaaggcagttccaatgcctgatggttcccagatctatgaaatgagtggaccattaaccttacatgtaaagattatgttagtaattaagaaacctaacaaaggtgttaccaaggaacctttgggagtgccttttttgtttttcaagatggacccaaaaaagtggaggaagatattgttcttttgtgccctcctacctgtgagagatatttgtagtcctatgtgaatgagcttatccctccacaaccaggtgcatatgaaagtgtacatattatgactgccaagtattggaaatgaaaagacctggagtctatgctaggaagctgagatattttggtattgcattggtttttatggtaactaggttttgcatgcaattaaaaatccttatttcttgttctagggcttcccttagttaatggttattataaacctattaattcatctgttttaaccattaaaacctgttttgtttttagctttg

SEQ ID NO: 138430 - protein, 3926 aa, Artificial Sequence
  derived and/or modified sequence
MGNEVSLEGGAGDGPLPPGGAGPGPGPGPGPGAGKPPSAPAGGGQLPAAGAARSTAVPPVPGPGPGPGPGPGPGSTSRRLDPKEPLGNQRAASPTPKQASATTPGHESPRETRAQGPAGQEADGPRRTLQVDSRTQRSGRSPSVSPDRGSTPTSPYSVPQIAPLPSSTLCPICKTSDLTSTPSQPNFNTCTQCHNKVCNQCGFNPNPHLTQVKEWLCLNCQMQRALGMDMTTAPRSKSQQQLHSPALSPAHSPAKQPLGKPDQERSRGPGGPQPGSRQAETARATSVPGPAQAAAPPEVGRVSPQPPQPTKPSTAEPRPPAGEAPAKSATAVPAGLGATEQTQEGLTGKLFGLGASLLTQASTLMSVQPEADTQGQPAPSKGTPKIVFNDASKEAGPKPLGSGPGPGPAPGAKTEPGARMGPGSGPGALPKTGGTTSPKHGRAEHQAASKAAAKPKTMPKERAICPLCQAELNVGSKSPANYNTCTTCRLQVCNLCGFNPTPHLVEKTEWLCLNCQTKRLLEGSLGEPTPLPPPTSQQPPVGAPHRASGTSPLKQKGPQGLGQPSGPLPAKASPLSTKASPLPSKASPQAKPLRASEPSKTPSSVQEKKTRVPTKAEPMPKPPPETTPTPATPKVKSGVRRAEPATPVVKAVPEAPKGGEAEDLVGKPYSQDASRSPQSLSDTGYSSDGISSSQSEITGVVQQEVEQLDSAGVTGPHPPSPSEIHKVGSSMRPLLQAQGLAPSERSKPLSSGTGEEQKQRPHSLSITPEAFDSDEELEDILEEDEDSAEWRRRREQQDTAESSDDFGSQLRHDYVEDSSEGGLSPLPPQPPARAAELTDEDFMRRQILEMSAEEDNLEEDDTATSGRGLAKHGTQKGGPRPRPEPSQEPAALPKRRLPHNATTGYEELLPEGGSAEATDGSGTLQGGLRRFKTIELNSTGSYGHELDLGQGPDPSLDREPELEMESLTGSPEDRSRGEHSSTLPASTPSYTSGTSPTSLSSLEEDSDSSPSRRQRLEEAKQQRKARHRSHGPLLPTIEDSSEEEELREEEELLREQEKMREVEQQRIRSTARKTRRDKEELRAQRRRERSKTPPSNLSPIEDASPTEELRQAAEMEELHRSSCSEYSPSPSLDSEAEALDGGPSRLYKSGSEYNLPTFMSLYSPTETPSGSSTTPSSGRPLKSAEEAYEEMMRKAELLQRQQGQAAGARGPHGGPSQPTGPRGLGSFEYQDTTDREYGQAAQPAAEGTPASLGAAVYEEILQTSQSIVRMRQASSRDLAFAEDKKKEKQFLNAESAYMDPMKQNGGPLTPGTSPTQLAAPVSFSTPTSSDSSGGRVIPDVRVTQHFAKETQDPLKLHSSPASPSSASKEIGMPFSQGPGTPATTAVAPCPAGLPRGYMTPASPAGSERSPSPSSTAHSYGHSPTTANYGSQTEDLPQAPSGLAAAGRAAREKPLSASDGEGGTPQPSRAYSYFASSSPPLSPSSPSESPTFSPGKMGPRATAEFSTQTPSPAPASDMPRSPGAPTPSPMVAQGTQTPHRPSTPRLVWQESSQEAPFMVITLASDASSQTRMVHASASTSPLCSPTETQPTTHGYSQTTPPSVSQLPPEPPGPPGFPRVPSAGADGPLALYGWGALPAENISLCRISSVPGTSRVEPGPRTPGTAVVDLRTAVKPTPIILTDQGMDLTSLAVEARKYGLALDPIPGRQSTAVQPLVINLNAQEHTFLATATTVSITMASSVFMAQQKQPVVYGDPYQSRLDFGQGGGSPVCLAQVKQVEQAVQTAPYRSGPRGRPREAKFARYNLPNQVAPLARRDVLITQMGTAQSIGLKPGPVPEPGAEPHRATPAELRSHALPGARKPHTVVVQMGEGTAGTVTTLLPEEPAGALDLTGMRPESQLACCDMVYKLPFGSSCTGTFHPAPSVPEKSMADAAPPGQSSSPFYGPRDPEPPEPPTYRAQGVVGPGPHEEQRPYPQGLPGRLYSSMSDTNLAEAGLNYHAQRIGQLFQGPGRDSAMDLSSLKHSYSLGFADGRYLGQGLQYGSVTDLRHPTDLLAHPLPMRRYSSVSNIYSDHRYGPRGDAVGFQEASLAQYSATTAREISRMCAALNSMDQYGGRHGSGGGGPDLVQYQPQHGPGLSAPQSLVPLRPGLLGNPTFPEGHPSPGNLAQYGPAAGQGTAVRQLLPSTATVRAADGMIYSTINTPIAATLPITTQPASVLRPMVRGGMYRPYASGGITAVPLTSLTRVPMIAPRVPLGPTGLYRYPAPSRFPIASSVPPAEGPVYLGKPAAAKAPGAGGPSRPEMPVGAAREEPLPTTTPAAIKEAAGAPAPAPLAGQKPPADAAPGGGSGALSRPGFEKEEASQEERQRKQQEQLLQLERERVELEKLRQLRLQEELERERVELQRHREEEQLLVQRELQELQTIKHHVLQQQQEERQAQFALQREQLAQQRLQLEQIQQLQQQLQQQLEEQKQRQKAPFPAACEAPGRGPPLAAAELAQNGQYWPPLTHAAFIAMAGPEGLGQPREPVLHRGLPSSASDMSLQTEEQWEASRSGIKKRHSMPRLRDACELESGTEPCVVRRIADSSVQTDDEDGESRYLLSRRRRARRSADCSVQTDDEDSAEWEQPVRRRRSRLPRHSDSGSDSKHDATASSSSAAATVRAMSSVGIQTISDCSVQTEPDQLPRVSPAIHITAATDPKVEIVRYISAPEKTGRGESLACQTEPDGQAQGVAGPQLVGPTAISPYLPGIQIVTPGPLGRFEKKKPDPLEIGYQAHLPPESLSQLVSRQPPKSPQVLYSPVSPLSPHRLLDTSFASSERLNKAHVSPQKHFTADSALRQQTLPRPMKTLQRSLSDPKPLSPTAEESAKERFSLYQHQGGLGSQVSALPPNSLVRKVKRTLPSPPPEEAHLPLAGQASPQLYAASLLQRGLTGPTTVPATKASLLRELDRDLRLVEHESTKLRKKQAELDEEEKEIDAKLKYLELGITQRKESLAKDRGGRDYPPLRGLGEHRDYLSDSELNQLRLQGCTTPAGQFVDFPATAAAPATPSGPTAFQQPRFQPPAPQYSAGSGGPTQNGFPAHQAPTYPGPSTYPAPAFPPGASYPAEPGLPNQQAFRPTGHYAGQTPMPTTQSTLFPVPADSRAPLQKPRQTSLADLEQKVPTNYEVIASPVVPMSSAPSETSYSGPAVSSGYEQGKVPEVPRAGDRGSVSQSPAPTYPSDSHYTSLEQNVPRNYVMIDDISELTKDSTSTAPDSQRLEPLGPGSSGRPGKEPGEPGVLDGPTLPCCYARGEEESEEDSYDPRGKGGHLRSMESNGRPASTHYYGDSDYRHGARVEKYGPGPMGPKHPSKSLAPAAISSKRSKHRKQGMEQKISKFSPIEEAKDVESDLASYPPPAVSSSLVSRGRKFQDEITYGLKKNVYEQQKYYGMSSRDAVEDDRIYGGSSRSRAPSAYSGEKLSSHDFSGWGKGYEREREAVERLQKAGPKPSSLSMAHSRVRPPMRSQASEEESPVSPLGRPRPAGGPLPPGGDTCPQFCSSHSMPDVQEHVKDGPRAHAYKREEGYILDDSHCVVSDSEAYHLGQEETDWFDKPRDARSDRFRHHGGHAVSSSSQKRGPARHSYHDYDEPPEEGLWPHDEGGPGRHASAKEHRHGDHGRHSGRHTGEEPGRRAAKPHARDLGRHEARPHSQPSSAPAMPKKGQPGYPSSAEYSQPSRASSAYHHASDSKKGSRQAHSGPAALQSKAEPQAQPQLQGRQAAPGPQQSQSPSSRQIPSGAASRQPQTQQQQQGLGLQPPQQALTQARLQQQSQPTTRGSAPAASQPAGKPQPGPSTATGPQPAGPPRAEQTNGSKGTAKAPQQGRAPQAQPAPGPGPAGVKAGARPGGTPGAPAGQPGADGESVFSKILPGGAAEQAGKLTEAVSAFGKKFSSFW

SEQ ID NO: 138431 - DNA, 432 bp, Artificial Sequence
  derived and/or modified sequence
atgagactgcagaagaccagatgcggcagcgccgccagcccccccaacaagcagcagaccgagctgcccgccttcagcgtgatgcccagacccgccggccagcacgtgtggccctggagaggcgagagaatgagactgcccggcgccgccagcagcctgttcagcaactacttcagcctgccctacgtgatctacctgagcatcagcgacctgaacgtggagtgcctgatcttcagcgtgttcgacagccagcaggtgcacaccagctaccagagcaacggcctgcacagaaacggcatgttccacgactgcctggaggtgagcaagcaccccttcctgggcctgaccctgaccctgtggctgtgcgacctgagcagcagcggcttctacatgagcggccacgagcccctgtggaacctgagccccctgtag

SEQ ID NO: 138432 - DNA, 147 bp, Artificial Sequence
  derived and/or modified sequence
atgtctgacttccctgtgcacagcaagtacttcctgatcagcagcctgcaggtgctgaagatgcacaagaaggacttcaccagccaggtgctgctgcgcatctactttgacctgatctgcatgctggtgaagctgcacgtgctgtag

SEQ ID NO: 138433 - DNA, 11781 bp, Artificial Sequence
  derived and/or modified sequence
atggggaacgaggtgagcctggaggggggggctggagacggaccattgcccccgggtggcgctggcccagggcccggaccgggacctggacctggggccgggaaacccccatcagctcccgcaggcggagggcagctgcccgcggcaggggccgctaggagtaccgctgtcccgccagtgcctgggcccgggcccgggcctgggcctgggcctggccccggtagtacctcacgtagacttgatcccaaagaacctctcgggaaccagcgagccgcctcgcccacccctaagcaggcctccgcgacgaccccggggcatgagtcccctcgagagactcgggcacagggccctgcaggtcaggaggcggacggccctaggcgcacgctgcaggttgattcaaggactcagcgctccggccggtccccctccgtctccccggaccgggggtcaacccctacctcaccatatagtgtcccccagatcgcacctctcccctccagtacactgtgccccatttgcaaaaccagcgatctgacaagcaccccatcgcagccaaacttcaatacatgcactcagtgccataacaaggtgtgcaatcaatgtgggtttaaccccaacccccacctgacccaagtgaaggagtggctctgtttaaactgccagatgcagagagctctgggaatggacatgaccaccgcacctcgtagtaaatcccaacagcagctgcattccccagcactgtcacccgcacattcacccgctaagcaaccactggggaagccggaccaggaacgcagtaggggccctggggggccacagccaggtagccggcaagccgaaactgctagagcgacatcagtaccaggacctgcccaggcggctgcccctcctgaagttggtcgggtaagcccccaacctcctcaacctacgaaaccatctacagccgagcctaggccccctgccggagaagctcctgcaaagtctgccaccgcagtccctgccggtctcggtgctacagaacaaactcaggagggattgacaggaaagttatttggactgggggccagcctcctgacccaggcaagcacattgatgagtgtgcaacctgaggccgacactcagggtcagcccgcaccttccaaaggcactccaaagatcgtattcaacgatgccagcaaggaggctgggcccaagcccctaggatccggcccgggccccgggcccgcccctggcgccaagaccgaaccaggcgctcggatgggccccggttctggaccaggggcgctccccaaaacgggtggtactacaagtcctaaacacgggagggccgagcatcaggcggcttccaaggcagccgctaagcctaaaacaatgccaaaagagcgggcgatctgccccctgtgccaggccgagctcaatgtcggctctaagagtcctgccaattacaacacttgtacaacctgtcgccttcaggtctgtaacctgtgcggctttaaccccacgcctcatctggtcgaaaagaccgagtggctctgcctgaactgtcagaccaaacgactgttggagggatcactcggcgagccaacaccgttgccgccccccaccagccagcagcccccggtcggagcccctcatagagcatctgggacctcccctcttaagcagaagggcccacaggggctcggccagccttcaggtcccctacctgccaaggcaagtcctctgtcgacaaaggctagtccactgccctcgaaggcgtccccccaggctaagcctctgagggcgtcagaacccagcaaaaccccatcctcagtgcaggaaaaaaaaaccagggttccgactaaggctgagccgatgccgaagccgccccccgagactacccctactcctgccactcctaaggttaagtccggtgttcgccgggccgagcctgcaacccccgtggtcaaagccgttcccgaagcccctaagggcggagaagcagaggacctagtaggtaaaccctacagtcaagacgcatccaggagcccacagagcctcagcgacactggatattcctctgacggcattagctcatctcagtctgagattacaggagttgtgcagcaagaagtcgagcagctggacagcgcaggagtgacagggcctcacccaccatcacccagtgagatccacaaagtaggctcttctatgcggcctctgctgcaggcccaaggattggcgccttccgagcggagcaagcccttatcttccggaacgggtgaggagcagaagcagcgtccccattcattatcaattacgcccgaggcctttgactctgacgaagagttggaagatatactcgaggaagacgaggattctgctgagtggcgcaggcgtagagagcagcaagacacagctgaatctagtgatgatttcggctcccagctcaggcatgattatgtagaagacagtagcgaaggaggcttaagcccgctccctccacaaccccccgctcgggcagcagaattaacggacgaagatttcatgagaagacagattttagaaatgtccgccgaggaagacaacctggaagaggatgacaccgccacctccgggcggggcctggctaaacacggcacccagaaaggagggccaaggccccgccccgaaccttcacaagaacccgctgcactgccaaagcgtaggcttccccacaacgcaactacgggatatgaggaactgctaccagaagggggctctgccgaggccacggacggaagcgggacattgcagggtggactgcgccggtttaaaactattgagttgaactctaccgggagctatggtcacgaactagacctcggacagggccctgatccatctctggatcgggagcctgagctggagatggagagcctgacggggtcgcccgaagatcgatcgcggggcgagcattcgagcaccctgcccgcctccacaccttcatacacaagtggcacctcacccacatcactgtcaagcctcgaggaggactcggatagctctccctctaggagacaaaggctcgaagaggctaagcagcagagaaaggcacgccataggtctcatggccccttgctacctacaatcgaggattcgagcgaggaggaggagttgagggaggaggaggagcttttgcgggaacaggagaaaatgagggaggtggaacagcagaggattagatcgactgctaggaagacaagaagggacaaggaggaattgcgcgctcagcggaggcgcgagcgaagtaagacccctccttcaaatttatcccctatagaggatgccagtccaactgaagagcttaggcaagcagcagaaatggaggaactgcatcgcagtagctgttctgagtactcccccagtccttcactcgatagcgaggccgaggccctggacggaggcccttctaggctatacaagtctggctccgaatataatctacccaccttcatgtcattatatagccccacggagaccccctccgggagctccacgacgccctcttccggtaggccgctaaagagcgcggaagaagcttatgaagagatgatgcgaaaagccgagttactgcaacggcagcagggccaagcggccggagcacggggcccccatggaggcccctcccaacccactggacctagaggtctcggaagttttgagtaccaggatacaaccgaccgagagtacggtcaagccgcccaacctgcggccgaggggacacctgcttctttaggcgctgccgtgtacgaggaaatcctgcagaccagccagtctatcgttcgtatgcgtcaagcttcgtcccgcgatctagccttcgcggaagataagaaaaaggaaaaacagttcttgaacgccgagagtgcttacatggatccaatgaagcagaacgggggccctctcactcctggaacttcacccactcagttagctgctcccgttagcttctctacccctacatcctctgatagctcgggtggacgcgtgataccagacgtcagggttactcaacatttcgctaaagagacacaggatccactaaagctgcattccagtccggcaagccctagcagcgcatctaaagagatcgggatgccattttctcagggaccgggaacgcctgcaacaactgccgtagctccctgtccagccgggcttcccagagggtacatgacgcctgcatcacccgccggctcagagagaagcccatctccatcaagtacggctcatagctacggtcactcccccacaactgcgaactacggtagccaaaccgaagatctcccacaggccccatctggccttgcagctgccggaagggcagctagagagaagccactttccgctagtgatggagagggaggcactccgcagccaagccgggcctacagctactttgcttcatctagtccacccctgtcaccaagcagcccaagtgagtccccgacattctccccaggcaaaatgggccctagggcgacggccgaattctccacccagacgccttcccccgccccagctagcgacatgccaaggtcccctggagccccaactccatctccaatggtggcacaggggacccagactcctcatcggccaagcaccccgaggctggtctggcaggagagctcacaggaggccccctttatggttatcaccctggctagtgatgcctcttctcaaacacggatggtgcacgcttctgctagcacctcaccactctgttcccctaccgagacacagcctacaacccacgggtattcccaaacgacaccacccagcgtcagccaactgccgccggagccccccggtccccctggtttcccccgtgtgcctagtgccggcgcagacgggccactggccctctatggatggggtgccctgccggccgaaaacatctcactttgccgcatatcttcggtgccaggtacctctagggtggaaccaggtccccgtactcctggcactgctgtcgttgatctgcggacagccgtgaagccgacacctattatcttgacagaccagggcatggacttaacatcactggcagttgaagcacgcaagtacggcctcgcactcgaccctattcccggacggcagtccaccgccgtgcagcctttggttattaatctgaacgcacaagagcatacatttctcgccacagccactacagtatctataaccatggcaagttccgttttcatggcgcagcagaagcagcccgttgtgtacggcgatccctaccagagtcgtctcgacttcggtcaggggggcggtagcccagtctgtttagctcaagtgaaacaagtagaacaggctgtgcagaccgctccatacaggagtgggccccggggccgtccgagggaggccaaattcgcccggtacaatttgcccaatcaagtagctcctcttgcacgccgagatgtgcttatcacccagatggggactgcccagagcatagggctgaagcccggaccagtgccagagccgggcgctgaacctcatcgcgcgacccctgccgaactcaggtcacacgcattaccaggggcaagaaaacctcatacagtcgtcgtccagatgggggaaggaacggcgggcactgtcaccactttgctgcccgaggagccggccggagccctggatctgacaggcatgcgcccagagagtcagctcgcctgctgcgacatggtttacaaactgccgttcgggtcaagctgcaccggaacattccatcccgctccaagcgtgccagaaaaaagcatggcagacgccgccccccctggacaatcctcctctcccttctatgggccccgcgacccagagccccccgagccccccacctacagggcccaaggcgttgttggcccgggcccgcacgaggagcaacgtccctatcctcaaggtcttcctggccgcctgtattctagtatgagcgacaccaatctcgctgaggctggtctgaattaccacgctcagcggatcggtcaactttttcagggccccggaagagattccgctatggacctcagctctctgaaacattcctactctctgggctttgcagacggcagatacctgggccagggtctgcagtatgggtcggtcactgacctgcgtcatcctaccgatcttctcgctcaccctttacccatgagaaggtatagttcggtcagcaacatttactccgaccaccgctatggacctcggggtgacgcggtcgggtttcaggaagcgtcattggcacaatatagtgctaccacagcccgggaaatatcccgcatgtgtgccgctctgaacagcatggatcagtacggggggagacacgggtccggggggggtggacctgacctggttcaataccagccccagcacgggcctgggctatcggctccccagtccctggtgcccctcagacccggccttcttggaaaccccaccttccctgagggccatccttctcccgggaatttggctcaatacgggccagccgcggggcagggcaccgccgtgaggcagctgctcccttctacagcaaccgtgcgcgccgcagacggcatgatatatagtaccatcaatacacccatagcagcaacactgcccatcaccacacagccagccagcgtgctacgccccatggtccggggcggaatgtataggccgtacgcctcaggcgggattaccgcagtgcccctgacaagcctgacgagagtgcctatgatcgcccctcgggtcccccttggcccaactggcctctaccgttacccagcaccttctcgttttccaattgcgagtagtgttccccccgcggagggaccagtgtaccttggtaagcctgccgctgcaaaagcccctggcgcaggtggtccgagcaggccggaaatgcccgttggagcagcgcgcgaagagcccctaccgaccactaccccggctgcaatcaaggaggctgccggcgcacccgccccagccccattagccggacagaaacctcccgccgatgcagcacctggcggcggctctggcgccctgagtcgcccagggttcgagaaggaggaggcttctcaggaagagagacagagaaagcagcaggagcaattgctgcaactagaacgcgaacgagtggagctggaaaagttgagacaactaagactccaggaggagctggagcgagagcgagtggagctgcagagacatcgtgaggaagaacagttactcgtgcagcgagagttgcaggagcttcaaaccatcaaacatcacgtgctacagcagcagcaggaagaaaggcaggcccagtttgccctgcagcgcgagcagttagcccaacagagactccagctggagcagattcagcagctgcagcagcagctgcagcaacagttggaggagcagaagcagcgacagaaggctccttttcccgctgcctgcgaagcacccggccgaggcccacccctggcagcagcagagctcgcccagaacgggcagtactggccaccgctcacacatgccgcgttcatagccatggcaggaccagaaggactgggacagcccagagaaccggtgcttcaccggggcctgccgagtagtgcatctgacatgagcctccagactgaagaacaatgggaagcctctagatccgggatcaagaagcggcactccatgcctcgtctgagagacgcgtgtgagcttgaaagcgggaccgagccgtgtgttgtcagaagaatcgccgactcttcggtgcagaccgacgacgaggacggagaatccagatacttgctctcgagaagaaggcgggcccgtaggtccgcagattgctctgtgcagacagatgacgaagattcggctgaatgggagcaaccagtgaggcggcggaggtcgcggcttccacgccatagcgattccggttccgattcaaagcacgacgcgactgcttcaagctcatcagcagctgctaccgtgcgcgctatgtcaagtgtgggcattcagaccatatccgactgtagtgtccagactgagcccgatcaactgccccgcgtgtcacccgcaattcacattaccgccgccacagatcccaaagttgagatcgttagatatatttctgctcccgagaagacaggccggggagaatctctcgcctgtcagacagaacctgacggacaggcccagggtgtcgctggcccccagcttgtggggcctaccgctatcagtccatatctgcccggcatccaaatcgttaccccaggccccttggggaggttcgagaaaaagaaaccagacccccttgagatcgggtaccaggcacatctgccaccggaatcgttgtcacagttggtgagtagacaaccacctaaatcccctcaggttttatatagtccagtgtcacccttgtctccgcaccgactgctagacacgtccttcgccagcagtgagcgattgaacaaggcccacgtaagtcctcagaagcatttcactgcagattccgcgttacgtcaacagactctgccaaggccaatgaaaacactgcagagatccctgagtgacccaaaaccactgtcaccaaccgctgaagaatccgcaaaggagaggtttagcctctatcagcaccagggcggactgggctcacaagtgagcgccctgcccccgaattcactggtccggaaggtgaagaggaccttgccatcacctccccctgaggaagcgcacctccctctggcaggccaggctagcccacagctatatgcagcgtccttgcttcaacgcggcctgaccggccctacaactgtgcctgccactaaagcctctctgctcagggagctcgacagagacctgaggttggtggagcatgagtccacaaaacttcggaaaaagcaagccgaactagatgaggaggagaaggaaattgatgctaaattaaagtacctggagctcggcatcacccagcggaaggaatctctcgcaaaagaccgcggtggcagggattaccctccgttacgcggattaggggagcatcgtgactacctgagtgacagcgagctcaatcagttgcgacttcaggggtgcacgacgcccgctgggcaatttgtggacttccccgcaactgcggcggccccggccaccccttctggacctaccgcattccaacagccccgctttcagccccctgcaccccagtattccgccggctccggaggacccactcagaatggctttcccgcacatcaggcacccacatacccaggaccgtctacctaccccgcccctgctttcccgcccggcgcctcttatcccgcggagcccgggctgccaaatcagcaggctttccgccccaccggacattatgccggccagacacccatgccgactacccaatcaaccttgtttcctgtacctgcagatagtcgtgctcctttgcagaagcctagacaaacaagtctggccgatcttgaacagaaagtgcctaccaactacgaggtcatagcatctccggtggtgcccatgagcagtgccccaagtgaaacatcctactccgggccagcggtgtcctctgggtacgagcaagggaaggtgcccgaggttcctcgcgcaggtgatcggggatctgtgtcgcaatctcctgcccccacctatcccagcgatagtcattatacctctctggagcagaacgtgccgcgcaattatgtgatgattgacgacatctctgagctcacgaaagactcaaccagtacagcacccgacagccaacgactggagcctctgggccccggttcctccgggaggcccggtaaagagccgggagagccaggagtgcttgatggccccactctgccttgctgctatgccaggggggaagaagagtccgaggaagacagttacgatccgcgcggcaaaggagggcacctcaggtctatggagtctaacggccggcccgcctctacccattattatggagattctgactatagacacggtgcacgggtcgaaaaatacgggcccggtccaatgggcccaaagcacccgagtaagtcccttgcgcccgcagccatttccagtaagcgttcaaagcaccggaagcaaggaatggagcagaaaatctcgaaattttcaccaatcgaagaggccaaggacgtcgaatctgatctggctagctatccaccaccagctgtgtcctcatctctggtatctagaggacggaaatttcaggacgagatcacatacgggcttaagaagaacgtctacgagcagcagaagtactacggcatgtcgagtagagacgccgtagaggatgacagaatctacggtggctcaagccgatcccgcgctcccagcgcctactccggagagaagctcagttctcatgatttctctgggtggggaaaggggtacgagcgggagagggaagccgtcgagagactccagaaagccgggcctaaaccatcgtcacttagtatggcacactcaagagtgcgtccaccgatgcggtcacaagcctccgaagaagagtcccctgtgtctcctcttggacgcccaaggccggctggtgggccgctcccccctggcggcgatacctgcccacaattttgctcaagtcactcgatgccggacgtccaagagcacgtgaaggatggacccagagctcacgcctacaagagagaagaggggtacatacttgacgacagccactgcgtggtgagcgacagcgaggcttaccacttaggacaagaagagaccgactggttcgataaaccacgtgacgcgcgcagcgatcgcttccggcaccatggtggtcatgctgtctccagctcatcacaaaagcgcgggccagctcggcactcttaccacgactatgatgaacctcctgaagagggtctgtggcctcacgacgagggaggcccaggacgacatgcttctgctaaggaacatcgccatggtgatcacggcagacattctggccgccataccggcgaggaacctgggcgccgggctgcgaaacctcatgcgagggatttagggagacacgaagctagaccacacagtcagccctccagtgcacccgctatgcctaagaagggacagccaggatatccatcgagcgccgagtactcccagccgagccgggcgtcaagcgcataccatcacgcaagtgattcaaagaaagggtcgcggcaggctcatagtggccctgcagcattgcagtccaaggcagagccccaagcgcagcctcaactccagggtcgacaggcagccccgggtccccagcagtcacagtcgccctcttccaggcagattccctctggggcagcgagtcgtcaaccacagacccagcaacaacagcagggcttgggattgcagcctccccagcaggccctgacccaggcaaggctacagcaacagtctcagcctactactcggggttctgccccagctgcttcacaaccagctggaaagccacaaccgggcccttcgactgccacagggcctcagcccgccggacctcctagggcggaacagactaatggctccaagggcaccgctaaggccccacagcaaggccgggccccccaggctcagcctgccccaggtccgggccctgctggggtgaaggccggggccaggccaggcggcacacccggtgcccctgcaggccagcctggcgctgatggtgagtccgtttttagcaaaattcttccagggggtgcagccgagcaggcaggaaagctgacggaggctgtctccgccttcggaaaaaagtttagttcattctggtag

SEQ ID NO: 138434 - DNA, 11781 bp, Artificial Sequence
  derived and/or modified sequence
atgggaaatgaggtgtccctggagggcggcgctggagatggccccctgcccccaggaggagctggccctggccctggccctggccctggccctggagctgggaagccacccagcgccccagctgggggcggccagctgcctgctgctggagctgcccggagcacagctgtgccccctgtgcccggccctggccctggccctggccctggccctggccctggcagcaccagccggcggctggaccccaaggagcccctgggcaaccagagagctgccagccccacccccaagcaggccagcgccaccaccccaggccacgagagcccccgggagacccgggcccagggccctgctggccaggaggctgatggccccaggaggaccctgcaggtggacagcaggacccagaggagcggccgcagccccagcgtgtccccagaccggggcagcacccccaccagcccctacagcgtgccccagatcgcccccctgcccagcagcaccctgtgccccatctgcaagaccagtgacctgaccagcacccccagccagcccaacttcaacacctgcacccagtgccacaacaaggtgtgcaaccagtgtggcttcaaccccaacccccacctgacccaggtgaaggagtggctgtgcctgaactgccagatgcagagggccctgggcatggacatgaccacagcccccaggagcaagagccagcagcagctgcacagccctgccctgagccctgcccacagccctgccaagcagcccctgggcaagccagaccaggagaggagccggggccctgggggcccccagcccggcagccggcaggccgagacagcccgggccacctctgtgcccggccctgcccaggccgccgcccctcctgaggtgggccgggtgagcccccagcccccccagcccaccaagcccagcacagctgagcccaggcctcctgctggggaggccccagccaagagcgccacagctgtgcctgctggcctgggcgccacagagcagacccaggagggcctgaccgggaagctgtttggcctgggcgccagcctgctgacccaggccagcaccctgatgtctgtgcagcctgaggccgacacccagggccagcctgcccccagcaagggcacccccaagatcgtgttcaatgatgccagcaaggaggccggccccaagcccctgggcagcggccctggccctggccctgcccctggggccaagacagagcccggggccaggatgggccctggcagcggccctggggccctgcccaagacaggaggcaccaccagccccaagcacggccgggcagagcaccaggccgccagcaaggccgccgccaagcccaagaccatgcccaaggagcgggccatctgccccctgtgccaggccgagctgaatgtgggcagcaagagccctgccaactacaacacctgcaccacctgccgcctgcaggtgtgcaacctgtgtggcttcaaccccaccccccacctggtggagaagacagagtggctgtgcctgaactgccagaccaagaggctgctggagggcagcctgggggagcccacccccctgcccccacccaccagccagcagccccctgtgggcgccccccaccgggccagcggcaccagccccctgaagcagaagggcccccagggcctgggccagcccagcggccccctgcctgccaaggccagccccctgagcaccaaggccagccccctgcccagcaaggccagcccccaggccaagcccctgcgggccagcgagcccagcaagacccccagctctgtgcaggagaagaagaccagggtgcccaccaaggccgagcccatgcccaagcccccacctgagaccacccccaccccagccacccccaaggtgaagtctggagtgcggcgggcagagcccgccacccctgtggtgaaggctgtgcctgaggcccccaagggcggggaggccgaggacctggtgggcaagccctacagccaggatgccagccgcagcccccagagcctgagtgacaccggctacagcagtgatggcatcagcagcagccagagcgagatcaccggggtggtgcagcaggaggtggagcagctggacagcgctggggtgacaggcccccacccccccagccccagcgagatccacaaggtgggcagctccatgaggcccctgctgcaggcccagggcctggcccccagcgagaggagcaagcccctgagcagcggcactggagaggagcagaagcagaggccccacagcctgagcatcaccccagaggcctttgacagtgatgaggagctggaggacatcctggaggaggatgaagattctgctgagtggaggagaagaagagagcagcaggacacagctgagagcagtgatgactttggcagccagctgcggcatgactatgtggaggacagcagcgagggcggcctgagccccctgcccccccagcccccagcccgggctgctgagctgacagatgaggacttcatgaggcggcagatcctggagatgtctgctgaggaggacaacctggaggaggatgacacagccaccagcggccggggcctggccaagcacggcacccagaagggcggcccccggcccaggcctgagcccagccaggagcctgctgccctgcccaagaggcggctgccccacaatgccaccaccggctatgaggagctgctgcctgagggcggcagcgctgaggccacagatggcagcggcaccctgcagggcggcctgcggcgcttcaagaccatcgagctgaacagcacaggcagctatggccacgagctggacctgggccagggccctgaccccagcctggaccgggagcctgagctggagatggagagcctgaccggcagccctgaggacaggagcagaggagagcacagcagcaccctgcctgccagcacccccagctacaccagcggcaccagccccaccagcctgagcagcctggaggaggacagcgacagcagccccagccggcggcagaggctggaggaggccaagcagcagaggaaggcccggcacaggagccacggccccctgctgcccaccatcgaggacagcagcgaggaggaggagctgcgggaggaggaggagctgctgcgggagcaggagaagatgagggaggtggagcagcagaggatccgcagcacagccaggaagacccggcgggacaaggaggagctgcgggcccagaggcggcgggagaggagcaagaccccacccagcaacctgagccccattgaagatgccagccccacagaggagctgcggcaggccgctgagatggaggagctgcacaggagcagctgcagcgagtacagccccagccccagcctggacagcgaggccgaggccctggatggcggccccagccggctgtacaagagcggcagcgagtacaacctgcccaccttcatgagcctgtacagccccacagagaccccatctggcagcagcaccacccccagcagcggccggcccctgaagtctgctgaggaggcctatgaggagatgatgaggaaggccgagctgctgcagaggcagcagggccaggccgccggggcccggggcccccacggcggccccagccagcccaccggcccccggggcctgggcagctttgagtaccaggacaccacagaccgggagtatggccaggccgcccagcctgctgctgagggcaccccagccagcctgggcgctgctgtgtatgaggagatcctgcagaccagccagagcatcgtgaggatgaggcaggccagcagccgggacctggcctttgctgaggacaagaagaaggagaagcagttcctgaatgctgagagcgcctacatggaccccatgaagcagaatggaggccccctgaccccaggcaccagccccacccagctggccgcccctgtgtccttcagcacccccaccagcagtgacagcagcggcggccgggtcatcccagatgtgcgggtgacccagcactttgccaaggagacccaggaccccctgaagctgcacagcagccctgccagccccagcagcgccagcaaggagatcggcatgcccttcagccagggccctggcaccccagccaccacagctgtggccccctgcccagctggcctgccccggggctacatgaccccagccagccctgctggcagcgagaggagccccagccccagcagcacagcccacagctatggccacagccccaccacagccaactacggcagccagacagaggacctgccccaggcccccagcggcctggccgctgctggccgggccgcccgggagaagcccctgagcgccagtgatggagagggcggcaccccccagcccagccgggcctacagctactttgccagcagcagcccccccctgagccccagcagccccagcgagagccccaccttcagccctgggaagatgggcccccgggccacagctgagttcagcacccagacccccagccctgccccagccagtgacatgcccaggagccctggggcccccacccccagccccatggtggcccagggcacccagaccccccaccggcccagcaccccccggctggtgtggcaggagagcagccaggaggcccccttcatggtgatcaccctggccagtgatgccagcagccagaccaggatggtgcacgccagcgccagcaccagccccctgtgcagccccacagagacccagcccaccacccacggctacagccagaccaccccaccttctgtgtcccagctgcccccagagcccccaggccccccaggcttcccccgggtgcccagcgctggagcagatggccccctggccctgtatggctggggcgccctgcctgctgagaacatcagcctgtgccgcatcagctctgtgcccggcaccagccgggtggagcccggccccaggaccccaggcacagctgtggtggacctgaggacagctgtgaagcccacccccatcatcctgacagaccagggcatggacctgaccagcctggccgtggaggccaggaaatatggcctggccctggaccccatccctggccggcagagcacagctgtgcagcccctggtgatcaacctgaatgcccaggagcacaccttcctggccacagccaccaccgtgtccatcaccatggccagctctgtgttcatggcccagcagaagcagcctgtggtgtatggagacccctaccagagccggctggactttggccagggcggcggcagccctgtgtgcctggcccaggtgaagcaggtggagcaggccgtgcagacagccccctaccgcagcggcccccggggccggccccgggaggccaagtttgcccgctacaacctgcccaaccaggtggcccccctggccaggagagatgtgctgatcacccagatgggcacagcccagagcatcggcctgaagccaggccctgtgcctgagcctggagctgagccccaccgggccaccccagctgagctgcggagccacgccctgcccggggccaggaagccccacacagtggtggtgcagatgggagagggcacagctggcaccgtgaccaccctgctgcctgaggagcctgctggggccctggacctgaccggcatgaggcctgagagccagctggcctgctgtgacatggtgtacaagctgcccttcggcagcagctgcaccggcaccttccacccagcccccagcgtgcctgagaagtccatggctgatgctgcccctcctggccagagcagcagccccttctacggcccccgggaccctgagcccccagagccccccacctaccgggcccagggcgtggtgggccctggcccccatgaggagcagaggccctacccccagggcctgcccggccgcctgtacagctccatgtctgacaccaacctggccgaggccggcctgaactaccacgcccagagaattggccagctgttccagggccctggccgggacagcgccatggacctgagcagcctgaagcacagctacagcctgggctttgctgatggccgctacctgggccagggcctgcagtatggctctgtgacagacctgcggcaccccacagacctgctggcccaccccctgcccatgaggcgctacagctctgtgagcaacatctacagcgaccacagatatggccccagaggagatgctgtgggcttccaggaggccagcctggcccagtacagcgccaccacagcccgggagatcagcaggatgtgtgccgccctgaacagcatggaccagtatggaggaagacatggcagcggcggcggcggccctgacctggtgcagtaccagccccagcacggccctggcctgagcgccccccagagcctggtgcccctgcggcccggcctgctgggcaaccccaccttccctgagggccaccccagccctggcaacctggcccagtatggccctgctgctggccagggcacagctgtgcggcagctgctgcccagcacagccaccgtgcgggcagcagatggcatgatctacagcaccatcaacacccccatcgccgccaccctgcccatcaccacccagcctgcctctgtgctgcggcccatggtgcggggcggcatgtaccggccctatgccagcggcggcatcacagctgtgcccctgaccagcctgaccagggtgcccatgattgccccccgggtgcccctgggccccaccggcctgtaccgctacccagcccccagccgcttccccatcgccagctctgtgcccccagctgagggccctgtgtacctgggcaagccagctgctgccaaggcccctggagctgggggccccagcaggcctgagatgcctgtgggcgccgcccgggaggagcccctgcccaccaccaccccagctgccatcaaggaggccgccggggccccagccccagcccccctggccggccagaagcccccagcagatgctgcccctgggggcggcagcggggccctgagccggcccggctttgagaaggaggaggccagccaggaggagcggcagaggaagcagcaggagcagctgctgcagctggagcgggagcgggtggagctggagaagctgcggcagctgcggctgcaggaggagctggagcgggagcgggtggagctgcagaggcaccgggaggaggagcagctgctggtgcagcgggagctgcaggagctgcagaccatcaagcaccacgtgctgcagcagcagcaggaggagcggcaggcccagtttgccctgcagcgggagcagctggcccagcagaggctgcagctggagcagatccagcagctgcagcagcagctgcagcagcagctggaggagcagaagcagaggcagaaggcccccttccctgctgcctgtgaggcccctggccggggcccccccctggccgctgctgagctggcccagaatggccagtactggccacccctgacccacgccgccttcatcgccatggccggccctgagggcctgggccagccccgggagcctgtgctgcaccggggcctgcccagcagcgccagtgacatgagcctgcagacagaggagcagtgggaggccagccgcagcggcatcaagaagaggcacagcatgccccggctgagagatgcctgtgagctggagagcggcacagagccctgtgtggtgagaagaattgctgacagctctgtgcagacagatgatgaagatggagagagccgctacctgctgagcagaagaagaagagccaggagatctgctgactgcagcgtgcagacagatgatgaagattctgctgagtgggagcagcctgtgagaagaagaagaagccggctgcccaggcacagcgacagcggcagtgacagcaagcatgatgccacagccagcagcagcagcgctgctgccaccgtgcgggccatgagctctgtgggcatccagaccatcagtgactgcagcgtgcagacagagccagaccagctgccccgggtgtccccagccatccacatcacagctgccacagaccccaaggtggagatcgtgcgctacatcagcgcccctgagaagacaggccgcggggagagcctggcctgccagacagagccagatggccaggcccagggcgtggccggcccccagctggtgggccccacagccatcagcccctacctgcccggcatccagatcgtgaccccaggccccctgggccgctttgagaagaagaagccagaccccctggagatcggctaccaggcccacctgcccccagagagcctgagccagctggtgtcccggcagccccccaagagcccccaggtgctgtacagccctgtgagccccctgagcccccaccggctgctggacaccagctttgccagcagcgagcggctgaacaaggcccacgtgagcccccagaagcacttcaccgctgacagcgccctgcggcagcagaccctgccccggcccatgaagaccctgcagaggagcctgagtgaccccaagcccctgagccccacagctgaggagagcgccaaggagcgcttcagcctgtaccagcaccagggcggcctgggcagccaggtgtctgccctgccccccaacagcctggtgaggaaggtgaagaggaccctgcccagccccccacctgaggaggcccacctgcccctggccggccaggccagcccccagctgtatgctgccagcctgctgcagaggggcctgaccggccccaccaccgtgcctgccaccaaggccagcctgctgcgggagctggaccgggacctgcggctggtggagcacgagagcaccaagctgaggaagaagcaggccgagctggatgaggaggagaaggagattgatgccaagctgaagtacctggagctgggcatcacccagaggaaggagagcctggccaaggacagaggaggccgggactacccacccctgcggggcctgggggagcaccgggactacctgagtgacagcgagctgaaccagctgcggctgcagggctgcaccaccccagctggccagtttgtggacttccctgccacagctgctgccccagccacccccagcggccccacagccttccagcagccccgcttccagcccccagccccccagtacagcgctggcagcggcggccccacccagaatggcttccctgcccaccaggcccccacctacccaggccccagcacctacccagccccagccttccccccaggggccagctacccagctgagcccggcctgcccaaccagcaggccttccggcccaccggccactacgccggccagacccccatgcccaccacccagagcaccctcttccctgtgcctgctgacagccgggcccccctgcagaagccccggcagaccagcctggccgacctggagcagaaggtgcccaccaactatgaagtcatcgccagccctgtggtgcccatgagcagcgcccccagcgagaccagctacagcggccctgctgtgagcagcggctatgagcagggcaaggtgcctgaggtgccccgggccggggaccggggctctgtgtcccagagccctgcccccacctaccccagcgacagccactacaccagcctggagcagaatgtgcccagaaattatgtgatgattgatgacatcagcgagctgaccaaggacagcaccagcacagccccagacagccagaggctggagcccctgggccctggcagcagcggccggcctgggaaggagcctggagagcccggggtgctggatggccccaccctgccctgctgctacgcccggggggaggaggagagtgaagaagattcctatgacccccggggcaaaggaggccacctgcgctccatggagagcaatggccggcctgccagcacccactactacggggacagcgactacagacatggagcccgggtggagaagtatggccctggccccatgggccccaagcaccccagcaagagcctggccccagctgccatcagcagcaagaggagcaagcacaggaagcagggcatggagcagaagatcagcaagttcagccccatcgaggaggccaaggatgtggagagtgacctggccagctacccacctcctgctgtgagcagcagcctggtgtcccggggcaggaagttccaggatgagatcacctacggcctgaagaagaatgtgtatgagcagcagaagtactacggcatgagcagcagagatgctgtggaggatgaccgcatctatggaggcagcagccgcagccgggcccccagcgcctacagcggggagaagctgagcagccatgacttcagcggctggggcaagggctatgaaagagagcgggaggccgtggagcggctgcagaaggccggccccaagcccagcagcctgtccatggcccacagccgggtgcggccccccatgaggagccaggccagcgaggaggagagccctgtgagccccctgggccggcccaggcctgctgggggccccctgcccccaggaggagacacctgcccccagttctgcagcagccacagcatgccagatgtgcaggagcacgtgaaggatggcccccgggcccacgcctacaagcgggaggagggctacatcctggatgacagccactgtgtggtgtctgattctgaggcctaccacctgggccaggaggagacagactggtttgacaagcccagagatgcccggagtgaccgcttccgccaccacggcggccatgctgtgagcagcagcagccagaagaggggccctgcccggcacagctaccatgactatgatgagcccccagaggagggcctgtggccccatgatgagggcggccctggaagacatgccagcgccaaggagcacagacatggagaccacggccgccacagcggccgccacactggagaggagcccggccggcgggccgccaagccccacgcccgggacctgggcagacatgaggcccggccccacagccagcccagcagcgccccagccatgcccaagaagggccagcccggctaccccagcagcgctgagtacagccagcccagccgggccagcagcgcctaccaccacgccagtgacagcaagaagggcagccggcaggcccacagcggccctgctgccctgcagagcaaggccgagccccaggcccagccccagctgcagggccggcaggccgcccctggcccccagcagagccagagccccagcagccggcagatccccagcggggccgccagccggcagccccagacccagcagcagcagcagggcctgggcctgcagcccccccagcaggccctgacccaggcccggctgcagcagcagagccagcccaccacccggggcagcgccccagctgccagccagcctgctgggaagccccagcccggccccagcacagccaccggcccccagcctgctggcccccccagggctgagcagaccaacggcagcaagggcacagccaaggccccccagcagggccgggccccccaggcccagcctgcccctggccctggccctgctggggtgaaggccggggcccggcctgggggcacccctggggccccagctggccagcccggggctgatggagagagcgtcttcagcaagatcctgcctggaggagctgctgagcaggccggcaagctgacagaggccgtgtctgccttcggcaagaagttcagcagcttctggtag

SEQ ID NO: 138435 - DNA, 11781 bp, Artificial Sequence
  derived and/or modified sequence
atgggcaacgaggtgagcctggagggcggcgccggcgacggccccctacccccaggtggagccggcccagggcccgggcccggaccaggacccggagcgggtaagcccccctcagctcccgccggaggcggacagctaccagccgccggggccgctcggtcgacagctgtgcctccagtgcccggccccggcccagggccaggaccaggacccggtcctggatcaacgagccgccggctggatcccaaagagccattggggaatcagagagccgcttctcccacacctaagcaggcttccgccaccactccgggacacgagagccctagagaaacccgggcccagggacctgctggccaggaggctgacgggccccgaaggacactgcaagttgactctcgtacacagcgatctgggcggtctcccagcgttagccctgatcgcggttccacccctacttctccttactccgtgcctcagatagctcccttgccctcttccaccctctgtccgatttgtaagacctcagatctcacatcgaccccaagtcagcctaatttcaacacctgtacgcagtgtcataacaaagtctgtaaccaatgcggtttcaaccccaatccgcacctgacacaggtcaaggagtggctgtgcttaaattgtcagatgcagcgcgcgctgggcatggatatgaccacagcaccccggtccaagtctcagcaacaactgcattcccctgcccttagtcccgcgcactcaccggctaagcaacctctgggaaaacccgatcaggagcgaagtagaggcccaggggggccccaacctggcagtcgtcaggccgaaacagctcgtgcgacctcagttcccggtccggctcaagcggcagccccacctgaggtcgggcgggtttctccacagcccccacagcccacaaaaccatctacagcagagcccaggcctcctgcgggagaagccccagccaaatccgccacagctgtgcccgccggtctgggagctactgagcaaacgcaggagggcctgacaggcaaactgtttggacttggcgcgtcattactcacgcaggcttctactctcatgtccgtccagcctgaggccgacactcagggtcaaccggctccctcgaagggaaccccgaaaatcgtgtttaacgatgcatcgaaggaagccggccccaaacctctgggctcaggtcctggtccaggtcccgctcctggcgcaaaaactgagccaggagcgcgcatgggtcccgggagcggccctggtgctctcccaaagacgggtggcaccactagtcctaagcatggccgggcagagcatcaggccgccagcaaggccgccgccaagcccaagaccatgcctaaggaacgcgcaatttgccctctgtgccaggctgagttgaatgttggctccaaaagtcccgcgaattacaatacctgtactacatgtcgcctgcaagtatgtaatctgtgtggtttcaatcccaccccgcatctggtcgaaaagactgagtggctgtgcctaaactgtcagactaagcggttgctcgaaggtagcctcggcgagcccacacctttgccgccacccacctcacagcaaccccctgtcggcgcaccacatcgcgcttccggtacatcaccacttaaacagaagggtccacaagggttggggcagccaagtgggcccctacccgcaaaagctagtccactgtctaccaaagcctctcctttacccagtaaagcttcaccacaggctaagccccttcgggccagcgagcctagcaaaaccccttcctctgtgcaggaaaagaagacacgggtaccgaccaaagctgagccaatgcctaaaccccctccggaaactactcccacgcctgctacacccaaggtaaagagtggggttagaagggccgagcctgcgactccagtagtcaaagctgtccctgaggctcctaaggggggagaagctgaagaccttgtcgggaaaccctactcccaagatgcaagcagaagccctcagagcctgtcagacactgggtactcttctgatggaatttcatcatcccagtcggagataacgggagtggtgcagcaagaggtcgagcagctggatagcgcaggggtgactggacctcaccctccatccccatctgagattcataaggtcggcagttcaatgagaccacttctgcaagcccagggcctcgcaccctctgaacggtcgaaacctctatcttctggaacgggagaagagcagaaacagagacctcattcactgagcatcactccagaggcttttgattctgatgaagagctagaggatatcctggaagaagacgaagactctgccgagtggcgccgccggagggaacaacaggataccgctgaatcaagcgatgactttggcagccagcttagacacgactatgtggaagacagttcggaaggaggcctctcacctcttcccccgcagccacctgcccgagctgccgaattaacagacgaggactttatgcgccgccaaatcttagaaatgtctgcagaggaggacaatctagaagaagatgatactgccacctccggaagagggctcgccaagcatggcacacagaaaggaggccctagacctagaccggaacctagccaagaacccgcagctctgcccaagcgtaggctgcctcataacgcaactacgggctatgaggaactgctcccagaggggggaagtgcagaggctacagacggcagtggcacattacagggcggcctgcgaagattcaagactattgagctcaacagtaccggcagttacggacatgagttggatcttggccaagggcctgatccctccctggaccgggagccggaactggaaatggaatccctgacgggctcccccgaagatcggtccagaggtgagcactcttctacactccctgccagtaccccttcttacacaagtggaacgtctccaacctccttgtcctccctggaagaggacagcgattcgtcccctagccgaaggcagcgcttggaggaggccaagcagcagcgcaaggcacgccataggtcacatggacctctgttgcctaccatcgaggattcttcggaggaagaagaactgagagaggaagaagagctgctgcgtgaacaggagaagatgagggaagtcgagcagcagaggatccgatctacagctaggaaaactaggcgtgacaaggaggagttacgtgcgcagcggaggagggagcgatctaagactccccctagcaacctcagtccgatagaggatgcctcgcccactgaggaacttcgtcaggcagcagagatggaggaactccacagatcgagctgtagtgagtacagtccatctccctctctcgacagtgaggcggaggcattagacggaggtccatcccgactgtacaagtcagggtcagagtacaaccttccaacatttatgagcctgtacagtcctacagaaacaccatccgggagttccaccaccccatcctccggcagacctttgaaatctgctgaagaagcttacgaggaaatgatgcgtaaggccgaactgctgcagcgtcaacaggggcaggccgccggagccagaggacctcacggaggacctagtcagccgacaggacctcgggggctgggtagttttgagtaccaggacacaacagatcgggagtacggacaggcggcccagcctgccgcggagggcacccctgccagcctgggggcagctgtgtatgaggaaatcttacagacctcacagagtatcgtccgcatgcggcaggcctcctcacgggaccttgctttcgcagaagacaaaaaaaaagagaaacaattcctgaacgctgaaagcgcctatatggacccaatgaaacaaaacggaggccccctgacccccgggacaagtcctacacagctggccgcacctgtctctttttctacaccaaccagttctgattccagtggtgggcgcgtcatccccgacgttcgtgtcacccaacacttcgcaaaagagacccaagatcctcttaaactgcatagttctccggccagtccatcctccgccagcaaagaaataggaatgccattttctcagggaccaggcacacctgctacaacagcagtggcaccatgccccgccggcctgccccgagggtatatgactccagccagccctgcagggagtgagcggtcaccatccccatcttccactgctcacagctacggacattccccgacaactgcgaactacgggtctcaaactgaagacctgcctcaggcacccagcggcctggcagccgccggtcgcgctgctcgtgaaaaacctcttagcgcctccgacggcgagggaggcacccctcagccaagtagggcctattcttactttgcctctagcagtccacccctgagcccctcctcaccctccgaaagtcctacgttttcgcccggcaaaatgggacctagagcaacagctgagttttccacacagaccccgtcgccagcccccgcttccgacatgcctcgctcccccggagctcccacaccaagccccatggttgctcagggtacgcagactccccatagacccagcaccccaagactggtatggcaggaatctagccaggaggcaccctttatggttatcactctggcctccgatgcctcctcacagaccagaatggtgcatgctagcgccagtacctcccccttatgcagtccgaccgagacgcagcctaccacacacggttactcccagacgacaccaccctccgtgtcccaactcccacctgaacccccgggcccccctggattcccaagagtcccttctgcgggcgccgacggccccctggcgttgtacggttggggtgccctcccggccgaaaatatctctctctgcaggataagctccgtacctgggaccagtcgggtcgagcctggaccccggacccctggaacagctgtggttgacctcagaacagccgtcaaaccgaccccaatcatcctgaccgaccagggcatggacttaacgtcgcttgccgttgaggccaggaagtacggactggcactcgatcctatccccggccggcaaagtacggccgtgcagccgctggtcattaacctaaatgcccaggaacacacctttctcgcgacagctaccacagtctccatcacaatggcttctagtgtgttcatggcccagcagaaacagccagtggtgtacggcgacccctaccaatccagactggactttggccagggcggcggaagccccgtgtgtctcgcccaggttaaacaggtggaacaggccgtacagacagcaccttataggagtgggccccgtggccgacccagagaggccaaatttgcgcggtacaacttgcccaaccaggtggctcccttagctagacgagatgttttgattactcagatggggaccgcacagagtatcggcttgaaacctgggcctgtgccagagccgggcgcggaacctcatcgggcgacgcctgcagagcttcgaagccatgcgctgcctggagcccgtaaaccgcatacagttgtcgtccagatgggggagggaactgccggtacagttacaaccctgttgccggaggaacccgccggggccttagatctgaccggtatgcggccggagagtcaactagcctgctgcgacatggtgtataaattaccctttggctcaagctgtacgggtacgttccatcctgccccttcagtgcctgagaagtcaatggcagatgctgcgcctcctggccagagcagcagccccttttatggcccacgcgacccagaacccccagagccacctacttatagagcccagggggtcgtgggcccggggccccacgaggagcagcgaccgtatccccagggcctgcccggacgcctgtacagcagcatgtcggataccaatctggccgaggcagggttgaattatcatgctcaacgtatcggacagctctttcaaggccctggccgggattctgcgatggatctcagtagcctaaagcatagctactccctgggctttgcagacggtaggtacctgggccagggcttacagtacggctctgtgactgatctgcgtcacccaactgatctcctggctcaccccctgccaatgcggaggtattcaagtgtctccaacatatattccgatcaccgttacgggccacggggcgacgcagttgggttccaggaggcaagcttagcacagtacagcgctacaacggcccgagaaatctcgcgcatgtgcgccgccctgaattcaatggaccagtatgggggacgacatgggtcaggcggcggaggcccagatcttgttcagtaccagccccaacacggacctggcctctctgcaccacagagcctggttccgctcagacctggcctccttggcaaccctacgttcccagaggggcatcccagccctggcaacttggctcaatacggaccagcagccgggcagggtaccgccgtccgccagctgctgccttctactgctaccgtgagggcagcggatggtatgatatatagtaccattaatacaccgatagctgccaccttgccaataactacacagcctgcctcagtcctgcgccctatggtccggggtgggatgtatcgaccctacgcctccggcggaataaccgccgtgcctctcacctccctcacccgcgtacctatgattgcccctagggttccattgggtcccactgggctgtaccgttatcctgctccatctagattccctattgcgtccagcgtccctcctgctgagggaccggtgtacctcggaaagcccgcagctgcgaaggcaccaggagcgggcggcccctcaagacccgaaatgcccgtgggcgcagcccgtgaggagcccctgcccacaaccacccccgccgccatcaaggaggctgccggcgctcctgcccccgctcctttggctggtcagaaaccgcctgccgacgctgctcccggtggggggtcaggcgccctaagccggccgggtttcgaaaaggaagaagcttctcaggaagaacgacaacggaaacagcaggagcagctgcttcagttagagcgggaacgggtcgagctggaaaaacttcggcagctgagactgcaggaggaactggagcgagaacgggtggagctgcagaggcatcgggaggaagaacaactgctggtccaaagagagctgcaggagctgcagactattaagcaccatgtgctgcagcagcaacaggaggagcggcaggcacagtttgcactccaaagagagcagctggctcagcaacggctccagctggagcagatccaacaacttcagcagcagcttcagcagcagctggaagagcagaagcagagacagaaagcgcctttcccagcagcttgtgaagcacctggccggggcccccctctggctgccgctgaattggctcagaacggccaatactggccccccctgacgcacgccgcatttatcgcgatggcaggcccagaggggttggggcagcctagagagccagtgctgcacaggggcctgccaagctccgcgtcagatatgagcctgcagaccgaggaacagtgggaagcaagtcgatcagggattaagaagcggcactcaatgccccgactgagggatgcttgcgagttggagtctggcaccgagccatgcgtcgtgcgccggattgccgatagctcagtgcagacagatgatgaggacggcgaatccaggtatctgctttcgagaaggcgacgagccagaagatccgctgattgcagcgtgcagactgacgatgaggattctgcagagtgggaacagcccgttcgccgacggaggagtagactaccccggcatagcgacagtggtagcgatagtaaacacgatgccactgccagctcaagcagcgccgccgccactgtgagggcaatgtccagcgtggggattcagactataagcgattgcagcgtgcaaactgagccagatcagcttccacgcgttagtccagccatacatattactgcagccaccgacccgaaagtagaaatcgtacgctatatcagcgcacccgaaaagacaggccgaggagagtccctcgcttgccagacagaacccgatggtcaggcgcaaggagtggcagggccccagttggtgggtcccacagccatcagcccatatctccctggaatccaaatagtgactcccggcccactgggacgcttcgaaaagaaaaaaccagaccctctagagataggataccaggctcatctgccacccgaatctctgtcccagctcgtttcccggcagcccccaaaatcacctcaggtattgtatagccctgtcagtcccttaagtccgcacagactgctcgataccagcttcgcctcgagcgagaggttaaataaagctcacgtttccccacagaaacacttcacggccgattccgctctgagacagcaaacactacctagacccatgaagacactccagaggtcactgtctgatcccaagcctttgagtccaaccgcagaggagtccgccaaggaaagatttagcttgtaccagcaccaaggcggactggggtcccaggtgagtgctctccctcctaactctttggtccgcaaagtgaaacggacattgccatctcctccccctgaggaggcccacctgcctctggcaggccaggcttctccacagctttacgcagcctccctactccaaaggggcctgacaggtcccaccaccgtgccagctacgaaggcttctctcctgcgtgagttggacagagatctaagactggtagagcatgaatctaccaaacttagaaaaaaacaggccgaacttgatgaagaagagaaagaaatcgacgcaaaactgaagtacctggagcttggtataacccagaggaaggagtccctggctaaagaccgcggaggaagggattacccaccactgagaggccttggggagcaccgagactatctgagcgattcagagttaaaccaattaagactgcaagggtgcacaacaccagctggtcagtttgtggatttccctgcaacggccgcggcgccagcgacaccgtcagggccaacagcctttcaacagcctcgcttccaacccccagccccacagtacagtgctggtagcggcgggccaacccagaatggtttccctgctcaccaagcaccaacttaccctgggcccagcacataccccgcacccgctttccctcctggtgctagttacccggcagaaccaggcctgcccaatcagcaagcctttcgcccaacgggccactatgccggtcagacgcctatgcccacgacacaaagcacgttgttccccgtgcctgctgattctagggcaccactacagaaaccacggcagacttctctcgccgatctagagcagaaagtgccaactaactacgaggttattgcctcacccgttgtgcccatgtcctctgccccctctgagactagctattcagggcctgcagtgtcttctggttacgagcaggggaaggtgccagaagtgcctcgagctggtgatcgcggatctgtcagtcaaagtcccgcaccgacctaccccagcgactctcactatacttcattagaacaaaatgtcccccgcaattatgttatgatcgacgacattagcgaactcacgaaagatagcacctctaccgccccggacagtcaacggctggaacctcttgggcctgggagctccgggagacctggaaaggaaccgggggagccgggagtcctcgacggccctacactgccatgttgttatgcccgcggtgaggaggagagtgaagaggacagctatgatcctaggggcaagggaggccatcttagatcgatggagtcaaatggtcgaccagcctccacccactactatggcgattctgattacagacatggcgctagagtagaaaaatatggtcctgggccgatggggccaaaacatccctctaagagcttggcccctgccgccatatcatccaaacgctccaaacaccggaaacagggcatggagcagaaaatcagcaagttctcccccattgaggaggccaaagatgtggaatcagatctagcatcataccccccccccgcagtgtcttcctctctagtcagccgcggccgcaagttccaggatgagatcacgtatgggcttaaaaaaaacgtttacgaacagcagaagtattacgggatgagttctagagacgcagtcgaagacgacagaatttacggagggagctctaggtcccgggcacctagtgcctactcaggagaaaagctgtcgagtcatgacttctcaggctgggggaagggctacgagcgcgagcgagaggctgtggagaggttgcagaaagctggccccaagccaagctcactcagcatggctcacagcagagtaagacctcccatgcggtcacaggcttcagaggaagaaagtccagtctctcccctggggcgcccacgcccagcgggcggtcctcttcctcctggtggcgacacctgtccacagttttgcagttctcatagtatgcctgacgtgcaggagcacgtgaaggacggcccgagggctcacgcatacaaacgggaagaagggtatattctggacgacagccactgcgttgtctccgattctgaggcttaccacttaggtcaggaagaaaccgattggtttgacaaaccccgagatgctagatctgacagatttcgacatcacgggggacacgccgtaagttctagttcccagaagagaggtcccgcccgccattcttatcacgactacgacgaaccacccgaagagggcctatggccccatgacgagggcgggccaggccgacatgccagtgcaaaagaacacagacacggcgaccacggtcgtcactctggacgtcacactggagaggaaccaggccgcagagctgccaagccacacgcacgcgatctcgggcgtcacgaggctagacctcattcccagccctccagtgctccagctatgcccaagaaaggccaacccggctatccctcctcggctgaatatagtcagccctcacgtgcctctagcgcttaccaccatgcatctgactctaagaaaggctcccgccaagcacacagcggaccggcagctttgcaatccaaagcggaacctcaggcccaacctcagctgcaagggagacaggcagccccaggaccacagcaaagccagagcccctctagcaggcaaatcccttcgggcgctgcttcacgtcagccgcagactcagcagcagcagcaagggttaggtcttcagccgccccagcaggctctgacgcaggctcgcctgcagcagcagtcccaacctactactaggggatcagctcccgctgcgtcacagccagccggtaagccccaacccggaccttcgaccgcgaccggaccccagcccgccgggccacctagggccgagcagaccaacggctcaaagggaaccgccaaggcccctcagcagggccgcgcacctcaggcccagccagcgccggggccaggtcctgccggagtgaaggcgggggcacggccaggcgggacacccggtgccccagccgggcaacccggtgccgacggcgaaagtgtgtttagtaagattctgcctggcggcgctgccgagcaggccggaaagctgacagaagccgtttccgccttcgggaagaaattttcaagtttttggtag

SEQ ID NO: 138436 - DNA, 11781 bp, Artificial Sequence
  derived and/or modified sequence
atgggaaatgaggtctcgctggagggaggggctggagatggacccctacctccgggaggtgccggtcccggtcccggtcctggtcctggacctggcgcagggaagcccccatccgccccagccggaggaggtcagctccccgcagctggtgccgcacgaagcaccgctgtaccccctgtcccagggccagggcctggcccaggcccagggcctggcccaggctcaacttcgcgtaggctcgaccctaaagaacccctgggcaaccagcgggcagcatcacccacacctaaacaggcatcagccacgacaccgggtcacgaatccccccgagagactcgcgcacagggacctgctggccaagaggccgacggccctcgtaggactctacaagtggattccaggactcagagaagcgggagaagtccgagtgttagtcccgaccgcggaagtactcctactagcccctactccgttccccagatcgcgccattgccatcaagcaccttgtgccctatctgcaaaacctcagacttgaccagtactccctctcagccaaattttaatacctgcacacagtgccacaacaaggtgtgtaaccagtgcggctttaacccaaacccccacctgacccaagtgaaggagtggctctgcttgaattgccagatgcagcgcgctctcggcatggacatgacaaccgctcccagatcgaaaagccaacagcagttgcactctccagccctgtccccagcccattctcccgctaagcagcctctggggaagcccgaccaggaacgtagccgaggtcccggaggaccccagccaggcagccgccaagccgagacagccagggcgaccagtgtcccaggtcccgcacaggctgctgctcctcccgaggtggggagggtgtcaccgcagccacctcaacctactaagccgtctacggccgagccaaggcctccagctggtgaagctcccgctaagtcagcgactgccgtaccggctgggttgggcgcaaccgagcaaactcaagagggccttactggaaaactttttgggctcggtgcgtcattgcttacccaggcttccactttgatgtccgtacagcccgaggccgatacacaagggcagcccgcaccatctaaggggacacccaaaatcgtctttaatgacgcttcaaaagaggccggtccgaagcccctcggcagcgggcctggtcctgggccagcccctggggctaaaacagagccaggcgcaagaatggggccagggagtggcccaggcgctctgcctaagacaggcggaactacttcgccaaagcacgggcgtgccgaacatcaagcggcttcgaaagcagccgcaaagcctaaaacaatgccaaaggagagagccatatgcccactgtgccaagctgagctcaacgtgggctccaaatcgccagccaattataacacctgtacgacctgtagactgcaggtttgcaatctgtgcggattcaaccctactccacatttggtggagaaaaccgaatggctgtgccttaactgtcaaaccaagcgactgcttgagggtagtttgggcgagccaacgccactccctccacccaccagccagcagccaccggtgggagctccacatcgcgcatcaggcacaagcccacttaaacaaaaagggcctcaggggcttggacaaccatccggcccactgccagctaaggcctctccactgagcaccaaggcctcacctttgccaagcaaggcaagtccgcaggctaagcccctgcgtgcctccgaacctagtaaaaccccttcttcggtgcaggaaaaaaaaacaagagtccccaccaaggccgagccaatgcctaaacctccacccgagaccaccccgacccctgcaacaccaaaagtcaaatccggggttcgtagagctgaacccgctactccagtggtgaaagcagtgccagaagcaccaaagggaggagaagcagaggatctcgtgggaaagccatactctcaggacgcatccaggtctccccagtccctttccgacacggggtactcctccgacggcatcagtagcagccagagcgagataaccggggtcgtccagcaggaagtcgagcagctcgactctgctggcgttaccgggccacacccgccaagcccctcggaaattcacaaagtgggctcttctatgcgccctctgctccaagctcagggtcttgcccctagcgagcgctcaaaacccttgagctccgggacaggcgaggagcaaaaacagagaccacacagcctgtcaattacaccagaggccttcgacagtgacgaggaactggaagatatcttggaggaggacgaggactcagccgaatggcggagacgcagagaacagcaggacacagccgagtccagcgatgactttggctcacaactgcgccacgactacgtggaggactctagcgagggaggtctctccccgctacccccacagccccctgcccgagcggctgagctaactgacgaagacttcatgaggcgacagattctcgaaatgtcagcggaggaggacaatctggaagaggatgatacggccaccagcggcagaggcctggccaaacatgggacccagaagggagggcctagaccacgacccgagccctcacaggaaccagccgctctcccaaagcgaagattgcctcacaacgcgacaaccggttatgaggagctccttcccgaggggggttcagctgaggcaaccgacgggtccgggactcttcaagggggactcagaaggttcaagacaattgagctgaactccacaggcagctacggccatgagctcgatttgggccagggacccgaccctagcctggatcgcgagccggaactcgagatggaaagtctgaccggttcgcccgaagaccgcagtcgaggagaacacagctccacgttgccagcttctacacccagctacacatcggggaccagcccgacctccctcagcagcctggaagaagatagtgactcttctccatcgcgacggcaacgtttggaggaggccaaacagcaaagaaaagctagacaccgatcacatggcccactgctgccaacgattgaggacagttcagaagaggaagagctgcgcgaagaagaggagctcctgcgtgagcaggagaaaatgagggaggtcgagcagcagaggattcgctctaccgcgcgaaaaaccaggcgggataaggaggagctgcgcgcacagcggagaagggaacggtctaaaactccgccatcaaatctgtctccaatcgaagatgcctcccccacagaggaactgaggcaagcagccgagatggaagagcttcaccgctcctcttgctccgaatacagccctagccccagcttggactccgaggccgaggcactggatggaggaccctccaggctgtataaaagtggaagtgagtacaaccttcctacctttatgagtctctacagtccaacagaaacaccaagcggatcttctacaaccccttctagcgggcgacccctgaagtccgccgaggaagcctacgaagaaatgatgaggaaggctgaacttctgcaacgccagcaaggacaggctgcaggagctcgcggaccacacgggggacccagccaacctaccggaccgaggggactaggcagcttcgagtaccaggatactactgacagagagtatggccaggcggcacaacccgcagcagagggtactccggcatctctgggcgcagctgtatacgaggagatcctccagacctcacagtctatagttagaatgcgccaagcaagttcccgcgacctggcattcgccgaagataaaaagaaagaaaaacagttcctgaacgccgaatctgcatacatggaccccatgaagcagaacgggggaccactcactccagggacgtcccccacacagcttgctgcgcctgtgtccttcagcacccccaccagctcagattcaagtggaggcagagtaatcccggacgtgagagtgacacagcactttgccaaagagacccaggaccctttgaagcttcattcttctcccgcaagtccaagcagtgcgagcaaagaaatcggtatgcccttcagtcaggggcctgggactccagccacaacggcagttgccccttgtccagctggtttgcccagaggttatatgacccccgcttccccagctgggtcagagaggtccccatcgccctcttctacagcacacagctacgggcactccccaaccacagccaactatggcagccagaccgaagatctgcctcaggcacctagcggcttggccgcagcaggtcgcgcagccagggaaaaaccactctccgcatctgacggcgagggcggaaccccccagccttcaagggcttactcctactttgcctcgtcttctccacctcttagccccagttctccgtccgaatcccctactttctcgcccggaaagatggggccacgggctaccgcggaatttagcacacaaacgccatcaccagcccctgcgtccgacatgcctcgtagcccaggcgcacccacaccgtcacctatggtcgcccaggggacacagacaccccacaggcctagtacaccaaggctggtgtggcaagagtctagccaggaagcaccctttatggtgattacattggcttctgacgcctcctcccaaacgcggatggtgcacgcttccgcttctacatcccctctgtgttcccccacagagacacagcccaccactcacggatacagtcagaccacacccccatctgtgagccagctgccaccagagcctccgggaccccctggattccctcgcgtgccttctgcgggtgcagatgggcctcttgccctctacggctggggtgcacttcctgcagagaacatcagtctgtgtaggatatcctcagtgcctggtacttcaagagtggaaccaggccctaggaccccgggaacggcagtggtcgacctccggaccgcggtgaagcctacacctataatcctgacagatcaaggcatggaccttacctctttggcagtggaggctaggaaatatgggctcgcacttgacccaatccccggtcgccagtcaacggccgttcagccactcgtgatcaatctgaatgcccaggagcacaccttcctggcaaccgctaccactgttagtattaccatggcgtcaagcgtgtttatggcccaacagaaacagcctgtggtgtacggtgacccttatcaaagccggttagattttgggcagggtggcggatcccctgtgtgccttgcacaggtgaagcaggtcgaacaagctgtgcagacagcaccataccggtccggcccacggggacggccacgcgaggctaagttcgcgcgttataatctccccaaccaggtcgctcctctcgcccgtcgcgacgtgctaatcacccagatgggtactgcgcagtcaattggtttaaaacccggaccagtgccagaaccaggcgcagagccccaccgcgcaacacctgcagaactgaggtcacacgccctgcccggtgcaaggaagcctcacacagtggttgttcagatgggagagggtaccgctggtacagtgacaactcttctccctgaagagccagcgggagcacttgacctgacagggatgaggcctgagtcacaactggcatgctgcgatatggtgtacaagctgcccttcgggagcagctgtacaggcaccttccaccccgcaccatctgtccctgagaagtctatggcagatgccgctccacccggacagtcctcatctccgttctacggccctcgggaccccgagccaccagaacccccaacataccgcgctcaaggggtggtaggaccagggcctcacgaagaacaaaggccatacccacaggggctgcctggtcgactgtactcaagtatgtccgacaccaacctggctgaggccggattgaactatcacgcccagcgcatcggccaactattccagggcccagggagagatagcgctatggatctttctagtctgaaacattcctactcccttggctttgcagatggacgctacctcgggcaggggctgcagtatggctctgtgaccgacctgaggcatccgacagaccttctggctcatcctctccctatgagacgatactcctcggtcagtaacatctattcagaccacaggtacggtcccagaggcgatgccgttgggttccaggaggccagccttgcacagtactcagcaactaccgctcgagagatttcgcgaatgtgtgcagccttgaacagcatggaccagtacggcggtcgccatggatctggcggaggaggaccagacttggtccagtatcagcctcagcatgggccaggtctgagtgcccctcagtcactggttcccctccgtcccggtttgcttggtaatccaacattccccgaaggccaccccagtcctgggaatcttgcccagtacggaccggcagccggacagggcacagcggtgagacagctcctgccctctacggctaccgtacgagcagcagacggcatgatttattcgaccattaacacaccaattgccgctacgcttccaattaccacgcagcccgcaagtgtgctcagacccatggtgcgcggaggaatgtacagaccctatgcctctggtggcattactgcggtgcccctgaccagcctgaccagggtgccgatgatagccccaagggtccctctcgggcctacgggcctgtaccggtaccccgctccctcgcggtttcccatcgcctctagcgtgcccccagcggagggtccagtctatttgggtaagccagccgctgccaaggccccaggagcaggcggtccctctagacctgagatgcctgtcggtgccgctcgcgaggagcccctgcctactaccacccccgctgccattaaagaagccgctggggctcccgctcccgcaccactcgcgggacagaagccacccgctgacgctgctccgggtggcggttcaggggctcttagccgaccgggattcgaaaaggaagaagccagccaggaggaacgacagcggaagcagcaagaacagctgctgcagctcgaacgcgagcgcgttgaactcgagaagctgaggcagctgaggctgcaggaagagctggagcgggaaagagtggagctgcagcgacaccgcgaggaagagcagctactggtgcagagagagctgcaagaactccagacgatcaagcaccatgtgctgcaacagcaacaggaggagaggcaggcccagtttgcgcttcaaagagaacaattggcccaacagagactccagttagagcagatccaacagctccaacagcagttacagcagcagcttgaagaacaaaaacagcgacagaaggccccattcccggctgcttgcgaagcccctggcagggggcctcctcttgcagccgctgaattagcccaaaatggtcagtactggccgccactgacacacgctgccttcattgcgatggccggtcctgaagggctcggacaaccccgagagccagtgctccacagaggcctgccttcatcggcttcggacatgagcctgcagaccgaagagcagtgggaggcctctagaagcggcattaaaaagaggcactccatgccaaggctgcgagacgcctgcgagctggaatccggaacggagccttgtgtagttcgccgtatcgctgattcatccgtgcagacagacgacgaggatggtgagtcacggtacctcctgagccgtagaagaagagctcgacgttcagcagactgtagtgtccagactgatgacgaagactccgccgagtgggaacagcctgtgagacgcagaagaagccgattgccaaggcatagtgatagcgggtccgattccaaacacgacgcaactgcgtccagcagctcggcggctgccactgtcagagccatgagctccgtgggcatccagactatatcagactgctcagtgcagaccgaacccgatcaattacccagggtctctccagccatccacatcaccgccgctacggacccgaaggtggaaatcgtgaggtacatctccgccccagaaaagactggccgaggggagagcctcgcttgtcaaacagaacctgatggccaggctcagggcgtggcaggccctcagctggtaggccctacggctattagcccctatctgcctgggatacagatagtgacacccggaccacttgggagattcgagaaaaagaagcccgaccccctcgagattggctatcaggcacacttaccacctgagagtttgtcacagctggtgagccggcaaccaccaaagagtccgcaagttctctattcccctgtttctcctctatcccctcatcggctattggatacaagctttgccagctccgagcggctcaacaaagctcacgtcagccctcaaaagcacttcaccgccgactctgcgctccggcagcagaccttgcctcgcccaatgaagactcttcagcggtccttgtccgatccaaagcccctcagtcccactgccgaggagtcggccaaggagaggttctcactgtaccaacatcaggggggtctcggtagccaagtgagtgctctcccacctaattctctggtccgcaaggtcaagaggacactaccttccccacctcctgaggaggcacatctgccactggctggccaggcatccccccagctgtatgccgctagcctgctgcagcggggtctgaccggacctaccaccgtgcccgctaccaaagccagcctgctccgggagctggaccgtgatttgcgactagtggagcatgagagtacgaagttgcgcaaaaagcaggctgagttggacgaggaagagaaggagatcgacgccaagctgaagtacctggagctgggcattacccagcgcaaggagagccttgccaaagatagagggggacgcgattacccacctcttcgcggactgggtgagcacagggattacctgtcggactcagagctgaaccagttgagattacaggggtgtaccacacccgctggccagtttgtggactttcccgctaccgccgctgcaccggctacaccctccgggcctactgctttccaacagcccagattccagcccccagccccacagtactctgccggatcaggaggaccgacacagaacggttttcctgcccaccaggccccaacttatccgggaccctcaacgtatcccgcacccgcattccccccaggggcatcctatcccgcagaaccaggtttacccaatcagcaggcttttcgacccacaggccattatgccggtcagaccccgatgccaaccacccaatcaacccttttccccgtgcccgctgactcacgggctccacttcaaaagccgcgtcagacgtccctggccgatctggagcagaaggtgccaaccaattatgaggtgatagcctcacccgtcgtgcccatgtccagcgctccctcggagacatcttacagtggcccagcagtatcttcggggtacgagcaggggaaggtgcccgaagttccaagggctggagacaggggttcggtcagccagagccctgcaccaacctacccatccgacagccattatacatccctcgagcagaacgtccctcggaattatgtcatgattgacgatataagcgagttgactaaagatagcacctctaccgccccagattctcagaggctggagcctcttggccctggcagcagtggcaggccaggtaaggagcccggagagccaggcgtccttgacgggcctaccctgccttgttgctacgctcgaggtgaggaagagtccgaagaggatagttatgaccctagagggaaaggaggtcacctcagatctatggagtccaacggacggccagccagcacacattactacggggacagtgactaccgtcacggagctcgagtagaaaaatacggaccgggtccgatgggaccaaagcatccatctaagagcctggcacctgccgcaatctcatcaaagagatctaagcacagaaagcagggaatggagcagaaaatatcgaagttcagtcctatcgaagaagccaaggacgttgagtccgacctcgctagttatccaccgccagctgtgagcagttcactggtgtcaagggggaggaaatttcaagacgagattacatatggcctgaagaagaacgtgtatgaacaacagaagtattacggaatgtcctctcgtgatgctgttgaggacgacaggatatacgggggttcttccagatcccgggctccttccgcttatagtggggagaagttgtccagtcacgattttagtggctggggcaaggggtacgaacgagagagagaagcagttgagagattgcagaaagctggccctaaacctagcagcctgtcaatggctcactcccgagtgcggcctccaatgcggtcccaggcctccgaagaggaatcacccgtgagcccacttggacggccaagaccagccggtggccctcttcctcctggcggagatacttgtcctcaattctgctcatcccactccatgccggacgtccaggagcacgtcaaagatggtcctagagctcacgcttataagagggaagagggatatattctggacgactcacactgtgttgtgtctgatagtgaagcttatcacttaggccaggaggagaccgactggtttgataaaccgagggacgctcggtcagatcgcttccgccatcacggaggtcacgctgtttcctcttcaagccagaagcgagggcctgcacgacactcttaccatgattatgacgagccacctgaagaaggcctttggcctcacgacgaaggcggacctggtagacatgcaagcgctaaggaacacaggcacggcgaccacggcagacactcggggcgtcacacaggagaagagcctgggaggcgcgctgctaagccgcacgcaagagatcttgggaggcatgaggcacgaccccacagtcagccaagctccgctcccgctatgccaaagaaggggcagccaggatatccttcctccgcagagtatagccagccgtcccgggcatcttccgcgtaccatcacgccagcgatagtaagaagggtagtcgccaggctcactctggtcccgcagctctgcaatctaaggctgaacctcaggcccaacctcagttgcagggcagacaggctgcacctggccctcagcaaagccagagtccgtcgagtcgacagattcccagcggcgcagcctctcgtcagcctcaaacacagcaacagcaacaggggcttggcctgcagcccccacagcaagccctgacgcaggcccgacttcagcagcaaagccaaccaactaccaggggatccgcgcctgccgcttctcagcccgctggcaagccacagcccggtcctagcactgcgacaggcccacagcccgcagggcctcccagagctgagcaaactaatggaagtaaaggcactgcaaaggcgccacagcagggacgcgctccccaggcccaacctgcccctggtccaggcccagcaggcgtcaaggctggcgctcgcccagggggtacacccggagcccctgctgggcagcccggtgccgatggagagtctgtcttctccaagattctcccagggggtgcagcagagcaagccggaaagctgacagaagctgtgtcagctttcggcaaaaagttttcatccttttggtag

SEQ ID NO: 138437 - DNA, 15955 bp, Artificial Sequence
  derived and/or modified sequence
gagccgagctgggagatggcggcggcagcggcggcgccgagagtgtgagcaccgcccgggagccgccggcccgggcgcagcgcgaccccgaccccgcccgcccgcctgcccgccatgggcaacgaggtcagcctggagggcggcgctggcgacgggccgctgccgcccggcggcgccggccccggcccgggccccggccccggccccggcgcaggaaagccgccttcagcaccggccggtggcggacagctccccgcggcgggagcagcgcggtcgaccgcggtaccaccggtccctggccccggccccggccccggtcccggccctggcccgggcagcacttcccggagactggaccccaaggaacccctgggtaaccagagagcagcttccccaactccgaagcaggcttctgctaccactcctggccatgagagcccccgagagacaagggcacagggaccagcaggccaggaggctgatggtccccgcaggacgctgcaggtagacagcaggacacagagatcagggcggtccccctcagtgtcaccggacagaggcagcacccccacatcaccctactccgtccctcagatcgccccccttcccagcagcacgctgtgtcccatatgcaagacttcggacctcacgtcgacccccagccagccaaacttcaacacctgcacccagtgtcacaacaaggtctgcaaccagtgtgggttcaaccccaaccctcatctcacccaggtgaaggagtggctctgtctgaactgtcagatgcagagggctctgggaatggacatgaccactgcacctcgctccaagagccagcagcagctgcactccccagccctgtctcctgcccactccccggccaaacagcccctggggaagccagaccaagagagatctcggggcccaggaggaccacagcctgggtcccgccaggctgagacagccagggccacctcagtgccggggcctgcccaagcagctgcccctccagaggtggggagggtgtctcctcagccccctcaacccaccaagccttccacagctgagcccaggccacctgcaggagaggccccggccaaaagtgccaccgcagtgcccgctgggcttggtgccactgagcagacccaggagggcctcactggtaagctcttcggccttggcgcgtcactgctaacccaggcgagcaccctcatgtctgtgcagcccgaggctgacacccagggccagcctgcccccagcaaggggacacctaagatcgtcttcaatgatgccagcaaggaggctggcccaaaacccttgggctcagggcccgggcctgggccagcacctggagccaaaactgagcctggggctagaatgggtcctggatctggacctggagccctgccgaaaactgggggaacaaccagtccaaagcatggcagagcagaacatcaggcagcatcgaaggctgctgccaagccaaagaccatgccgaaggaaagggccatctgcccactgtgccaagccgagctcaacgtgggcagcaagagcccagccaactataacacatgcaccacctgcaggctccaggtgtgcaacctgtgtggcttcaacccaacaccccacctggtggagaaaacagagtggctctgtctgaactgccaaaccaagcggctactggagggcagcctaggagagccgacccccctgccgccgcccacctcacagcagccccctgtaggggcccctcaccgtgcatctggaacatcccctctgaagcagaaagggccacaggggctgggccagccttcaggccccctgcctgccaaggccagccctctatccaccaaggccagccctctgcccagcaaggccagcccccaggccaagcccctcagggcttctgaacccagcaagaccccaagcagtgtccaggaaaagaagacccgagtccccactaaagctgagcccatgccgaagccacctccagagactaccccaacccctgcgactcctaaagtaaagagtggggtgaggagggctgaacctgccacccctgtcgtcaaggctgttccagaagcccccaagggtggggaggcggaggacctggtgggcaagccttactctcaggatgcgtctcggagcccacagagcctcagtgacacaggctattcctctgacggcatctctagctcccagagtgagatcacaggagtcgtgcagcaggaggtggaacagctggacagtgcaggggtgacagggccacatccacccagcccctccgagatccacaaggtggggagcagcatgcggcctttgctgcaggcccagggcctggccccaagtgagcggagcaagccactctccagcggtactggcgaggagcagaagcagcggccccactccttgtccatcacgcctgaggcctttgactctgatgaggagctggaggatatcctggaggaagacgaagactctgctgagtggaggcgccggagagagcagcaggacactgccgagtcctcagacgactttggcagccaattgaggcacgactatgtggaggacagcagtgagggtggcctgtcccctcttccaccccagcccccagcccgggcagcagaactgactgatgaggatttcatgcgacggcagattctcgagatgagcgccgaggaagacaacctggaggaggatgacactgccacctccgggcgtggcctggccaaacatggcacccagaaaggtggccccagacccaggcctgagcctagccaagaaccagcagcactgcccaagaggcgcctgccccacaatgccaccacgggctatgaggagctgctccctgagggaggctcagcagaggctaccgatggcagtgggaccctgcagggtgggctccgtcgcttcaagaccattgagctcaacagcacgggaagttatggtcatgagttggacctgggccaaggcccagaccccagtctggaccgggagcctgagctggagatggagagcctaacgggctcccctgaggaccgctcccgtggtgagcactcctctacattgcctgcctccacacccagctacacctcgggcacctctcccacctctctgtcctccctagaggaggacagtgacagcagccccagccgcaggcagcgtctagaagaagcaaagcagcagcgcaaggcccggcaccgctcccacgggcccctgctacccaccatcgaggactcctcagaggaggaggagctgcgggaggaagaggagctgcttcgtgagcaagagaagatgcgggaggtggagcagcagcgcatccgcagcacggcccgcaagacccggcgggacaaggaagaactgcgggcccagcggaggcgagagcgctccaagacaccacccagtaacttgtcacccatcgaggatgcctccccgacggaggagctgaggcaggcggccgagatggaggagctacaccgctcctcctgctctgagtactcaccctcaccctcccttgactctgaggctgaggccttggatggtggccctagccggctttacaagtcaggcagtgagtacaacctgcccaccttcatgtccctctactcaccaaccgagacaccctccggcagctccaccactcccagttccggacggccgctcaagagcgctgaggaggcttatgaggagatgatgcgcaaagctgagctgctccagaggcagcaaggccaggcagcaggggcccggggaccccatggcggcccctctcagcccacaggcccccggggcctgggctccttcgaatatcaagacactacagaccgtgagtatggccaggctgctcagcctgccgcagagggcacgccagccagcctgggagcagccgtgtacgaagaaatccttcagacatcacagagcatagtccgcatgcggcaggcctcctcacgagacctggcttttgctgaggacaaaaagaaggagaagcagtttctaaatgctgagagtgcatacatggacccaatgaagcaaaatggtggcccccttacccctggtaccagtcccacccagctcgctgcccctgtgtccttctctacccccacctcctcagacagcagcgggggccgagttattcccgatgtccgtgtcactcagcattttgcaaaggagactcaggaccccctcaagctgcacagctctcctgcctcccccagctcagcctccaaggagataggcatgcccttttcccagggccctgggaccccagccaccacagctgtggctccttgtccagctgggctgccacgaggatatatgactccagcctccccagcaggctccgagcgtagtccttcaccatcttccacagcccacagctatggacacagcccaaccactgcaaactatgggtcccaaactgaggatctaccccaggcccccagtggccttgctgcagctggacgagctgctagagagaagcccttgagtgcgagtgacggtgagggtggcactcctcagccttcccgggcatattcctactttgcaagctccagcccacctctctccccgtcttccccctcagagagtcccacattctcccctggcaagatgggcccaagggccacagcagagttctctacacagacgccaagtccagcccctgcctcagacatgccacggagccctggtgcccccactccatcacctatggtagcccagggtacacaaacaccacatcgacccagcacgcctcgcctggtgtggcaggagtcctctcaagaggctccctttatggtcatcacgctggcatctgacgcctccagccagaccaggatggtacatgccagtgcctccacctccccgctctgctcacctactgaaacccagcccaccacccatggctacagccagacaacacctccgagtgtgtctcagctgcccccagagccacctgggccacctggctttccacgggtgcccagtgctggtgcagatgggcccctggcactatatggctggggtgccctccctgctgagaacatctccctgtgccggatctcctctgtccctgggacgtctagggttgagccaggccccaggacccctggcactgcagtggtagacctccgtacagctgtcaagcccactcccatcatcctcactgaccagggcatggacctcacctctcttgctgtggaagcgaggaagtatggtcttgccctggatccaatcccaggacggcagtcgaccgccgtgcagcccttggttatcaacctcaatgcccaggagcataccttccttgctactgccaccaccgtgagcatcaccatggcctcgtctgtgttcatggctcaacaaaagcagcctgtggtctatggagacccctaccagagccgccttgactttggccagggtgggggtagccctgtgtgcctggcccaggtcaaacaagtagagcaggctgtccagacagccccataccgaagtgggccccggggaagacccagggaggccaagtttgccagatataacctacccaaccaagtagctcctctggccagaagagacgttttgatcactcagatgggcaccgcccagagcattggcctcaagccaggcccagtgccagagccaggtgccgagccccaccgggccacccctgcagagctgcggtcacatgctctgccaggtgccaggaagccacacacagtggtggtgcagatgggagagggcacagcaggcactgtgaccacactgctcccagaggagcctgcgggtgccctggaccttaccgggatgaggcctgagagccagctggcatgctgtgacatggtctacaagctcccctttggcagcagctgcactggcaccttccacccggcccccagtgtgcctgagaagagcatggcagatgctgccccacctggccaaagcagcagccccttctatggtccccgggaccctgagcctcctgagcccccaacctaccgggcacagggggtggtggggcctgggccccatgaggagcagaggccctacccacaaggcctgcctggtaggctgtactcctccatgtctgacaccaatttggctgaggctggcctcaactaccatgcccagaggatcgggcagctcttccagggtcctggacgagactcggctatggacctcagctcactgaagcactcctacagcctgggctttgcggatggacgctacctagggcagggcttgcagtatggctcagtcacggacctgcgtcatcctacagaccttttggctcacccgcttcccatgcggcgctatagctcagtgtcgaacatctactcagaccacaggtacggcccacggggagatgcagttggcttccaggaggccagcctggcccagtacagtgccaccacagcccgtgaaatcagtcgcatgtgcgctgccctcaactccatggaccagtatggtgggcggcatggcagtggtggtggtggccctgaccttgtgcagtaccagccccagcacgggcccgggctcagtgctccacagagtctggttcccctcagacctggactccttggtaaccccacctttccagagggccacccaagtcctgggaacttggcccagtatgggcctgcagcaggccaaggaacagcagtcagacagctgctgccgtccacagccactgtacgtgcagctgatggcatgatctactcgactatcaataccccaattgctgcaacactgcccatcaccacccagcctgcctcagtcctgcggcccatggtgcgtggtggcatgtacaggccttacgcatctggtggaatcacagccgtgccactcaccagtctgacacgtgtgcccatgattgccccccgggtacctcttggacccacagggctgtaccgctatcctgcaccaagtagatttcccattgcttccagtgttccacctgcagaagggcctgtctatctggggaaacctgctgctgccaaggcccctggggctgggggcccttcaaggccagagatgccagtaggggctgcacgggaagagcctcttcccacaaccacccctgctgccatcaaggaggctgcaggagccccagctcctgccccactagctggccagaagccaccagcagatgctgctcctgggggtggcagtggggccctcagccggccagggttcgagaaagaggaagcatcacaggaggagaggcagcggaagcaacaggagcagctgctccagctagagcgggagcgggtggagttggagaagctgcgacaacttcggctgcaagaggagctagagcgggaacgtgtggagctgcagaggcaccgtgaggaggagcagctgctggtgcagcgggagttgcaggagctgcagaccatcaagcaccatgtgctgcagcagcagcaagaggaacgccaggctcaatttgcactgcagcgggaacagctagcgcagcagcgtctgcagctggagcagatccagcagctgcagcagcagctgcagcagcagctagaggagcagaagcagcggcagaaggctccctttcctgcagcctgtgaggcacctggccgagggcctcccctagcggctgctgagttggcccagaatggccagtattggcccccccttacacatgcagccttcattgccatggcagggcctgaaggacttgggcagcctcgtgagcctgtgctgcaccggggtctccccagctctgcctcagacatgtcactgcaaacggaggagcagtgggaggccagccgtagtggcatcaagaagcggcactccatgccacgcctgcgggatgcctgtgagctagagtctgggactgagccctgtgtggtcaggaggattgccgacagcagcgtgcagacagacgatgaggatggggagagccgctacctcttgagtcggcgacgccgggcacggcggagtgctgactgcagtgtgcagacggacgacgaagacagtgctgagtgggagcagccagtgcgccgccgcaggtctcgtcttccccgccactcagactcaggctctgacagcaagcacgatgccactgcctcatcatccagtgctgctgccactgtgagggccatgagcagcgtgggcatccagaccatcagtgactgctccgtgcagacggagcctgaccagctgcccagggtctctccagccatccacatcacagctgccaccgatcccaaggtggagatcgtcaggtacatatcggcgccagagaagactgggcgtggggagagcctggcctgccagacggagccagatgggcaggcccagggtgtagccgggccgcagcttgtagggccaactgccatcagcccctacctgcctggcatccagatcgtcaccccagggcctctgggcagatttgaaaaaaagaagccagatcccctggagattgggtaccaggcccacctgcctccggagtctctctcacagcttgtgagccgccagcctcccaagtcccctcaggtcctctactcaccagtctcacccctgtcccctcaccggctcctggacacctcctttgcttccagtgagaggctgaacaaagctcacgtgagtccccagaagcacttcacggctgacagcgctctccgccagcagacgctgcctcgccccatgaagaccctgcagcggtccctgtctgaccctaagcccctcagccccaccgccgaagagtctgccaaagagagattctccctctaccagcaccaggggggactgggtagccaggtgtcggcgttgccacccaacagcctggtccgcaaggtgaagcggacactgcccagcccccctccagaggaggctcaccttcccctggctggccaggcctccccacagctgtatgcagccagcctgctgcagcgagggctgacggggcccaccactgtccctgctaccaaggccagcctgctccgggagctggaccgggacctgcggctggtggagcatgagtccaccaaactgcgcaagaagcaggcagagctggatgaggaggagaaggagattgacgccaagctcaagtacctggagttgggtatcacacaacgcaaagagtctttggccaaagaccggggtggccgtgactacccacccttgcgtggtcttggcgagcatcgtgactacctatcggacagtgagctcaaccagctgcggctccagggctgcaccactcccgctggccagtttgtggacttccctgccactgccgctgctcctgccaccccctctggtcccactgccttccagcagccccgcttccagcctccagccccacagtattctgcaggcagtggtgggccaactcagaacggattcccagcccaccaggcccccacctaccctggccccagcacgtacccagctcctgcctttcctcctggtgccagttacccagctgagcctggcctgccaaaccagcaggctttccgccccacaggccactatgcaggccaaacacccatgccaaccacacagagcaccctttttccagtccccgctgatagccgtgccccactgcagaagccacgccagacatcgctagccgacttggagcagaaggtgcccaccaactatgaggtgatcgccagccccgttgtgcccatgtcttcagccccatctgaaaccagctacagtggcccagcagtgagcagcggctatgagcagggcaaggtccctgaggtgccccgggctggtgaccgtggcagtgtgagccagagcccagcccccacctacccctctgactcacactataccagtctggagcagaacgttcctcgaaactacgtaatgattgatgacatcagtgaactgaccaaggacagcacctctactgctcctgatagccaacggctggagcccctggggccaggcagcagtgggcgtccagggaaggagcctggagaaccaggtgtccttgacgggcccacactgccctgctgctatgccagaggagaagaggaatctgaggaggactcatacgatccccgcgggaagggtggccacctccggagcatggagagcaatggtcgaccagccagtacccactactatggtgacagtgactacaggcatggggctcgagtagagaagtatggtccagggcccatggggcccaagcatccctccaagagcctggctccagctgccatctcctcaaagcgcagcaagcaccggaagcagggcatggagcaaaagatatccaagttctcgcctattgaagaggccaaagacgtagagtcagacctggcgtcctaccccccacctgcagtcagcagcagcctggtctctcggggcaggaagttccaggatgaaatcacctatgggctcaagaagaacgtgtatgagcagcaaaaatactatgggatgtccagccgggacgcagtggaggacgaccgcatttatggcgggagcagccggtcccgggcaccttctgcatacagtggggagaagctgtccagccacgacttcagtggctggggcaaggggtacgaaagggaacgggaggctgtggagcgacttcaaaaagcgggccccaagccctcatccctaagtatggcccacagccgggtacgaccccccatgcggagccaggcctctgaagaggagagccccgtcagtcctttggggaggccccgccctgccggagggcccctccctcccggcggggatacctgcccacagttctgctccagccactccatgcctgatgtccaggaacatgtcaaggacggacctcgggcccacgcatataagcgtgaggagggctacatcctggatgattcccattgcgtggtttccgacagcgaagcgtatcacctgggccaggaggagacggactggtttgataagccccgggatgcccgctctgaccggttcaggcaccacgggggccatgcagtttcctcctcctcccagaagcgaggccctgccaggcacagctaccatgactacgatgaaccccctgaggagggcctgtggcctcatgatgagggtggcccaggccgccatgcctcagccaaggaacaccggcacggtgaccacgggcggcactcaggccgccacactggtgaggagccgggacggcgtgctgccaaaccacacgctcgggacctgggtcgccatgaggcccggccccactctcagcccagctctgctccagctatgccgaagaagggtcagcctgggtatcccagctctgctgagtactcacagccatcccgtgcttcatccgcataccatcatgcctctgacagcaagaagggctcccggcaagcccactccgggcccgctgcactgcagtcaaaggcagaaccccaggcgcagccgcagctgcaaggtcggcaggcagctccaggaccacagcagtcacagtcaccatcatccaggcaaataccctctggggcagcatcacgccagccacagacacagcagcagcagcaaggtcttgggctgcagcccccacagcaggctctgacacaggctcggctgcagcaacagagccagccaaccacccggggctcagcccctgctgccagccagcctgcagggaagcctcagccaggccccagcacagccacaggtcctcaaccagcaggaccgccacgggcagaacagacaaatggctctaaagggacagccaaagcaccgcaacaggggagggctcctcaggcccagccagcaccaggacctggacctgcaggtgtgaaggctggagccaggcctggaggaaccccaggggctcccgccggccagccaggtgccgatggggagagcgtgttctccaagatcctccctggcggggcagccgagcaagctggcaaactgacggaagctgtctctgcttttggcaaaaaattttcctcattctggtgaccatgcccagcatggctcttgaagaaatgaagagaggtatcattgctgtggaaaaatctctggagtcagaggcctgggcgcagctctggactctgcgtataacacatctacaatctggcaaacccttggcccaaagactcaccaggtgggacgtggcaggcaggcctcagttgaggacgtgatgttttctcacagcagctgcctgggtgaagcatctgctggacaagtcggaccactggccaggggacctttgattgtctttccagagatgctgctctctgcagggcaccaccttcaaggcacagcccttgttgggagggagaaccctctccagaaaccctgccaccatggtgtcttgccgtacttcccacagccgcctttttgcggcctggccggccaggcttcccgtgcgttatacacagagtttgggcacacactgccctccctccgagatgccagaagtttttccacagccttggagaggggctttgactgagggctgggggccctgggctccgtttccttcacattccagctggcccggatccctctgtggcacagggccctgcccgtcacatgccctctgggtgacatcggagcagacctccatgtggccaggggttgggagaactttacaaacattaggacctaacactgtctcatcgctgaaataagaggccatagcaccgaaaagcagcgtgggcgccggctgaggcttctcccagcccgtgggtggcagcgtgctagcacactgccaccatctcaaagccatccccctagccatcgtgagcatcccagcggcaccgccattgtctcaaccagccggctcctcgtctgtacacctggggatttcttttgatttcaagaacagccttaatcattccagtttgatttacgtgtatacctcataaacatttttcttttgtttctctctccccctttctctcttctcttggctcactcccttgcctctccccctccaccaccaccttgtgactgatggtttggtttcctctctgctctgcccctgctcagcacagggagaatgttgacttagaagcaatagggggcagcaggccaccaagagcacaaccccagggcgaggtctggggaggcctcccagcccgcctctgtttactgtgcaattccagtcgttcttaagccatcaccagtgggtgtactcagagcagaggggccaggacttctgccagccaagggaaaggcccagagccctgtgcgggggaatgtggcactgtctatccatccggtggactgggcagcattcctccccagggctcttcccttgggggcctcctttcatctggggcacagccacaagtctcatctctaacgttctatgcaatgaaatataaaccctcaatgacaactgttaatatttaataaattccatgttatgtataaggagttaattgcaaacatgcaattgagaaactggatagatacactcataaaacccccacccctccccaccccacccctgctcccattgtgtgtgtgaaattctcagtctgtggcatgtttgacctgtggcaggactcgctgctgccaggtgagtcaccgcctgtcctgcagtggagcatgcacagctcgcagcctctttgcacgatttcatccattttaaatgcttgaccctcttgcttggagttctttttgcctcagaacctctccttcaggagcacttctagctgacttctgcacaagctagtgaggacctgccagaattgttgcctgagcgtgccaggctgcagggcaggcagtaaaaggcccccacataccctgcagttttctctgtccaggacagcaggtaaaaaggaatccccagagcagacgcaatggtaggagcctgcacaggatgtgtgtgtatggacattctgaaggtttgctgtaggatatctgtctgtctgtcattttcccttcctaccccaaccctgagccagaggcatctgacagccctttcccagagggcaccacgcaagggcagagctgggcggcatccacagccagagaggcagaggcaagagcagagccaggctgtgcccgagggaccccagctcttgactgcacctgtttcatgcctctcctctgtggctaggaggctcaaaggactgtgagccaggagatctgggctggagctagggggtcaatggatgctcaggaagagctgggcctttggcacttgtggtgagaacagttgacagtggtcatctggaactgttcatataaacagtggcttcaagctaagtttcttgtgaagtttctcaatagcaaatcttacagaaggtcctgtgtgaccctctctgcatctgtccccaggacctatgctccctgctcacccccttctccaaagcccaagcgtcccgctgctcatcagcttttttaccattgagccaggagtgcggcaggcagtacctgcctgacccttcaaggcctgaccttcgtccagagtgctctggtttgcaccatgcatttctcaggggtccgcatttctcatgcttttctataagatctacacaccccttcagagagggctcctcgctcacctctggtagctatggatgggacaggaagctgccaacctttgtgttggacttaacacccttgcctttctgggacttggcctcaccccacccatggaatacctgcctcatcccaaagatcaggtatgggctgaatgcagccatctgagcaagggctgagggaagccatcacctaacacctctggccacccaggaccaggtctgtgtggggatgtgccttggagaccaaggcaatagtcctttccactacaggccaggggatgggacaagaagtagggaacaggcagggaaatgttaggaggtcagcctccagcaggcctagtctcaggctctaaagtactgacttttcagcaaatttcctttctggccaagccctctgagtttgaaattctgacatctgccactcctcatcccccactgtacccacaggatacatcatcgcccctctgtgaaggtggctggagcaggcctctggtccatggactgtccttcctggcccttgcatggatgcagttgtgactctggggacaatgcagccagaagctgagggaccagcacttggtgccttggaaagtagagagcaacagacacatctccaaatgggcaaggagtctctagcatgcagcccaggccttctccatacccctctccccagcatcatgagcaagggcattgcctcctctctctgctcacttcagggcccagtgcactcacttcacagtgacagccctcccctacaatccttgggcagagcatgtggtctgagggcccacagtgaaagaacagcagtggtggcaactatgccttgccttctggagcctgtagggagttttccaggcaggtcctttgccaggacagcatggtcctgccctgttgtcccgtctgctctcctcttacccacccccatgctgtaaatacttgtcatcatggactccaacagggttagagggacaggcctaatcaactgaaactcctcggagatgccatctctgtctccctgggtgccagcagccctgctgccatgtgcactggggtggcactggagagccatggcagtcgtgagatattgtatgtgtatgcacatgatcatgtgtgtatgtgcgtgcgtgcgtgcgtgtgtgtgtgtgtgtgtgtttctgcctcattcagtttctggggtcaaatcagctccttctctccaagtgcactaccctggagagtggtggccactcaataccttttcctctagctttcatgtcttgtttttgctttccccttcctcctccctctctccctttctttccttctctccttctttatttgaggggggaagagtgctgtacaaagtcaaacaaacaagtttacagttgtaagtgcaatgacccgagtcctccacatgaccttgtgaattgtgtgctgtccttctgtgctctgtgagaactcgtggtacttcagtgtccctccccctgtattgtgacaaggtaattctgtggtatcagaataaaaggacttgatataaacaa

SEQ ID NO: 138438 - DNA, 11781 bp, Artificial Sequence
  derived and/or modified sequence
atgggcaacgaggtgagcctggagggcggcgccggcgacggccccctgccccccggcggcgccggccccggccccggccccggccccggccccggcgccggcaagccccccagcgcccccgccggcggcggccagctgcccgccgccggcgccgccagaagcaccgccgtgccccccgtgcccggccccggccccggccccggccccggccccggccccggcagcaccagcagaagactggaccccaaggagcccctgggcaaccagagagccgccagccccacccccaagcaggccagcgccaccacccccggccacgagagccccagagagaccagagcccagggccccgccggccaggaggccgacggccccagaagaaccctgcaggtggacagcagaacccagagaagcggcagaagccccagcgtgagccccgacagaggcagcacccccaccagcccctacagcgtgccccagatcgcccccctgcccagcagcaccctgtgccccatctgcaagaccagcgacctgaccagcacccccagccagcccaacttcaacacctgcacccagtgccacaacaaggtgtgcaaccagtgcggcttcaaccccaacccccacctgacccaggtgaaggagtggctgtgcctgaactgccagatgcagagagccctgggcatggacatgaccaccgcccccagaagcaagagccagcagcagctgcacagccccgccctgagccccgcccacagccccgccaagcagcccctgggcaagcccgaccaggagagaagcagaggccccggcggcccccagcccggcagcagacaggccgagaccgccagagccaccagcgtgcccggccccgcccaggccgccgccccccccgaggtgggcagagtgagcccccagcccccccagcccaccaagcccagcaccgccgagcccagaccccccgccggcgaggcccccgccaagagcgccaccgccgtgcccgccggcctgggcgccaccgagcagacccaggagggcctgaccggcaagctgttcggcctgggcgccagcctgctgacccaggccagcaccctgatgagcgtgcagcccgaggccgacacccagggccagcccgcccccagcaagggcacccccaagatcgtgttcaacgacgccagcaaggaggccggccccaagcccctgggcagcggccccggccccggccccgcccccggcgccaagaccgagcccggcgccagaatgggccccggcagcggccccggcgccctgcccaagaccggcggcaccaccagccccaagcacggcagagccgagcaccaggccgccagcaaggccgccgccaagcccaagaccatgcccaaggagagagccatctgccccctgtgccaggccgagctgaacgtgggcagcaagagccccgccaactacaacacctgcaccacctgcagactgcaggtgtgcaacctgtgcggcttcaaccccaccccccacctggtggagaagaccgagtggctgtgcctgaactgccagaccaagagactgctggagggcagcctgggcgagcccacccccctgcccccccccaccagccagcagccccccgtgggcgccccccacagagccagcggcaccagccccctgaagcagaagggcccccagggcctgggccagcccagcggccccctgcccgccaaggccagccccctgagcaccaaggccagccccctgcccagcaaggccagcccccaggccaagcccctgagagccagcgagcccagcaagacccccagcagcgtgcaggagaagaagaccagagtgcccaccaaggccgagcccatgcccaagcccccccccgagaccacccccacccccgccacccccaaggtgaagagcggcgtgagaagagccgagcccgccacccccgtggtgaaggccgtgcccgaggcccccaagggcggcgaggccgaggacctggtgggcaagccctacagccaggacgccagcagaagcccccagagcctgagcgacaccggctacagcagcgacggcatcagcagcagccagagcgagatcaccggcgtggtgcagcaggaggtggagcagctggacagcgccggcgtgaccggcccccacccccccagccccagcgagatccacaaggtgggcagcagcatgagacccctgctgcaggcccagggcctggcccccagcgagagaagcaagcccctgagcagcggcaccggcgaggagcagaagcagagaccccacagcctgagcatcacccccgaggccttcgacagcgacgaggagctggaggacatcctggaggaggacgaggacagcgccgagtggagaagaagaagagagcagcaggacaccgccgagagcagcgacgacttcggcagccagctgagacacgactacgtggaggacagcagcgagggcggcctgagccccctgcccccccagccccccgccagagccgccgagctgaccgacgaggacttcatgagaagacagatcctggagatgagcgccgaggaggacaacctggaggaggacgacaccgccaccagcggcagaggcctggccaagcacggcacccagaagggcggccccagacccagacccgagcccagccaggagcccgccgccctgcccaagagaagactgccccacaacgccaccaccggctacgaggagctgctgcccgagggcggcagcgccgaggccaccgacggcagcggcaccctgcagggcggcctgagaagattcaagaccatcgagctgaacagcaccggcagctacggccacgagctggacctgggccagggccccgaccccagcctggacagagagcccgagctggagatggagagcctgaccggcagccccgaggacagaagcagaggcgagcacagcagcaccctgcccgccagcacccccagctacaccagcggcaccagccccaccagcctgagcagcctggaggaggacagcgacagcagccccagcagaagacagagactggaggaggccaagcagcagagaaaggccagacacagaagccacggccccctgctgcccaccatcgaggacagcagcgaggaggaggagctgagagaggaggaggagctgctgagagagcaggagaagatgagagaggtggagcagcagagaatcagaagcaccgccagaaagaccagaagagacaaggaggagctgagagcccagagaagaagagagagaagcaagaccccccccagcaacctgagccccatcgaggacgccagccccaccgaggagctgagacaggccgccgagatggaggagctgcacagaagcagctgcagcgagtacagccccagccccagcctggacagcgaggccgaggccctggacggcggccccagcagactgtacaagagcggcagcgagtacaacctgcccaccttcatgagcctgtacagccccaccgagacccccagcggcagcagcaccacccccagcagcggcagacccctgaagagcgccgaggaggcctacgaggagatgatgagaaaggccgagctgctgcagagacagcagggccaggccgccggcgccagaggcccccacggcggccccagccagcccaccggccccagaggcctgggcagcttcgagtaccaggacaccaccgacagagagtacggccaggccgcccagcccgccgccgagggcacccccgccagcctgggcgccgccgtgtacgaggagatcctgcagaccagccagagcatcgtgagaatgagacaggccagcagcagagacctggccttcgccgaggacaagaagaaggagaagcagttcctgaacgccgagagcgcctacatggaccccatgaagcagaacggcggccccctgacccccggcaccagccccacccagctggccgcccccgtgagcttcagcacccccaccagcagcgacagcagcggcggcagagtgatccccgacgtgagagtgacccagcacttcgccaaggagacccaggaccccctgaagctgcacagcagccccgccagccccagcagcgccagcaaggagatcggcatgcccttcagccagggccccggcacccccgccaccaccgccgtggccccctgccccgccggcctgcccagaggctacatgacccccgccagccccgccggcagcgagagaagccccagccccagcagcaccgcccacagctacggccacagccccaccaccgccaactacggcagccagaccgaggacctgccccaggcccccagcggcctggccgccgccggcagagccgccagagagaagcccctgagcgccagcgacggcgagggcggcaccccccagcccagcagagcctacagctacttcgccagcagcagcccccccctgagccccagcagccccagcgagagccccaccttcagccccggcaagatgggccccagagccaccgccgagttcagcacccagacccccagccccgcccccgccagcgacatgcccagaagccccggcgcccccacccccagccccatggtggcccagggcacccagaccccccacagacccagcacccccagactggtgtggcaggagagcagccaggaggcccccttcatggtgatcaccctggccagcgacgccagcagccagaccagaatggtgcacgccagcgccagcaccagccccctgtgcagccccaccgagacccagcccaccacccacggctacagccagaccaccccccccagcgtgagccagctgccccccgagccccccggcccccccggcttccccagagtgcccagcgccggcgccgacggccccctggccctgtacggctggggcgccctgcccgccgagaacatcagcctgtgcagaatcagcagcgtgcccggcaccagcagagtggagcccggccccagaacccccggcaccgccgtggtggacctgagaaccgccgtgaagcccacccccatcatcctgaccgaccagggcatggacctgaccagcctggccgtggaggccagaaagtacggcctggccctggaccccatccccggcagacagagcaccgccgtgcagcccctggtgatcaacctgaacgcccaggagcacaccttcctggccaccgccaccaccgtgagcatcaccatggccagcagcgtgttcatggcccagcagaagcagcccgtggtgtacggcgacccctaccagagcagactggacttcggccagggcggcggcagccccgtgtgcctggcccaggtgaagcaggtggagcaggccgtgcagaccgccccctacagaagcggccccagaggcagacccagagaggccaagttcgccagatacaacctgcccaaccaggtggcccccctggccagaagagacgtgctgatcacccagatgggcaccgcccagagcatcggcctgaagcccggccccgtgcccgagcccggcgccgagccccacagagccacccccgccgagctgagaagccacgccctgcccggcgccagaaagccccacaccgtggtggtgcagatgggcgagggcaccgccggcaccgtgaccaccctgctgcccgaggagcccgccggcgccctggacctgaccggcatgagacccgagagccagctggcctgctgcgacatggtgtacaagctgcccttcggcagcagctgcaccggcaccttccaccccgcccccagcgtgcccgagaagagcatggccgacgccgccccccccggccagagcagcagccccttctacggccccagagaccccgagccccccgagccccccacctacagagcccagggcgtggtgggccccggcccccacgaggagcagagaccctacccccagggcctgcccggcagactgtacagcagcatgagcgacaccaacctggccgaggccggcctgaactaccacgcccagagaatcggccagctgttccagggccccggcagagacagcgccatggacctgagcagcctgaagcacagctacagcctgggcttcgccgacggcagatacctgggccagggcctgcagtacggcagcgtgaccgacctgagacaccccaccgacctgctggcccaccccctgcccatgagaagatacagcagcgtgagcaacatctacagcgaccacagatacggccccagaggcgacgccgtgggcttccaggaggccagcctggcccagtacagcgccaccaccgccagagagatcagcagaatgtgcgccgccctgaacagcatggaccagtacggcggcagacacggcagcggcggcggcggccccgacctggtgcagtaccagccccagcacggccccggcctgagcgccccccagagcctggtgcccctgagacccggcctgctgggcaaccccaccttccccgagggccaccccagccccggcaacctggcccagtacggccccgccgccggccagggcaccgccgtgagacagctgctgcccagcaccgccaccgtgagagccgccgacggcatgatctacagcaccatcaacacccccatcgccgccaccctgcccatcaccacccagcccgccagcgtgctgagacccatggtgagaggcggcatgtacagaccctacgccagcggcggcatcaccgccgtgcccctgaccagcctgaccagagtgcccatgatcgcccccagagtgcccctgggccccaccggcctgtacagataccccgcccccagcagattccccatcgccagcagcgtgccccccgccgagggccccgtgtacctgggcaagcccgccgccgccaaggcccccggcgccggcggccccagcagacccgagatgcccgtgggcgccgccagagaggagcccctgcccaccaccacccccgccgccatcaaggaggccgccggcgcccccgcccccgcccccctggccggccagaagccccccgccgacgccgcccccggcggcggcagcggcgccctgagcagacccggcttcgagaaggaggaggccagccaggaggagagacagagaaagcagcaggagcagctgctgcagctggagagagagagagtggagctggagaagctgagacagctgagactgcaggaggagctggagagagagagagtggagctgcagagacacagagaggaggagcagctgctggtgcagagagagctgcaggagctgcagaccatcaagcaccacgtgctgcagcagcagcaggaggagagacaggcccagttcgccctgcagagagagcagctggcccagcagagactgcagctggagcagatccagcagctgcagcagcagctgcagcagcagctggaggagcagaagcagagacagaaggcccccttccccgccgcctgcgaggcccccggcagaggcccccccctggccgccgccgagctggcccagaacggccagtactggccccccctgacccacgccgccttcatcgccatggccggccccgagggcctgggccagcccagagagcccgtgctgcacagaggcctgcccagcagcgccagcgacatgagcctgcagaccgaggagcagtgggaggccagcagaagcggcatcaagaagagacacagcatgcccagactgagagacgcctgcgagctggagagcggcaccgagccctgcgtggtgagaagaatcgccgacagcagcgtgcagaccgacgacgaggacggcgagagcagatacctgctgagcagaagaagaagagccagaagaagcgccgactgcagcgtgcagaccgacgacgaggacagcgccgagtgggagcagcccgtgagaagaagaagaagcagactgcccagacacagcgacagcggcagcgacagcaagcacgacgccaccgccagcagcagcagcgccgccgccaccgtgagagccatgagcagcgtgggcatccagaccatcagcgactgcagcgtgcagaccgagcccgaccagctgcccagagtgagccccgccatccacatcaccgccgccaccgaccccaaggtggagatcgtgagatacatcagcgcccccgagaagaccggcagaggcgagagcctggcctgccagaccgagcccgacggccaggcccagggcgtggccggcccccagctggtgggccccaccgccatcagcccctacctgcccggcatccagatcgtgacccccggccccctgggcagattcgagaagaagaagcccgaccccctggagatcggctaccaggcccacctgccccccgagagcctgagccagctggtgagcagacagccccccaagagcccccaggtgctgtacagccccgtgagccccctgagcccccacagactgctggacaccagcttcgccagcagcgagagactgaacaaggcccacgtgagcccccagaagcacttcaccgccgacagcgccctgagacagcagaccctgcccagacccatgaagaccctgcagagaagcctgagcgaccccaagcccctgagccccaccgccgaggagagcgccaaggagagattcagcctgtaccagcaccagggcggcctgggcagccaggtgagcgccctgccccccaacagcctggtgagaaaggtgaagagaaccctgcccagccccccccccgaggaggcccacctgcccctggccggccaggccagcccccagctgtacgccgccagcctgctgcagagaggcctgaccggccccaccaccgtgcccgccaccaaggccagcctgctgagagagctggacagagacctgagactggtggagcacgagagcaccaagctgagaaagaagcaggccgagctggacgaggaggagaaggagatcgacgccaagctgaagtacctggagctgggcatcacccagagaaaggagagcctggccaaggacagaggcggcagagactacccccccctgagaggcctgggcgagcacagagactacctgagcgacagcgagctgaaccagctgagactgcagggctgcaccacccccgccggccagttcgtggacttccccgccaccgccgccgcccccgccacccccagcggccccaccgccttccagcagcccagattccagccccccgccccccagtacagcgccggcagcggcggccccacccagaacggcttccccgcccaccaggcccccacctaccccggccccagcacctaccccgcccccgccttcccccccggcgccagctaccccgccgagcccggcctgcccaaccagcaggccttcagacccaccggccactacgccggccagacccccatgcccaccacccagagcaccctgttccccgtgcccgccgacagcagagcccccctgcagaagcccagacagaccagcctggccgacctggagcagaaggtgcccaccaactacgaggtgatcgccagccccgtggtgcccatgagcagcgcccccagcgagaccagctacagcggccccgccgtgagcagcggctacgagcagggcaaggtgcccgaggtgcccagagccggcgacagaggcagcgtgagccagagccccgcccccacctaccccagcgacagccactacaccagcctggagcagaacgtgcccagaaactacgtgatgatcgacgacatcagcgagctgaccaaggacagcaccagcaccgcccccgacagccagagactggagcccctgggccccggcagcagcggcagacccggcaaggagcccggcgagcccggcgtgctggacggccccaccctgccctgctgctacgccagaggcgaggaggagagcgaggaggacagctacgaccccagaggcaagggcggccacctgagaagcatggagagcaacggcagacccgccagcacccactactacggcgacagcgactacagacacggcgccagagtggagaagtacggccccggccccatgggccccaagcaccccagcaagagcctggcccccgccgccatcagcagcaagagaagcaagcacagaaagcagggcatggagcagaagatcagcaagttcagccccatcgaggaggccaaggacgtggagagcgacctggccagctaccccccccccgccgtgagcagcagcctggtgagcagaggcagaaagttccaggacgagatcacctacggcctgaagaagaacgtgtacgagcagcagaagtactacggcatgagcagcagagacgccgtggaggacgacagaatctacggcggcagcagcagaagcagagcccccagcgcctacagcggcgagaagctgagcagccacgacttcagcggctggggcaagggctacgagagagagagagaggccgtggagagactgcagaaggccggccccaagcccagcagcctgagcatggcccacagcagagtgagaccccccatgagaagccaggccagcgaggaggagagccccgtgagccccctgggcagacccagacccgccggcggccccctgccccccggcggcgacacctgcccccagttctgcagcagccacagcatgcccgacgtgcaggagcacgtgaaggacggccccagagcccacgcctacaagagagaggagggctacatcctggacgacagccactgcgtggtgagcgacagcgaggcctaccacctgggccaggaggagaccgactggttcgacaagcccagagacgccagaagcgacagattcagacaccacggcggccacgccgtgagcagcagcagccagaagagaggccccgccagacacagctaccacgactacgacgagccccccgaggagggcctgtggccccacgacgagggcggccccggcagacacgccagcgccaaggagcacagacacggcgaccacggcagacacagcggcagacacaccggcgaggagcccggcagaagagccgccaagccccacgccagagacctgggcagacacgaggccagaccccacagccagcccagcagcgcccccgccatgcccaagaagggccagcccggctaccccagcagcgccgagtacagccagcccagcagagccagcagcgcctaccaccacgccagcgacagcaagaagggcagcagacaggcccacagcggccccgccgccctgcagagcaaggccgagccccaggcccagccccagctgcagggcagacaggccgcccccggcccccagcagagccagagccccagcagcagacagatccccagcggcgccgccagcagacagccccagacccagcagcagcagcagggcctgggcctgcagcccccccagcaggccctgacccaggccagactgcagcagcagagccagcccaccaccagaggcagcgcccccgccgccagccagcccgccggcaagccccagcccggccccagcaccgccaccggcccccagcccgccggcccccccagagccgagcagaccaacggcagcaagggcaccgccaaggccccccagcagggcagagccccccaggcccagcccgcccccggccccggccccgccggcgtgaaggccggcgccagacccggcggcacccccggcgcccccgccggccagcccggcgccgacggcgagagcgtgttcagcaagatcctgcccggcggcgccgccgagcaggccggcaagctgaccgaggccgtgagcgccttcggcaagaagttcagcagcttctggtag

SEQ ID NO: 138439 - protein, 388 aa, Artificial Sequence
  derived and/or modified sequence
MEPSPAAGGLETTRLVSPRDRGGAGGSLRLKSLFTEPSEPLPEESKPVEMPFHHCHRDPLPPPGLTPERLHARRQLYAACAVCFVFMAGEVVGGYLAHSLAIMTDAAHLLADVGSMMGSLFSLWLSTRPATRTMTFGWHRSETLGALASVVSLWMVTGILLYLAFVRLLHSDYHIEGGAMLLTASIAVCANLLMAFVLHQAGPPHSHGSRGAEYAPLEEGPEEPLPLGNTSVRAAFVHVLGDLLQSFGVLAASILIYFKPQYKAADPISTFLFSICALGSTAPTLRDVLRILMEGTPRNVGFEPVRDTLLSVPGVRATHELHLWALTLTYHVASAHLAIDSTADPEAVLAEASSRLYSRFGFSSCTLQVEQYQPEMAQCLRCQEPPQA

SEQ ID NO: 138440 - DNA, 1167 bp, Artificial Sequence
  derived and/or modified sequence
atggagccctcacctgccgctggaggcctggaaacaacccgactggtcagtccaagagaccgcggcggagccggcggcagtctcagactgaaatcactatttacggagccgagcgagcccctgcccgaggagtcaaaaccagtggaaatgcccttccaccattgtcatcgggatcccctgccacctccaggactcaccccagagcgcctgcatgcgcgccggcaactgtacgccgcatgcgcagtgtgctttgttttcatggccggcgaagtcgtggggggctatctggcacattcactggcaatcatgacagatgccgcccatctacttgccgatgtcggaagtatgatgggctccttgttttcgctatggctatctacgcgcccggcaaccaggactatgacctttggatggcatcgctcggaaacccttggggctctggctagcgtggtctctctttggatggttacagggattctgctctacctggcctttgtgcgcctgttgcactctgactatcatatagaaggaggcgcaatgctgctaactgcaagtatcgcagtgtgtgctaacctgcttatggcatttgtgctgcatcaagcaggacccccacacagtcacggcagtcggggggcagaatacgcccctctggaagaggggccagaagagcccctacctctcggaaatactagtgtgcgggctgcatttgtgcacgtgctgggagacctactgcagtcgtttggggtcctcgctgccagtattctgatctattttaaaccacagtacaaggctgcagaccctatttctacgttcctgttctccatttgtgccttgggatccacagcgcctactctcagagatgtcctgcgcatcctcatggaaggcacacctcgcaatgttggttttgagcctgttagggatacgctgttgtccgtccctggagtgcgcgctacgcatgagcttcatctgtgggccctgactctgacataccacgtcgcaagcgcccatctcgccatcgattcaaccgcagatcctgaagccgtgcttgcagaagcctcatccagactttattctcgattcgggttctccagctgtacactgcaggtcgaacaatatcagcccgagatggcccagtgcctgcgttgtcaggaacctccccaggcctag

SEQ ID NO: 138441 - DNA, 1167 bp, Artificial Sequence
  derived and/or modified sequence
atggagcccagccctgctgctgggggcctggagaccacccggctggtgagcccccgggaccggggcggggccggcggcagcctgcggctgaagagcctcttcacagagcccagcgagcccctgcctgaggagagcaagcctgtggagatgcccttccaccactgccaccgggaccccctgcccccacctggcctgaccccagagcggctgcacgcccggcggcagctgtatgctgcctgtgctgtgtgctttgtgttcatggccggggaggtggtgggcggctacctggcccacagcctggccatcatgacagatgctgcccacctgctggctgatgtgggctccatgatgggcagcctcttcagcctgtggctgagcaccaggcctgccaccaggaccatgaccttcggctggcacaggtctgagaccctgggcgccctggcctctgtggtgtccctgtggatggtgacaggcatcctgctgtacctggcctttgtgcggctgctgcacagcgactaccacattgaaggaggagccatgctgctgacagccagcattgctgtgtgtgccaacctgctgatggcctttgtgctgcaccaggccggccccccccacagccacggcagcagaggagcagaatatgcccccctggaggagggccctgaggagcccctgcccctgggcaacacctctgtgcgggccgcctttgtgcacgtgctgggggacctgctgcagagctttggagtgctggccgccagcatcctgatctacttcaagccccagtacaaggctgctgaccccatcagcaccttcctgttcagcatctgtgccctgggcagcacagcccccaccctgagagatgtgctgcgcatcctgatggagggcaccccaagaaatgtgggctttgagcctgtgcgggacaccctgctgtctgtgcctggggtgcgggccacccatgagctgcacctgtgggccctgaccctgacctaccacgtggccagcgcccacctggccatcgacagcacagctgaccctgaggccgtgctggccgaggccagcagccggctgtacagccgcttcggcttcagcagctgcaccctgcaggtggagcagtaccagcctgagatggcccagtgcctgcgctgccaggagcccccccaggcctag

SEQ ID NO: 138442 - DNA, 1167 bp, Artificial Sequence
  derived and/or modified sequence
atggagcccagccccgccgccggcggcctggagaccacccggctggtgtctccgcgcgaccggggtggggcggggggtagcctcagactgaagagcttattcactgagccaagtgaacccctccctgaagaaagcaagccagtcgagatgccgttccatcactgtcatagagaccccctgcccccaccagggctgacacctgagcgcctccacgcccggagacaactgtacgctgcgtgtgccgtgtgctttgtgttcatggctggtgaggttgtaggggggtatctggctcactccctcgctattatgactgatgcggcacacctgctggcggacgttggttctatgatgggatcacttttctccctgtggcttagcacccgtcccgctacccgtaccatgacctttgggtggcaccggtcagaaactctcggggccctcgcatctgtcgtctctctgtggatggtgactgggatcctgttatatctcgcttttgttcggctcctgcactccgattaccatatcgagggaggagccatgttgttaacggcaagcattgcggtttgtgcaaacctgcttatggcgtttgtcctccatcaagccgggccaccacacagtcacggctcccgtggagctgagtacgcgcctctggaggaagggcctgaagaaccattgccccttggcaatactagcgtccgggccgcattcgtgcacgtactgggggacctgcttcagtccttcggcgtgctcgccgcttccatattgatttactttaagcctcagtataaagccgctgatccaatctctacatttctgttcagcatctgtgcattagggtcaaccgcccccactttgcgcgatgtgctaaggattctgatggagggcacaccccggaacgtgggatttgaacctgttcgtgacaccctactgagcgtgccaggggtcagggccactcatgaactgcacctgtgggcacttacactcacctaccacgtggcatcagcacacctcgctatcgatagcacagccgaccctgaggctgtgttagcagaagcgtcaagtcgcctctatagcaggttcgggttttcctcatgcacactacaggtagaacaataccagcccgagatggcccagtgtctacgctgccaggaaccaccacaagcctag

SEQ ID NO: 138443 - DNA, 1167 bp, Artificial Sequence
  derived and/or modified sequence
atggagccctcccctgccgcaggtgggctggaaactacacgtcttgtgtcaccacgggaccggggaggagcaggtggctctctgaggctgaagtccctgttcaccgagcccagcgagcctctccctgaggaatctaaaccagtggagatgccgttccaccattgccacagggacccacttcccccaccaggcctgaccccagagcggctgcatgccagacgtcaactatatgccgcttgtgctgtctgttttgtattcatggccggagaagtagtagggggatacctggctcattcactcgccatcatgacagatgcggctcacctgctggccgacgtcggttcaatgatgggaagcctattctctctctggctttccacacggccagcgacacgcacaatgactttcggctggcatcggagcgaaacattgggggcacttgccagcgttgtgtcactgtggatggtgaccggcatactgctgtatttggccttcgtgcgcctccttcattctgattaccacattgaagggggagcaatgctgttgaccgctagtattgccgtctgcgccaaccttctcatggcgtttgtgctgcatcaggctggtccgccacactcccatggctccaggggcgcagaatatgcccctctcgaggaaggacccgaagagcccctccccctcggcaacacatccgtgagggctgctttcgtgcacgtcctgggcgacctccttcagtctttcggtgtattggccgcaagcatcctgatatatttcaagcctcagtacaaagcggcagatcccataagcacttttctgttttctatctgtgcgctgggcagcaccgcgcctactctccgcgatgtcctgaggattctgatggagggtaccccacgcaatgtcggtttcgaacccgtgagagacactctgcttagtgtgcccggtgtgagggccactcacgaattacacctgtgggcactgactcttacgtatcacgtggcctcagcacaccttgcaattgactcaacggcagaccccgaggcagtcctggcagaggcatcgtcccgtctctatagtaggttcggcttcagttcctgtaccttacaggtggaacagtatcaacctgagatggcacaatgcttaaggtgtcaggaaccccctcaagcctag

SEQ ID NO: 138444 - DNA, 2260 bp, Artificial Sequence
  derived and/or modified sequence
gggacggggctgtggagatgaggagttctccagaactcgggtggcggggcgctcccgggctctggcgcggggaaatggggctttggcagtgggggcggggcttaagggtggggagaggccggggagcctggaggcggagcttggggagctcgccccacgcggggcggggctccggcggcagcgggatctgcagttcggactccgcgcgccacagtcgctgcagttcgctccactctggtggccccgccgccctgcggggatcccgggggtcggcgggctgctcggacttggcgcggggccggcccggcctctctcttcctcggtggggcctagacggtcggggcaccgggaacatggagccctctccagccgctgggggcttggagaccactcgcctggtgagcccccgggaccgcggtggcgccggaggcagcctgcgtttgaagagtctcttcacagagccctcagagcccctccctgaggagtccaaacctgtggagatgcccttccaccactgccacagggacccccttccgccgccgggccttacccctgagaggctgcatgcacggaggcagctatatgctgcctgtgccgtttgctttgtcttcatggctggggaggtggtcggcgggtatctggcacacagcctggccatcatgaccgatgcagcccacttgctggcggatgtgggcagcatgatgggcagcctcttctccctctggctctccacccgtccagccacccgcaccatgacctttggctggcaccgttcagagactctgggggctttggcctctgtggtctccctctggatggtcactggcatcctcctgtacctggccttcgtccgcctgctgcacagcgactaccacatcgaggggggtgccatgctgctgaccgccagcatcgcagtctgtgccaacctgttaatggcctttgtgctgcaccaggctgggcccccccacagccacgggtctaggggagcagagtatgcaccgctggaggaggggcctgaagagcccctgcccctggggaacaccagcgtccgggcggcatttgtgcacgtgctgggggacctcctgcagagctttggggtactggctgcctccatcctcatctacttcaagcctcaatacaaggcagccgaccccatcagcaccttcctcttctccatctgtgcccttggatccaccgctcccaccctccgagacgttcttcgaatcctcatggaaggtaccccccgcaatgtggggttcgaacctgtgcgggatacgctgttgtcggtgccaggagtccgggcaacccatgagctgcacctgtgggcccttacgctcacttaccatgttgcctctgcacacctggccatcgactccaccgctgaccctgaagccgtcctggctgaagcctcatcccggctctactcccggtttggattctccagctgcaccctgcaggtcgagcagtatcagccggagatggcccagtgcctgcgctgccaggaacccccccaagcctgagccatggccctgccctcaccccactgccaggccgaggctcagccccagactctcagcatctgctgccctgatcacagagacgggaccgagccaggtccataccccttcctctctccctcctaccacctgccagtttccccagcctcagccccagccccagccccagtgggcaagaccaaagtgtggcggggagtggggtgggagtcaggggaatagatgtgactagttcaggggcggggactcccaggcctcagtgtggcagggtgtgttgaaggcctgtggtgccatctccccatggttcatgtggagccacgaacatcctttccctgcagtccatttgtctgtgtggcaggctggctggctgggggcatctgcctgtctatgtgctgttggtgtgcctatgcctgggggaggtcagtaggggccccctccccacatggccctcgctctgtctatgcaggggccccaaagcccgcactttgtccgtgtgtcttagccctgtggttttgtctgtgtgtgtgtgtgtgtgtgtgtgtgtgtgtgtgtgtgtgttcttggtgctgtggcctgtgtgtctctgtgcctatgtggctgtgctatggtttctatgagtctgctccatccatgtgtctgtttgggggtctatctctccatccctctgttggtgctgtgcccttggctatccctgaaagagggaggactccgctgcagctccaccaataaacttgtgtctcactgca

SEQ ID NO: 138445 - DNA, 1167 bp, Artificial Sequence
  derived and/or modified sequence
atggagcccagccccgccgccggcggcctggagaccaccagactggtgagccccagagacagaggcggcgccggcggcagcctgagactgaagagcctgttcaccgagcccagcgagcccctgcccgaggagagcaagcccgtggagatgcccttccaccactgccacagagaccccctgcccccccccggcctgacccccgagagactgcacgccagaagacagctgtacgccgcctgcgccgtgtgcttcgtgttcatggccggcgaggtggtgggcggctacctggcccacagcctggccatcatgaccgacgccgcccacctgctggccgacgtgggcagcatgatgggcagcctgttcagcctgtggctgagcaccagacccgccaccagaaccatgaccttcggctggcacagaagcgagaccctgggcgccctggccagcgtggtgagcctgtggatggtgaccggcatcctgctgtacctggccttcgtgagactgctgcacagcgactaccacatcgagggcggcgccatgctgctgaccgccagcatcgccgtgtgcgccaacctgctgatggccttcgtgctgcaccaggccggccccccccacagccacggcagcagaggcgccgagtacgcccccctggaggagggccccgaggagcccctgcccctgggcaacaccagcgtgagagccgccttcgtgcacgtgctgggcgacctgctgcagagcttcggcgtgctggccgccagcatcctgatctacttcaagccccagtacaaggccgccgaccccatcagcaccttcctgttcagcatctgcgccctgggcagcaccgcccccaccctgagagacgtgctgagaatcctgatggagggcacccccagaaacgtgggcttcgagcccgtgagagacaccctgctgagcgtgcccggcgtgagagccacccacgagctgcacctgtgggccctgaccctgacctaccacgtggccagcgcccacctggccatcgacagcaccgccgaccccgaggccgtgctggccgaggccagcagcagactgtacagcagattcggcttcagcagctgcaccctgcaggtggagcagtaccagcccgagatggcccagtgcctgagatgccaggagcccccccaggcctag

SEQ ID NO: 138446 - protein, 466 aa, Artificial Sequence
  derived and/or modified sequence
MVRSVAWAGFMVLLMIPWGSAAKLVCYFTNWAQYRQGEARFLPKDLDPSLCTHLIYAFAGMTNHQLSTTEWNDETLYQEFNGLKKMNPKLKTLLAIGGWNFGTQKFTDMVATANNRQTFVNSAIRFLRKYSFDGLDLDWEYPGSQGSPAVDKERFTTLVQDLANAFQQEAQTSGKERLLLSAAVPAGQTYVDAGYEVDKIAQNLDFVNLMAYDFHGSWEKVTGHNSPLYKRQEESGAAASLNVDAAVQQWLQKGTPASKLILGMPTYGRSFTLASSSDTRVGAPATGSGTPGPFTKEGGMLAYYEVCSWKGATKQRIQDQKVPYIFRDNQWVGFDDVESFKTKVSYLKQKGLGGAMVWALDLDDFAGFSCNQGRYPLIQTLRQELSLPYLPSGTPELEVPKPGQPSEPEHGPSPGQDTFCQGKADGLYPNPRERSSFYSCAAGRLFQQSCPTGLVFSNSCKCCTWN

SEQ ID NO: 138447 - DNA, 1401 bp, Artificial Sequence
  derived and/or modified sequence
atggttcgcagcgtggcctgggccggattcatggttttgcttatgattccatggggttctgcagcaaaactggtgtgttattttactaattgggcacagtatcgccagggtgaggctcgctttctgccaaaggacttagaccccagtctatgtacccatcttatttatgcttttgcaggcatgacaaatcatcaacttagcaccaccgagtggaacgacgaaactctctatcaagaattcaatggcctgaagaagatgaatccgaagttaaaaaccctgctggcaatcggaggatggaactttggaactcagaagtttactgatatggtggctacagctaataatagacagacgttcgttaactctgccatccggttcctgcgtaaatacagtttcgacggactggaccttgactgggagtaccctggcagccaaggaagccctgccgtcgataaggaacggttcacaactctcgtgcaggacctcgctaatgctttccagcaagaagctcagacaagtgggaaagagaggctgttgctgagcgcggctgtccccgctggacagacttacgtggacgctgggtatgaggtagacaagattgcccagaacttggacttcgttaacctcatggcttacgactttcacgggtcatgggaaaaggtcactggtcacaactctccactctataagagacaggaagaatcaggagctgccgcatctctgaatgtggatgccgcagtgcaacagtggctgcagaaaggcacacctgcctcaaagctgattctcggcatgccaacatacggtagatctttcactctagcctctagttccgatactcgcgtcggcgcaccagcaaccggatcgggtacacctggtcccttcacgaaggaaggcggtatgttggcatattacgaggtttgctcatggaaaggcgcaaccaaacaaagaattcaggatcaaaaagttccttacatattccgcgacaaccagtgggtgggttttgatgacgtggaatctttcaaaactaaagtttcctatctgaagcaaaaagggctcggaggtgccatggtctgggccctcgatctcgatgatttcgccggattttcctgcaatcagggtagatatccgttaatccagaccttgagacaggaattaagtctcccttacctgcctagtgggacacccgagttggaagtgccgaagccaggacaaccgagcgaacccgaacatggtcctagccctggccaggacaccttctgccaggggaaggccgatgggttgtacccgaaccctcgggaacgctcctctttctattcttgcgccgctgggaggttatttcaacagtcatgccccaccggactggtcttcagtaattcttgtaagtgttgcacctggaactag

SEQ ID NO: 138448 - DNA, 1401 bp, Artificial Sequence
  derived and/or modified sequence
atggtgagatcagttgcatgggccggattcatggttcttctgatgataccatggggttcagcagcaaagttagtttgttactttaccaactgggcgcaatatagacaaggcgaagcaagatttctgcccaaagacctggatccttccctgtgtactcaccttatctatgccttcgctggaatgacaaatcaccagttgagtaccacggaatggaacgacgagacgctttatcaggagtttaatggcctgaaaaaaatgaacccaaagctcaaaactttactcgcgattggcggatggaattttggtacacagaagttcacagacatggtcgctacggccaataaccggcagacatttgtaaatagtgctatcagatttttaagaaaatattccttcgacggtctcgatctggattgggaatatcccgggagccagggaagccctgccgttgacaaggaacgttttaccactttggtccaggatttggccaatgctttccaacaggaagcccagacatccggcaaagagagacttctactgagtgcagccgtgcccgctgggcagacttatgtggatgccggctacgaggttgacaagattgctcagaatttggattttgtcaatctgatggcgtatgatttccacggctcctgggaaaaagtgaccggtcacaactcccccctgtataagcgccaagaggaatccggtgcagctgccagtctaaatgtcgacgcagctgttcaacagtggctccagaaggggacaccagccagcaagcttatactgggcatgccaacctacggcaggagctttactttagcctcttcaagcgacacacgcgtcggcgcgcctgcaaccgggagcggcactcccgggccattcacgaaagaaggaggcatgttagcatattacgaagtctgctcttggaaaggcgcaactaagcagcggatccaggaccagaaggtaccatacatcttccgtgacaatcagtgggttggatttgacgacgtggaatccttcaaaacaaaagtaagctatctgaagcaaaagggactcggtggcgccatggtctgggcgctggacttggatgatttcgctggcttttcctgtaatcagggaaggtacccccttattcaaacgttaaggcaggaactgagtcttccctatctgccaagcggtacgcctgaactcgaagtgccaaagcctggacagccttccgagccggaacacggcccaagtccggggcaagacacattctgccagggcaaggctgacggcctgtacccaaacccacgcgagagatcatcattctactcatgcgcagccgggcgcttgttccagcagagctgcccaaccgggctggtgttcagtaactcctgtaagtgttgcacttggaattag

SEQ ID NO: 138449 - DNA, 1401 bp, Artificial Sequence
  derived and/or modified sequence
atggtgcgttctgtggcgtgggcaggattcatggtactgttaatgattccgtggggctcagcagccaaattggtgtgctactttacgaactgggctcagtatcgccagggcgaggctcgctttctcccaaaagaccttgatccatcactgtgtactcatctgatatacgctttcgcaggaatgaccaatcaccaactttctaccaccgaatggaatgacgaaaccctttaccaagagttcaacggattgaagaagatgaacccaaagctcaaaacacttctagcaataggagggtggaatttcggaacccagaaattcactgatatggtagctacagcaaacaataggcagaccttcgtgaacagcgcaataaggtttctcagaaaatactccttcgatggtctcgatctcgactgggaatacccagggtcacagggttccccagctgtcgacaaggaacgatttacaacactcgttcaggatctcgcgaatgccttccaacaggaggcacaaacctcagggaaggaacgactcctgctttctgccgcagtgcccgccggccagacttacgtggacgctggctacgaagttgacaaaatagcccagaacctggacttcgtaaatctgatggcctacgactttcacggatcctgggaaaaggtcacaggacacaactctcctctgtacaaaaggcaagaagaatccggagccgccgcctccctcaacgttgacgcagcagtccagcagtggcttcagaaagggacccctgcctctaagctcatcctcggtatgccaacttacggacgctcattcactctggcatccagttctgacactcgtgttggggcacccgctaccgggtcaggtactccagggcccttcacaaaagaagggggcatgcttgcgtactatgaagtctgtagttggaaaggtgctacaaaacagagaatccaagatcagaaagtcccatacattttccgtgataatcagtgggtgggcttcgacgacgtggagtcattcaagacaaaggtctcatatctgaagcaaaagggactcgggggtgcaatggtatgggcactggatttagacgatttcgccggctttagctgcaatcagggccgatatccgttgattcagactctgcgccaggagctgtcactgccttacttgccaagcgggaccccagaattggaggtgcccaaaccgggacagcctagcgagcccgaacacggacctagccccggacaggacactttttgtcagggaaaagcagatggcctttatcctaacccccgggaacgctctagtttttactcgtgtgctgcaggacgccttttccagcaatcctgtccaaccggtcttgtttttagcaactcgtgtaaatgctgcacttggaattag

SEQ ID NO: 138450 - DNA, 1401 bp, Artificial Sequence
  derived and/or modified sequence
atggtgagaagcgtggcctgggccggcttcatggtgctgctgatgatcccctggggcagcgccgccaagctggtgtgctacttcaccaactgggcccagtacagacagggcgaggccagattcctgcccaaggacctggaccccagcctgtgcacccacctgatctacgccttcgccggcatgaccaaccaccagctgagcaccaccgagtggaacgacgagaccctgtaccaggagttcaacggcctgaagaagatgaaccccaagctgaagaccctgctggccatcggcggctggaacttcggcacccagaagttcaccgacatggtggccaccgccaacaacagacagaccttcgtgaacagcgccatcagattcctgagaaagtacagcttcgacggcctggacctggactgggagtaccccggcagccagggcagccccgccgtggacaaggagagattcaccaccctggtgcaggacctggccaacgccttccagcaggaggcccagaccagcggcaaggagagactgctgctgagcgccgccgtgcccgccggccagacctacgtggacgccggctacgaggtggacaagatcgcccagaacctggacttcgtgaacctgatggcctacgacttccacggcagctgggagaaggtgaccggccacaacagccccctgtacaagagacaggaggagagcggcgccgccgccagcctgaacgtggacgccgccgtgcagcagtggctgcagaagggcacccccgccagcaagctgatcctgggcatgcccacctacggcagaagcttcaccctggccagcagcagcgacaccagagtgggcgcccccgccaccggcagcggcacccccggccccttcaccaaggagggcggcatgctggcctactacgaggtgtgcagctggaagggcgccaccaagcagagaatccaggaccagaaggtgccctacatcttcagagacaaccagtgggtgggcttcgacgacgtggagagcttcaagaccaaggtgagctacctgaagcagaagggcctgggcggcgccatggtgtgggccctggacctggacgacttcgccggcttcagctgcaaccagggcagataccccctgatccagaccctgagacaggagctgagcctgccctacctgcccagcggcacccccgagctggaggtgcccaagcccggccagcccagcgagcccgagcacggccccagccccggccaggacaccttctgccagggcaaggccgacggcctgtaccccaaccccagagagagaagcagcttctacagctgcgccgccggcagactgttccagcagagctgccccaccggcctggtgttcagcaacagctgcaagtgctgcacctggaactag

SEQ ID NO: 138451 - DNA, 1401 bp, Artificial Sequence
  derived and/or modified sequence
atggtgcggtcagtggcctgggccggctttatggtgttactcatgatcccatggggtagcgcagccaagcttgtgtgctacttcactaactgggcccagtatcgccagggggaggctcgcttccttcccaaagacctggatcccagcttgtgtacgcatctgatctatgctttcgcggggatgaccaaccaccagctctcaaccacagagtggaatgacgaaacactctatcaggagttcaatgggctcaagaaaatgaatcccaagctgaaaacattgctggcaatcggcggatggaattttgggacacagaagtttaccgatatggtcgccaccgcaaacaatagacaaacatttgtgaatagtgccatacggtttttgagaaagtactccttcgacggcctagacctcgactgggaatatccgggaagtcagggctcacccgcggtcgataaagagcgattcaccacattggtgcaggacttggccaatgccttccagcaggaggcacagacatccggaaaagagcgcctgctgctgagtgccgctgtacccgcaggacagacatacgtcgacgcggggtacgaagtggataaaattgcacagaaccttgatttcgtcaacttaatggcttacgacttccacggatcatgggagaaagtcacaggccacaatagtccgctgtacaagcggcaagaagagtctggggcggcagcatcccttaacgtggacgccgccgttcagcaatggctgcaaaagggaacccctgctagcaagctaattcttggcatgcccacctatggacgttcttttacactggctagtagctcggatacgagggtcggtgcccctgctacaggttccgggactcctggccctttcacgaaggaggggggcatgctagcatattatgaagtatgttcctggaaaggcgcaacaaaacaaaggattcaagatcaaaaagttccttatattttcagggacaatcagtgggtcggcttcgatgatgtcgaaagtttcaagaccaaggttagttacctcaagcagaaaggtttaggcggcgctatggtgtgggcccttgatttggacgacttcgccggcttttcctgcaaccagggacggtatcccctgatccaaaccctaaggcaggagctctctctcccctacctgccaagtggcaccccggagctggaggtgcccaaacctggccagccatcagagccagaacacgggcctagtccgggtcaggataccttttgccaggggaaggccgatgggttgtacccgaacccacgggagaggagttccttttactcttgtgccgctggccggctgtttcagcagtcctgtcctacggggttagtgtttagtaattcgtgtaagtgttgtacttggaattag

SEQ ID NO: 138452 - DNA, 2246 bp, Artificial Sequence
  derived and/or modified sequence
tttgtatgggctgcagcctgccgctgagctgcatcatggtgcggtctgtggcctgggcaggtttcatggtcctgctgatgatcccatggggctctgctgcaaaactggtctgctacttcaccaactgggcccagtacagacagggggaggctcgcttcctgcccaaggacttggaccccagcctttgcacccacctcatctacgccttcgctggcatgaccaaccaccagctgagcaccactgagtggaatgacgagactctctaccaggagttcaatggcctgaagaagatgaatcccaagctgaagaccctgttagccatcggaggctggaatttcggcactcagaagttcacagatatggtagccacggccaacaaccgtcagacctttgtcaactcggccatcaggtttctgcgcaaatacagctttgacggccttgaccttgactgggagtacccaggaagccaggggagccctgccgtagacaaggagcgcttcacaaccctggtacaggacttggccaatgccttccagcaggaagcccagacctcagggaaggaacgccttcttctgagtgcagcggttccagctgggcagacctatgtggatgctggatacgaggtggacaaaatcgcccagaacctggattttgtcaaccttatggcctacgacttccatggctcttgggagaaggtcacgggacataacagccccctctacaagaggcaagaagagagtggtgcagcagccagcctcaacgtggatgctgctgtgcaacagtggctgcagaaggggacccctgccagcaagctgatccttggcatgcctacctacggacgctccttcacactggcctcctcatcagacaccagagtgggggccccagccacagggtctggcactccaggccccttcaccaaggaaggagggatgctggcctactatgaagtctgctcctggaagggggccaccaaacagagaatccaggatcagaaggtgccctacatcttccgggacaaccagtgggtgggctttgatgatgtggagagcttcaaaaccaaggtcagctatctgaagcagaagggactgggcggggccatggtctgggcactggacttagatgactttgccggcttctcctgcaaccagggccgataccccctcatccagacgctacggcaggaactgagtcttccatacttgccttcaggcaccccagagcttgaagttccaaaaccaggtcagccctctgaacctgagcatggccccagccctggacaagacacgttctgccagggcaaagctgatgggctctatcccaatcctcgggaacggtccagcttctacagctgtgcagcggggcggctgttccagcaaagctgcccgacaggcctggtgttcagcaactcctgcaaatgctgcacctggaattgagtcgctaaagcccctccagtcccagctttgaggctgggcccaggatcactctacagcctgcctcctgggttttccctgggggccgcaatctggctcctgcaggcctttctgtggtcttcctttatccaggctttctgctctcagccttgccttccttttttctgggtctcctgggctgcccctttcacttgcaaaataaatctttggtttgtgcccctcttcccaaagatgtggtgacttaagaggctctctaagcacactgttgactccaaaacatccgcaggtcagagccaggtgggaaggtggtccgtgcaggatgtgccaggccctgtggcaggtcttgccccatgagtccatatgccagtgggcagtttccagtacacaggtgatggcagccagagcgcggccccaagtgcaacacgttctttggttattggctcagaagcctggaaacaggagcttctgcggaccttcacgcacgtgttattcccaaaatgccactagatggcagcagagaagaacttttccctgatttaagcgctctgcgagcagccactcagcattacactaagaattcagacccctggtactcaggggtcttcgagataaatcctgtttgggccctttgcaggccctatctcacctactgcccccgttcaccagatgaagaaggaacaatgattattctcactttataggcatttaaactgaagactgattctaaccaattctgagtccagaaccaaggcctgaaatgggccagagagcatgcacacggtgtcctggttaaataaagtcatcccaacattc

SEQ ID NO: 138453 - DNA, 1401 bp, Artificial Sequence
  derived and/or modified sequence
atggtgcgctctgtggcctgggccggcttcatggtgctgctgatgatcccctggggcagcgctgccaagctggtgtgctacttcaccaactgggcccagtaccggcagggcgaggcccgcttcctgcccaaggacctggaccccagcctgtgcacccacctgatctatgcctttgctggcatgaccaaccaccagctgagcaccacagagtggaatgatgagaccctgtaccaggagttcaacggcctgaagaagatgaaccccaagctgaagaccctgctggccatcggcggctggaactttggcacccagaagttcacagacatggtggccacagccaacaaccggcagacctttgtgaacagcgccatccgcttcctgaggaagtacagctttgatggcctggacctggactgggagtacccaggcagccagggcagccctgctgtggacaaggagcgcttcaccaccctggtgcaggacctggccaatgccttccagcaggaggcccagaccagcggcaaggagcggctgctgctgtctgctgctgtgcctgctggccagacctacgtggatgctggctatgaggtggacaagatcgcccagaacctggactttgtgaacctgatggcctatgacttccacggctcctgggagaaggtgacaggccacaacagccccctgtacaagaggcaggaggagagcggggccgccgccagcctgaatgtggatgctgctgtgcagcagtggctgcagaagggcaccccagccagcaagctgatcctgggcatgcccacctacggccgctccttcaccctggccagcagcagtgacaccagggtgggcgccccagccaccggcagcggcaccccaggccccttcaccaaggagggcggcatgctggcctactatgaggtgtgctcctggaagggggccaccaagcagaggatccaggaccagaaggtgccctacatcttccgggacaaccagtgggtgggctttgatgatgtggagagcttcaagaccaaggtgtcctacctgaagcagaagggcctgggcggggccatggtgtgggccctggacctggatgactttgctggcttcagctgcaaccagggccgctaccccctcatccagaccctgcggcaggagctgagcctgccctacctgcccagcggcaccccagagctggaggtgcccaagccaggccagcccagcgagcctgagcacggccccagccctggccaggacaccttctgccagggcaaggcagatggcctgtaccccaacccccgggagaggagcagcttctacagctgtgccgccggccgcctcttccagcagagctgccccaccggcctggtgttcagcaacagctgcaagtgctgcacctggaactag

SEQ ID NO: 138454 - DNA, 1401 bp, Artificial Sequence
  derived and/or modified sequence
atggtgcggagcgtggcctgggccggcttcatggtgctgctgatgattccctggggttcagcggctaagctggtatgttattttaccaattgggcccagtacaggcagggggaggcaagattcctgccgaaagacttggacccttcgctgtgtactcacttgatctacgcatttgccggtatgaccaaccatcagctctccaccaccgagtggaacgatgagaccctgtatcaagaattcaatgggctcaagaagatgaaccccaaactgaagaccctcctggcaatcggcggttggaacttcgggacccaaaaatttacagacatggtggctaccgcaaacaatagacagacattcgtgaacagcgcgatacggttcctgagaaagtattcatttgacggtcttgacttagactgggaatatccgggctcccagggcagtcctgcagtggacaaagagcgctttaccacgcttgtacaagacctggcgaatgccttccagcaagaggcacaaacctcaggcaaggaacggctcctgctgagtgccgccgtgccagctggccaaacttacgtggacgccgggtacgaggtggacaagattgctcaaaacctggatttcgtgaaccttatggcttacgactttcatgggagctgggagaaggtgacaggacacaattcgcctctttataagagacaggaggaatccggggcagcggcgagtctgaacgtggacgctgccgtccagcagtggctccagaagggaacccctgcatcaaaactcattcttggcatgcccacgtacgggcgaagcttcacactggcgtcctcatccgatactcgggtgggcgcccccgcgaccggaagcggaacccctgggccattcacaaaagagggcgggatgctggcctactacgaggtctgcagttggaagggtgcaaccaagcagcgcatccaggatcagaaggttccatacatttttcgcgacaaccaatgggtggggttcgatgacgtggagtccttcaagactaaggtatcctatctaaagcagaaagggctcggaggggcaatggtttgggctctggatctggatgatttcgccggtttcagctgcaatcagggcaggtatccgctgattcagactcttcgccaggagctgtcactgccatacttgcctagcggtacccctgagctggaagtgccgaagccaggtcagcctagcgaaccagagcatggcccaagccccggccaggatacattctgccaaggcaaggccgatggattgtaccctaatccccgcgaaagaagcagcttctactcttgtgctgcagggaggcttttccaacagtcttgtccgaccggcctcgtgtttagtaattcctgtaagtgttgtacgtggaactag

SEQ ID NO: 138455 - RNA, 1401 nt, Artificial Sequence
  derived and/or modified sequence
auggugagaucaguugcaugggccggauucaugguucuucugaugauaccaugggguucagcagcaaaguuaguuuguuacuuuaccaacugggcgcaauauagacaaggcgaagcaagauuucugcccaaagaccuggauccuucccuguguacucaccuuaucuaugccuucgcuggaaugacaaaucaccaguugaguaccacggaauggaacgacgagacgcuuuaucaggaguuuaauggccugaaaaaaaugaacccaaagcucaaaacuuuacucgcgauuggcggauggaauuuugguacacagaaguucacagacauggucgcuacggccaauaaccggcagacauuuguaaauagugcuaucagauuuuuaagaaaauauuccuucgacggucucgaucuggauugggaauaucccgggagccagggaagcccugccguugacaaggaacguuuuaccacuuugguccaggauuuggccaaugcuuuccaacaggaagcccagacauccggcaaagagagacuucuacugagugcagccgugcccgcugggcagacuuauguggaugccggcuacgagguugacaagauugcucagaauuuggauuuugucaaucugauggcguaugauuuccacggcuccugggaaaaagugaccggucacaacuccccccuguauaagcgccaagaggaauccggugcagcugccagucuaaaugucgacgcagcuguucaacaguggcuccagaaggggacaccagccagcaagcuuauacugggcaugccaaccuacggcaggagcuuuacuuuagccucuucaagcgacacacgcgucggcgcgccugcaaccgggagcggcacucccgggccauucacgaaagaaggaggcauguuagcauauuacgaagucugcucuuggaaaggcgcaacuaagcagcggauccaggaccagaagguaccauacaucuuccgugacaaucaguggguuggauuugacgacguggaauccuucaaaacaaaaguaagcuaucugaagcaaaagggacucgguggcgccauggucugggcgcuggacuuggaugauuucgcuggcuuuuccuguaaucagggaagguacccccuuauucaaacguuaaggcaggaacugagucuucccuaucugccaagcgguacgccugaacucgaagugccaaagccuggacagccuuccgagccggaacacggcccaaguccggggcaagacacauucugccagggcaaggcugacggccuguacccaaacccacgcgagagaucaucauucuacucaugcgcagccgggcgcuuguuccagcagagcugcccaaccgggcugguguucaguaacuccuguaaguguugcacuuggaauuag

SEQ ID NO: 138456 - RNA, 1401 nt, Artificial Sequence
  derived and/or modified sequence
auggugcguucuguggcgugggcaggauucaugguacuguuaaugauuccguggggcucagcagccaaauuggugugcuacuuuacgaacugggcucaguaucgccagggcgaggcucgcuuucucccaaaagaccuugauccaucacuguguacucaucugauauacgcuuucgcaggaaugaccaaucaccaacuuucuaccaccgaauggaaugacgaaacccuuuaccaagaguucaacggauugaagaagaugaacccaaagcucaaaacacuucuagcaauaggaggguggaauuucggaacccagaaauucacugauaugguagcuacagcaaacaauaggcagaccuucgugaacagcgcaauaagguuucucagaaaauacuccuucgauggucucgaucucgacugggaauacccagggucacaggguuccccagcugucgacaaggaacgauuuacaacacucguucaggaucucgcgaaugccuuccaacaggaggcacaaaccucagggaaggaacgacuccugcuuucugccgcagugcccgccggccagacuuacguggacgcuggcuacgaaguugacaaaauagcccagaaccuggacuucguaaaucugauggccuacgacuuucacggauccugggaaaaggucacaggacacaacucuccucuguacaaaaggcaagaagaauccggagccgccgccucccucaacguugacgcagcaguccagcaguggcuucagaaagggaccccugccucuaagcucauccucgguaugccaacuuacggacgcucauucacucuggcauccaguucugacacucguguuggggcacccgcuaccgggucagguacuccagggcccuucacaaaagaagggggcaugcuugcguacuaugaagucuguaguuggaaaggugcuacaaaacagagaauccaagaucagaaagucccauacauuuuccgugauaaucagugggugggcuucgacgacguggagucauucaagacaaaggucucauaucugaagcaaaagggacucgggggugcaaugguaugggcacuggauuuagacgauuucgccggcuuuagcugcaaucagggccgauauccguugauucagacucugcgccaggagcugucacugccuuacuugccaagcgggaccccagaauuggaggugcccaaaccgggacagccuagcgagcccgaacacggaccuagccccggacaggacacuuuuugucagggaaaagcagauggccuuuauccuaacccccgggaacgcucuaguuuuuacucgugugcugcaggacgccuuuuccagcaauccuguccaaccggucuuguuuuuagcaacucguguaaaugcugcacuuggaauuag

SEQ ID NO: 138457 - protein, 450 aa, Artificial Sequence
  derived and/or modified sequence
MPHNSIRSGHGGLNQLGGAFVNGRPLPEVVRQRIVDLAHQGVRPCDISRQLRVSHGCVSKILGRYYETGSIRPGVIGGSKPKVATPKVVEKIGDYKRQNPTMFAWEIRDRLLAEGVCDNDTVPSVSSINRIIRTKVQQPFNLPMDSCVATKSLSPGHTLIPSSAVTPPESPQSDSLGSTYSINGLLGIAQPGSDKRKMDDSDQDSCRLSIDSQSSSSGPRKHLRTDAFSQHHLEPLECPFERQHYPEAYASPSHTKGEQGLYPLPLLNSTLDDGKATLTPSNTPLGRNLSTHQTYPVVADPHSPFAIKQETPEVSSSSSTPSSLSSSAFLDLQQVGSGVPPFNAFPHAASVYGQFTGQALLSGREMVGPTLPGYPPHIPTSGQGSYASSAIAGMVAGSEYSGNAYGHTPYSSYSEAWRFPNSSLLSSPYYYSSTSRPSAPPTTATAFDHL

SEQ ID NO: 138458 - DNA, 1353 bp, Artificial Sequence
  derived and/or modified sequence
atgccccacaacagcatcagaagcggccacggcggcctgaaccagctgggcggcgccttcgtgaacggcagacccctgcccgaggtggtgagacagagaatcgtggacctggcccaccagggcgtgagaccctgcgacatcagcagacagctgagagtgagccacggctgcgtgagcaagatcctgggcagatactacgagaccggcagcatcagacccggcgtgatcggcggcagcaagcccaaggtggccacccccaaggtggtggagaagatcggcgactacaagagacagaaccccaccatgttcgcctgggagatcagagacagactgctggccgagggcgtgtgcgacaacgacaccgtgcccagcgtgagcagcatcaacagaatcatcagaaccaaggtgcagcagcccttcaacctgcccatggacagctgcgtggccaccaagagcctgagccccggccacaccctgatccccagcagcgccgtgaccccccccgagagcccccagagcgacagcctgggcagcacctacagcatcaacggcctgctgggcatcgcccagcccggcagcgacaagagaaagatggacgacagcgaccaggacagctgcagactgagcatcgacagccagagcagcagcagcggccccagaaagcacctgagaaccgacgccttcagccagcaccacctggagcccctggagtgccccttcgagagacagcactaccccgaggcctacgccagccccagccacaccaagggcgagcagggcctgtaccccctgcccctgctgaacagcaccctggacgacggcaaggccaccctgacccccagcaacacccccctgggcagaaacctgagcacccaccagacctaccccgtggtggccgacccccacagccccttcgccatcaagcaggagacccccgaggtgagcagcagcagcagcacccccagcagcctgagcagcagcgccttcctggacctgcagcaggtgggcagcggcgtgccccccttcaacgccttcccccacgccgccagcgtgtacggccagttcaccggccaggccctgctgagcggcagagagatggtgggccccaccctgcccggctaccccccccacatccccaccagcggccagggcagctacgccagcagcgccatcgccggcatggtggccggcagcgagtacagcggcaacgcctacggccacaccccctacagcagctacagcgaggcctggagattccccaacagcagcctgctgagcagcccctactactacagcagcaccagcagacccagcgccccccccaccaccgccaccgccttcgaccacctgtag

SEQ ID NO: 138459 - DNA, 1353 bp, Artificial Sequence
  derived and/or modified sequence
atgccgcacaactccatcaggtcagggcacggaggcctaaatcagttggggggcgcttttgtcaacggccgcccgctgcctgaagtggtgcgccagcggattgtcgacctggcacaccaaggagtccgcccctgcgatatttcccgtcagctgcgcgtgagccacggatgtgtgagcaagatcttggggcgatattatgagacagggagtattcggcctggtgttatcggtgggagtaagcctaaggtggcaacaccaaaggtagtcgaaaagatcggagactataaacggcagaatcctaccatgttcgcttgggagattcgcgatcgactgctggccgagggcgtgtgtgataatgataccgtcccctccgtgtcaagtatcaatcgtataatccgcaccaaagtacagcaaccgtttaacttgcccatggactcctgtgttgcaacaaagagtctgagccccgggcatacactgatacccagttctgctgtaacgccacccgagagcccacagagcgactctttaggctctacatattctatcaacggcctcctaggtattgcgcagcctggatccgacaagagaaaaatggatgacagcgaccaggactcttgtcgccttagcatcgatagccaaagctcatcgtctggtccaagaaagcaccttcggactgatgcttttagccagcatcacctggagccccttgagtgtcctttcgaacgccaacattaccctgaagcctacgctagccccagtcatactaagggagagcaggggttgtacccgttacctctcttaaactctacactcgatgacggcaaggccactctgacgccctcgaacaccccacttggacgaaacctgagtacacatcagacctaccccgtggttgcagaccctcactctccttttgctatcaagcaagaaacccctgaagtgtcctcaagttcatccactccaagcagcttgagctccagcgcttttttggaccttcagcaggtgggaagtggagttccaccttttaatgcatttccccacgctgcaagcgtttacggccagttcacagggcaagcattactgagcgggcgcgagatggtgggaccgacacttcctggctaccccccgcacatcccaacctccggccaaggttcatatgcctcaagcgcgatcgccggcatggtggcaggtagcgagtactccggtaacgcctacggtcacactccctactcctcatacagcgaggcctggcgattcccaaacagctccctcttatcgtccccatactactacagcagcactagccgcccttctgctccaccaacaactgccaccgccttcgaccacctctag

SEQ ID NO: 138460 - DNA, 1353 bp, Artificial Sequence
  derived and/or modified sequence
atgccccacaacagcatccgcagcggccacggcggcctgaaccagctgggcggggcctttgtgaatggccggcccctgcctgaggtggtgcggcagagaattgtggacctggcccaccagggcgtgcggccctgtgacatcagccggcagctgcgggtgagccacggctgtgtgtccaagatcctgggccgctactatgagaccggcagcatccggcctggggtcatcggcggcagcaagcccaaggtggccacccccaaggtggtggagaagatcggggactacaagaggcagaaccccaccatgtttgcctgggagatccgggaccggctgctggccgagggcgtgtgtgacaatgacacagtgcccagcgtgagcagcatcaaccgcatcatccgcaccaaggtgcagcagcccttcaacctgcccatggacagctgtgtggccaccaagagcctgagccctggccacaccctcatccccagcagcgctgtgaccccacctgagagcccccagagcgacagcctgggcagcacctacagcatcaatggcctgctgggcatcgcccagcccggcagtgacaagaggaagatggatgacagcgaccaggacagctgccgcctgagcattgacagccagagcagcagcagcggccccaggaagcacctgaggacagatgccttcagccagcaccacctggagcccctggagtgcccctttgagcggcagcactacccagaggcctatgccagccccagccacaccaagggggagcagggcctgtaccccctgcccctgctgaacagcaccctggatgatggcaaggccaccctgacccccagcaacacccccctgggcaggaacctgagcacccaccagacctaccctgtggtggccgacccccacagcccctttgccatcaagcaggagaccccagaggtgagcagcagcagcagcacccccagcagcctgagcagcagcgccttcctggacctgcagcaggtgggcagcggcgtgccccccttcaatgccttcccccacgccgcctctgtgtatggccagttcaccggccaggccctgctgagcggccgggagatggtgggccccaccctgcccggctacccaccccacatccccaccagcggccagggcagctatgccagcagcgccatcgccggcatggtggccggcagcgagtacagcggaaatgcctacggccacaccccctacagcagctacagcgaggcctggaggttccccaacagcagcctgctgagcagcccctactactacagcagcaccagccggcccagcgccccacccaccacagccacagcctttgaccacctgtag

SEQ ID NO: 138461 - DNA, 1353 bp, Artificial Sequence
  derived and/or modified sequence
atgccccacaacagcatccggagcggccacggcggcctgaaccagttagggggagcattcgtgaacggacgccccttgccagaagtggtacgacagagaatcgtggacttggctcaccagggggttcgcccatgcgacatttcgaggcagctaagggtgagccatggatgtgtctctaaaatcctcgggcgttactatgaaaccggttcaatccgacccggagttatcgggggaagtaaacccaaagtggccacaccaaaagtagtagagaagatcggcgactataagagacaaaacccgaccatgtttgcttgggagattagagaccggttgctagcggaaggagtatgcgacaacgacactgtcccatcggtctccagcataaacaggatcattcggacaaaggtgcagcagcccttcaaccttcccatggactcatgcgtggcaactaaatccttatctcccggccacactctcataccctctagcgccgtaaccccgcccgagtccccacagtccgactcccttggctccacctatagcatcaacggactgctaggaatcgctcagcccggcagtgataagcgcaagatggatgatagtgatcaggattcatgtcgcctgtcaatcgacagtcagtctagctcgagtggaccccgtaagcacctaagaactgacgccttttctcagcaccacctcgagcctctcgagtgcccgttcgaaagacagcattatccggaggcctacgcttcgcctagccacacaaaaggcgaacagggactgtatcccctgcccctactcaacagcaccctggacgacgggaaggctaccctcacaccatctaatacaccactggggcgcaacttgtctacacaccagacctatccagttgtggccgaccctcactccccattcgccattaagcaggaaactccagaggtgtccagcagctcttcaaccccaagcagcctgtcatcctcggcgttcctggatctgcagcaggtcggtagcggtgtgcccccatttaatgcctttcctcacgccgcgtcggtgtacggtcagttcaccggccaggctctcctctctggccgagagatggtgggcccgacactgcccgggtatcccccgcatattcccacgtcaggccaaggcagctacgcttccagcgctatagcagggatggtcgctgggagcgagtacagcgggaatgcctatggccataccccctacagctcttacagtgaagcctggaggttccctaattcttcattgctcagctcaccctactactattcttctacttcaagacctagcgccccccctaccacggcaaccgccttcgatcatctgtag

SEQ ID NO: 138462 - DNA, 1353 bp, Artificial Sequence
  derived and/or modified sequence
atgccccataatagcattagatctggtcacggcggtctcaaccagttaggaggggctttcgtcaacgggagaccattaccagaggttgtacggcaacgcattgtggatctggcgcaccagggcgtgcgaccttgcgacatatcacgtcagttgcgcgtctcgcacggttgtgtctctaagatcctggggaggtactacgagaccggtagcatcaggcccggtgtgattggcggttcgaaacctaaagttgccaccccgaaggtggtcgagaagataggggactataaacgtcagaatccgactatgttcgcctgggagatccgtgataggcttctggctgagggtgtgtgtgataacgacactgttcccagtgtcagtagtatcaaccggattatccgaacgaaggtgcagcagccttttaacctgcctatggacagttgtgtggcgaccaaaagcctgtctccgggacacacattaatcccaagttccgccgttacaccgcctgagtctccccaaagtgactccctgggtagtacatacagtatcaacgggctgctgggcattgcacaacccggtagtgacaagcggaaaatggacgatagtgatcaagactcttgccgcctttcgatcgactctcaaagttcaagcagcggcccacgcaagcatctgcgaaccgatgcattcagccagcatcacctcgagccacttgaatgtcccttcgaacggcaacattatcctgaggcctacgcatcacccagccatactaagggagagcagggtctgtatcccttgcctctgctgaacagcacactggacgatgggaaggccacattgactccctcaaacacaccactgggaagaaaccttagcacacatcagacctaccctgtcgtggcagaccctcactctcctttcgccattaaacaagagacacccgaagtgagctccagttctagcacgccttcttccctatctagctcagccttcttggatttgcagcaggtcggatccggggttcccccttttaacgcgtttcctcacgccgcttccgtgtatggccagttcaccggtcaggccttactgtcaggaagagagatggttggtcctactctgcctggttaccctccccatattccgacctccggtcagggctcatatgcctcatctgctattgccggtatggtggccggttctgagtactcaggcaacgcatatggtcacactccctacagctcttattccgaagcctggagattcccaaatagttccctcctgtccagcccatactattactcaagtacaagccgcccatccgctcctcccacgactgcaaccgcgttcgaccacctatag

SEQ ID NO: 138463 - protein, 352 aa, Artificial Sequence
  derived and/or modified sequence
MEGISIYTSDNYTEEMGSGDYDSMKEPCFREENANFNKIFLPTIYSIIFLTGIVGNGLVILVMGYQKKLRSMTDKYRLHLSVADLLFVITLPFWAVDAVANWYFGNFLCKAVHVIYTVNLYSSVLILAFISLDRYLAIVHATNSQRPRKLLAEKVVYVGVWIPALLLTIPDFIFANVSEADDRYICDRFYPNDLWVVVFQFQHIMVGLILPGIVILSCYCIIISKLSHSKGHQKRKALKTTVILILAFFACWLPYYIGISIDSFILLEIIKQGCEFENTVHKWISITEALAFFHCCLNPILYAFLGAKFKTSAQHALTSVSRGSSLKILSKGKRGGHSSVSTESESSSFHSS

SEQ ID NO: 138464 - protein, 222 aa, Artificial Sequence
  derived and/or modified sequence
MPWQTGTLGTSYARQSMSSTQSTSTAVSSSWIPALLLTIPDFIFANVSEADDRYICDRFYPNDLWVVVFQFQHIMVGLILPGIVILSCYCIIISKLSHSKGHQKRKALKTTVILILAFFACWLPYYIGISIDSFILLEIIKQGCEFENTVHKWISITEALAFFHCCLNPILYAFLGAKFKTSAQHALTSVSRGSSLKILSKGKRGGHSSVSTESESSSFHSS

SEQ ID NO: 138465 - DNA, 1059 bp, Artificial Sequence
  derived and/or modified sequence
atggagggcatcagcatctacaccagcgacaactacaccgaggagatgggcagcggcgactacgacagcatgaaggagccctgcttcagagaggagaacgccaacttcaacaagatcttcctgcccaccatctacagcatcatcttcctgaccggcatcgtgggcaacggcctggtgatcctggtgatgggctaccagaagaagctgagaagcatgaccgacaagtacagactgcacctgagcgtggccgacctgctgttcgtgatcaccctgcccttctgggccgtggacgccgtggccaactggtacttcggcaacttcctgtgcaaggccgtgcacgtgatctacaccgtgaacctgtacagcagcgtgctgatcctggccttcatcagcctggacagatacctggccatcgtgcacgccaccaacagccagagacccagaaagctgctggccgagaaggtggtgtacgtgggcgtgtggatccccgccctgctgctgaccatccccgacttcatcttcgccaacgtgagcgaggccgacgacagatacatctgcgacagattctaccccaacgacctgtgggtggtggtgttccagttccagcacatcatggtgggcctgatcctgcccggcatcgtgatcctgagctgctactgcatcatcatcagcaagctgagccacagcaagggccaccagaagagaaaggccctgaagaccaccgtgatcctgatcctggccttcttcgcctgctggctgccctactacatcggcatcagcatcgacagcttcatcctgctggagatcatcaagcagggctgcgagttcgagaacaccgtgcacaagtggatcagcatcaccgaggccctggccttcttccactgctgcctgaaccccatcctgtacgccttcctgggcgccaagttcaagaccagcgcccagcacgccctgaccagcgtgagcagaggcagcagcctgaagatcctgagcaagggcaagagaggcggccacagcagcgtgagcaccgagagcgagagcagcagcttccacagcagctag

SEQ ID NO: 138466 - DNA, 669 bp, Artificial Sequence
  derived and/or modified sequence
atgccctggcagaccggcaccctgggcaccagctacgccagacagagcatgagcagcacccagagcaccagcaccgccgtgagcagcagctggatccccgccctgctgctgaccatccccgacttcatcttcgccaacgtgagcgaggccgacgacagatacatctgcgacagattctaccccaacgacctgtgggtggtggtgttccagttccagcacatcatggtgggcctgatcctgcccggcatcgtgatcctgagctgctactgcatcatcatcagcaagctgagccacagcaagggccaccagaagagaaaggccctgaagaccaccgtgatcctgatcctggccttcttcgcctgctggctgccctactacatcggcatcagcatcgacagcttcatcctgctggagatcatcaagcagggctgcgagttcgagaacaccgtgcacaagtggatcagcatcaccgaggccctggccttcttccactgctgcctgaaccccatcctgtacgccttcctgggcgccaagttcaagaccagcgcccagcacgccctgaccagcgtgagcagaggcagcagcctgaagatcctgagcaagggcaagagaggcggccacagcagcgtgagcaccgagagcgagagcagcagcttccacagcagctag

SEQ ID NO: 138467 - DNA, 1682 bp, Artificial Sequence
  derived and/or modified sequence
cgcggccagaaacttcagtttgttggctgcggcagcaggtagcaaagtgacgccgagggcctgagtgctccagtagccaccgcatctggagaaccagcggttaccatggaggggatcagtatatacacttcagataactacaccgaggaaatgggctcaggggactatgactccatgaaggaaccctgtttccgtgaagaaaatgctaatttcaataaaatcttcctgcccaccatctactccatcatcttcttaactggcattgtgggcaatggattggtcatcctggtcatgggttaccagaagaaactgagaagcatgacggacaagtacaggctgcacctgtcagtggccgacctcctctttgtcatcacgcttcccttctgggcagttgatgccgtggcaaactggtactttgggaacttcctatgcaaggcagtccatgtcatctacacagtcaacctctacagcagtgtcctcatcctggccttcatcagtctggaccgctacctggccatcgtccacgccaccaacagtcagaggccaaggaagctgttggctgaaaaggtggtctatgttggcgtctggatccctgccctcctgctgactattcccgacttcatctttgccaacgtcagtgaggcagatgacagatatatctgtgaccgcttctaccccaatgacttgtgggtggttgtgttccagtttcagcacatcatggttggccttatcctgcctggtattgtcatcctgtcctgctattgcattatcatctccaagctgtcacactccaagggccaccagaagcgcaaggccctcaagaccacagtcatcctcatcctggctttcttcgcctgttggctgccttactacattgggatcagcatcgactccttcatcctcctggaaatcatcaagcaagggtgtgagtttgagaacactgtgcacaagtggatttccatcaccgaggccctagctttcttccactgttgtctgaaccccatcctctatgctttccttggagccaaatttaaaacctctgcccagcacgcactcacctctgtgagcagagggtccagcctcaagatcctctccaaaggaaagcgaggtggacattcatctgtttccactgagtctgagtcttcaagttttcactccagctaacacagatgtaaaagacttttttttatacgataaataacttttttttaagttacacatttttcagatataaaagactgaccaatattgtacagtttttattgcttgttggatttttgtcttgtgtttctttagtttttgtgaagtttaattgacttatttatataaattttttttgtttcatattgatgtgtgtctaggcaggacctgtggccaagttcttagttgctgtatgtctcgtggtaggactgtagaaaagggaactgaacattccagagcgtgtagtgaatcacgtaaagctagaaatgatccccagctgtttatgcatagataatctctccattcccgtggaacgtttttcctgttcttaagacgtgattttgctgtagaagatggcacttataaccaaagcccaaagtggtatagaaatgctggtttttcagttttcaggagtgggttgatttcagcacctacagtgtacagtcttgtattaagttgttaataaaagtacatgttaaact

SEQ ID NO: 138468 - DNA, 1347 bp, Artificial Sequence
  derived and/or modified sequence
agtttgttggctgcggcagcaggtagcaaagtgacgccgagggcctgagtgctccagtagccaccgcatctggagaaccagcggttaccatggaggggatcagtatatacacttcagataactacaccgaggaaatgggctcaggggactatgactccatgaaggaaccctgtttccgtgaagaaaatgctaatttcaataaaatcttcctgcccaccatctactccatcatcttcttaactggcattgtgggcaatggattggtcatcctggtcatgggttaccagaagaaactgagaagcatgacggacaagtacaggctgcacctgtcagtggccgacctcctctttgtcatcacgcttcccttctgggcagttgatgccgtggcaaactggtactttgggaacttcctatgcaaggcagtccatgtcatctacacagtcaacctctacagcagtgtcctcatcctggatccctgccctcctgctgactattcccgacttcatctttgccaacgtcagtgaggcagatgacagatatatctgtgaccgcttctaccccaatgacttgtgggtggttgtgttccagtttcagcacatcatggttggccttatcctgcctggtattgtcatcctgtcctgctattgcattatcatctccaagctgtcacactccaagggccaccagaagcgcaaggccctcaagaccacagtcatcctcatcctggctttcttcgcctgttggctgccttactacattgggatcagcatcgactccttcatcctcctggaaatcatcaagcaagggtgtgagtttgagaacactgtgcacaagtggatttccatcaccgaggccctagctttcttccactgttgtctgaaccccatcctctatgctttccttggagccaaatttaaaacctctgcccagcacgcactcacctctgtgagcagagggtccagcctcaagatcctctccaaaggaaagcgaggtggacattcatctgtttccactgagtctgagtcttcaagttttcactccagctaacacagatgtaaaagacttttttttatacgataaataacttttttttaagttacacatttttcagatataaaagactgaccaatattgtacagtttttattgcttgttggatttttgtcttgtgtttctttagtttttgtgaagtttaattgacttatttatataaattttttttgtttcatattgatgtgtgtctaggcaggacctgtggccaagttcttagttgctgtatgtctcgtggtaggactgtagaaaagggaactgaacattccagagcgtgtagtgaatcacgtaaagctag

SEQ ID NO: 138469 - DNA, 1059 bp, Artificial Sequence
  derived and/or modified sequence
atggaaggcatctccatctacacctctgacaactataccgaagaaatgggatcaggcgattacgactctatgaaagagccgtgtttcagagaggaaaacgccaacttcaataagattttcttgcccacaatctactccattatattcctaacaggaatcgtcgggaatggcttagtgattctggtgatgggctatcagaaaaaactgaggtcaatgaccgacaaataccgtttacatttgtcggtggctgacctattattcgttatcactctgcctttttgggccgtcgacgccgtggcgaactggtacttcgggaactttctttgtaaagccgtgcacgtaatttacaccgtgaacctttactcttctgtgctaattctggctttcatttcccttgatcgatatctcgctatcgtgcacgccaccaactcccagcgtcctagaaagctgcttgcagaaaaagttgtgtacgtgggagtctggattcccgccttgttactgacaatacccgatttcatatttgctaatgtgagcgaagccgacgacaggtatatttgtgatcggttctacccaaatgacttgtgggtagttgtatttcaattccaacacataatggtaggcctgattttgcctggaatcgtgattctctcctgctactgcatcatcatctcaaagctgtctcacagtaagggtcatcaaaaaagaaaagcacttaagaccacagtcatcctcatcctagcatttttcgcatgttggcttccctactatatcggaatcagcatcgatagcttcattctgctggagatcatcaagcaggggtgtgaatttgagaatacagtacacaaatggatcagtatcaccgaggcactcgccttctttcactgttgcctcaacccaatcttgtacgcgttcctcggtgccaagtttaagacgagcgcccagcacgccctgacgtctgtgtcccggggctcatctctgaagattcttagcaaagggaagaggggcggacattcctccgtttccactgagtctgaatcttctagcttccattcttcgtag

SEQ ID NO: 138470 - DNA, 669 bp, Artificial Sequence
  derived and/or modified sequence
atgccctggcagacaggaactttggggacctcttacgccaggcagtcaatgagtagtacccagtccacttccacggctgtgtccagttcctggattcccgccctcctgttaacaatccccgacttcatattcgctaacgtaagcgaagccgacgaccggtatatttgcgacagattttaccctaatgacctctgggtggtagtgttccaattccagcatatcatggttggcctgatcctgcccggaatcgtgatcctgtcatgttactgtatcataatctccaaattatcacattcaaagggacaccagaaaagaaaggcactcaaaacaaccgtaatccttattctcgccttcttcgcatgctggctgccctactacattggaatatctattgatagctttatactactggagattatcaagcaaggctgcgagttcgagaacacggtgcacaaatggataagcatcacagaggccctcgcgttcttccattgctgtctcaaccccatcctttatgccttcctgggagccaaattcaagacctcagcccagcacgccctgacatccgtgtcaagaggtagcagcctgaaaattcttagcaaggggaagagaggcggacattcatccgtaagcacagagtcggagtcctcttcattccattccagttag

SEQ ID NO: 138471 - DNA, 1059 bp, Artificial Sequence
  derived and/or modified sequence
atggagggcatcagcatctacaccagtgacaactacacagaggagatgggcagcggggactatgacagcatgaaggagccctgcttccgggaggagaatgccaacttcaacaagatcttcctgcccaccatctacagcatcatcttcctgactggaattgtgggcaatggcctggtgatcctggtgatgggctaccagaagaagctgcgctccatgacagacaagtaccgcctgcacctgtctgtggccgacctgctgtttgtgatcaccctgcccttctgggccgtggatgctgtggccaactggtacttcggcaacttcctgtgcaaggctgtgcacgtgatctacacagtgaacctgtacagctctgtgctgatcctggccttcatcagcctggaccgctacctggccatcgtgcacgccaccaacagccagaggcccaggaagctgctggccgagaaggtggtgtatgtgggcgtgtggatcccagccctgctgctgaccatcccagacttcatctttgccaacgtgtctgaggctgatgaccgctacatctgtgaccgcttctacccaaatgacctgtgggtggtggtgttccagttccagcacatcatggtgggcctcatcctgcccggcatcgtcatcctgagctgctactgcatcatcatcagcaagctgagccacagcaagggccaccagaagaggaaggccctgaagaccaccgtcatcctgatcctggccttctttgcctgctggctgccctactacatcggcatcagcattgacagcttcatcctgctggagatcatcaagcagggctgtgaatttgaaaatacagtgcacaagtggatcagcatcacagaggccctggccttcttccactgctgcctgaaccccatcctgtatgccttcctgggcgccaagttcaagaccagcgcccagcacgccctgacctctgtgtcccggggcagcagcctgaagatcctgagcaagggcaagagaggaggccacagctctgtgtccacagagagcgagagcagcagcttccacagcagctag

SEQ ID NO: 138472 - DNA, 669 bp, Artificial Sequence
  derived and/or modified sequence
atgccctggcagacaggcaccctgggcaccagctatgcccggcagagcatgagcagcacccagagcaccagcacagctgtgagcagctcctggatcccagccctgctgctgaccatcccagacttcatctttgccaacgtgtctgaggctgatgaccgctacatctgtgaccgcttctacccaaatgacctgtgggtggtggtgttccagttccagcacatcatggtgggcctcatcctgcccggcatcgtcatcctgagctgctactgcatcatcatcagcaagctgagccacagcaagggccaccagaagaggaaggccctgaagaccaccgtcatcctgatcctggccttctttgcctgctggctgccctactacatcggcatcagcattgacagcttcatcctgctggagatcatcaagcagggctgtgaatttgaaaatacagtgcacaagtggatcagcatcacagaggccctggccttcttccactgctgcctgaaccccatcctgtatgccttcctgggcgccaagttcaagaccagcgcccagcacgccctgacctctgtgtcccggggcagcagcctgaagatcctgagcaagggcaagagaggaggccacagctctgtgtccacagagagcgagagcagcagcttccacagcagctag

SEQ ID NO: 138473 - DNA, 1059 bp, Artificial Sequence
  derived and/or modified sequence
atggagggcatcagcatctacaccagcgacaactacaccgaggagatgggcagcggggattatgactccatgaaagaaccttgctttcgagaggagaacgctaatttcaataaaatcttcctgcctaccatttattccattatcttcctgacaggcatcgttggcaacggacttgtgatccttgtgatgggctatcagaaaaagttgagaagcatgaccgataagtacaggctgcacctttctgtggccgacctcttatttgttatcaccctccccttctgggccgtcgacgccgtagctaattggtatttcggcaattttctgtgcaaggccgttcacgttatttacacggtcaatctttacagtagcgtcctcattctggctttcatttccttagaccgctacttggccattgtgcacgccactaatagtcagagacctcgcaaactactcgcagaaaaagtcgtgtacgtgggagtatggattcccgccctgctgcttaccatacctgattttatctttgctaatgtgtcagaggccgacgataggtacatctgcgaccgcttctaccccaatgatctgtgggtggtagtgtttcagttccagcatatcatggtcggactgatcctgccaggcatcgtaattctaagttgctattgcattatcatatctaaactgtctcactccaaaggacaccagaagcggaaagcgttgaaaactacagtgatactcatactggcttttttcgcttgctggctgccatattatatcggaatctcgatcgacagttttatcctccttgaaattatcaagcagggctgcgaattcgaaaataccgtgcataaatggattagcattacagaggccctggcctttttccactgctgcctgaatcctatcctgtatgcattcctgggagccaaattcaagacaagcgcacagcacgctctcactagcgtcagcagaggttcaagcctaaagatactgagcaagggcaagagaggagggcatagttctgttagcacggagagcgagtcgtctagcttccattccagttag

SEQ ID NO: 138474 - DNA, 669 bp, Artificial Sequence
  derived and/or modified sequence
atgccctggcagaccggcaccctgggcaccagctacgcccggcagtccatgagctccacacagagtacctccaccgccgtgtcaagtagctggatcccagccctcctcctgacaatccctgactttatctttgctaatgtgtcagaggccgacgaccgatacatatgcgacaggttttatcccaacgatctatgggtggtcgttttccagtttcaacatattatggtgggtcttattctgccaggaattgtgatcctgagttgctactgcattataatctctaagctatcccactccaagggccaccagaagcgcaaagcgctgaagacaacggttattctaatcctggcttttttcgcttgctggcttccctactacattggcatcagcatagattcattcatactgctcgagatcatcaagcaaggctgtgagtttgagaatacagtacacaaatggatctctattacagaggccttggccttctttcactgctgcctcaatccaattctgtacgccttccttggagctaaattcaaaacgtctgcccagcacgcccttacctccgtcagccgtggttcatctttaaaaatactctcaaagggcaaaagaggtgggcattcttccgtgtcaacagagagcgaatccagctcctttcactcctcttag

SEQ ID NO: 138475 - DNA, 1059 bp, Artificial Sequence
  derived and/or modified sequence
atggaaggcatctctatatacaccagcgacaactatactgaagagatgggttctggcgactatgatagtatgaaagagccttgctttagagaagaaaatgctaacttcaacaagatcttcctgcctacaatctattcaattatttttctaacaggaattgtgggcaatggcctggtgatccttgtgatggggtatcaaaagaaattgcggtctatgactgacaaatatcgactgcacttgtcggtagccgaccttctttttgtcataacgctgcccttctgggctgtagacgcggtggctaactggtattttggaaactttctgtgtaaggccgtgcacgtcatctacacagttaatctctactctagtgtcctaatacttgcttttatctctcttgatagatacctagcaattgttcatgcgacaaattcccagaggcctagaaagctccttgccgagaaagttgtttacgtgggagtctggatccccgctcttctgttgacaatccctgatttcatctttgcgaatgtttccgaagcggatgatagatatatctgcgacagattttatcccaatgatctctgggtggtggtcttccagtttcagcacatcatggtcgggctaatcctgcctggcattgtcatactgtcttgctactgcatcatcattagcaagttaagtcactcaaaggggcatcaaaagagaaaagctttgaagactactgtgatccttatcctcgctttctttgcatgttggttaccatattacatcggaatctcaatcgactctttcattttgttggaaataattaagcaagggtgtgagtttgagaataccgtgcataaatggatttccataacggaggccctcgcattcttccactgctgtctgaatcccatactttatgcattcctcggagccaaatttaaaacatcagctcagcacgcgcttacttcagttagtagaggcagtagccttaagatactctcaaagggcaagcgcggtggccactcttctgtgtctacagaatctgaatccagctcattccattcatcttag

SEQ ID NO: 138476 - DNA, 669 bp, Artificial Sequence
  derived and/or modified sequence
atgccttggcagaccggaaccctaggcacttcatacgctcgacagtccatgtcttctactcagtccacgtctaccgccgtgagttcatcatggatcccagccctgttactgaccatccccgacttcatattcgccaacgtgagcgaagccgacgataggtacatctgtgatcggttctatcctaacgacctgtgggttgtggtgttccagtttcaacacataatggtaggtcttatactgccaggcatcgtgatactctcctgttactgcataattatctccaagctgagtcattcaaaggggcaccagaagaggaaagccctgaagacgaccgttattctgatcttggctttttttgcatgttggctgccatattacatcggcatctcaatagacagttttatactgctcgaaattatcaaacagggatgcgagttcgagaacactgtgcataagtggattagtataactgaggccttggcgttttttcattgctgtctcaatcctattttatatgctttcttgggggctaagttcaaaacttctgcacagcacgccctgaccagtgtttccagaggcagctcattgaagatcctaagtaagggaaaacgcggaggacatagtagcgtgtccactgaatctgagtcatctagctttcacagctcttag

SEQ ID NO: 138477 - protein, 585 aa, Artificial Sequence
  derived and/or modified sequence
MARPDPSAPPSLLLLLLAQLVGRAAAASKAPVCQEITVPMCRGIGYNLTHMPNQFNHDTQDEAGLEVHQFWPLVEIQCSPDLRFFLCSMYTPICLPDYHKPLPPCRSVCERAKAGCSPLMRQYGFAWPERMSCDRLPVLGRDAEVLCMDYNRSEATTAPPRPFPAKPTLPGPPGAPASGGECPAGGPFVCKCREPFVPILKESHPLYNKVRTGQVPNCAVPCYQPSFSADERTFATFWIGLWSVLCFISTSTTVATFLIDMERFRYPERPIIFLSACYLCVSLGFLVRLVVGHASVACSREHNHIHYETTGPALCTIVFLLVYFFGMASSIWWVILSLTWFLAAGMKWGNEAIAGYAQYFHLAAWLIPSVKSITALALSSVDGDPVAGICYVGNQNLNSLRGFVLGPLVLYLLVGTLFLLAGFVSLFRIRSVIKQGGTKTDKLEKLMIRIGIFTLLYTVPASIVVACYLYEQHYRESWEAALTCACPGHDTGQPRAKPEYWVLMLKYFMCLVVGITSGVWIWSGKTVESWRRFTSRCCCRPRRGHKSGGAMAAGDYPEASAALTGRTGPPGPAATYHKQVSLSHV

SEQ ID NO: 138478 - DNA, 1758 bp, Artificial Sequence
  derived and/or modified sequence
atggccagacccgaccccagcgccccccccagcctgctgctgctgctgctggcccagctggtgggcagagccgccgccgccagcaaggcccccgtgtgccaggagatcaccgtgcccatgtgcagaggcatcggctacaacctgacccacatgcccaaccagttcaaccacgacacccaggacgaggccggcctggaggtgcaccagttctggcccctggtggagatccagtgcagccccgacctgagattcttcctgtgcagcatgtacacccccatctgcctgcccgactaccacaagcccctgcccccctgcagaagcgtgtgcgagagagccaaggccggctgcagccccctgatgagacagtacggcttcgcctggcccgagagaatgagctgcgacagactgcccgtgctgggcagagacgccgaggtgctgtgcatggactacaacagaagcgaggccaccaccgccccccccagacccttccccgccaagcccaccctgcccggcccccccggcgcccccgccagcggcggcgagtgccccgccggcggccccttcgtgtgcaagtgcagagagcccttcgtgcccatcctgaaggagagccaccccctgtacaacaaggtgagaaccggccaggtgcccaactgcgccgtgccctgctaccagcccagcttcagcgccgacgagagaaccttcgccaccttctggatcggcctgtggagcgtgctgtgcttcatcagcaccagcaccaccgtggccaccttcctgatcgacatggagagattcagataccccgagagacccatcatcttcctgagcgcctgctacctgtgcgtgagcctgggcttcctggtgagactggtggtgggccacgccagcgtggcctgcagcagagagcacaaccacatccactacgagaccaccggccccgccctgtgcaccatcgtgttcctgctggtgtacttcttcggcatggccagcagcatctggtgggtgatcctgagcctgacctggttcctggccgccggcatgaagtggggcaacgaggccatcgccggctacgcccagtacttccacctggccgcctggctgatccccagcgtgaagagcatcaccgccctggccctgagcagcgtggacggcgaccccgtggccggcatctgctacgtgggcaaccagaacctgaacagcctgagaggcttcgtgctgggccccctggtgctgtacctgctggtgggcaccctgttcctgctggccggcttcgtgagcctgttcagaatcagaagcgtgatcaagcagggcggcaccaagaccgacaagctggagaagctgatgatcagaatcggcatcttcaccctgctgtacaccgtgcccgccagcatcgtggtggcctgctacctgtacgagcagcactacagagagagctgggaggccgccctgacctgcgcctgccccggccacgacaccggccagcccagagccaagcccgagtactgggtgctgatgctgaagtacttcatgtgcctggtggtgggcatcaccagcggcgtgtggatctggagcggcaagaccgtggagagctggagaagattcaccagcagatgctgctgcagacccagaagaggccacaagagcggcggcgccatggccgccggcgactaccccgaggccagcgccgccctgaccggcagaaccggcccccccggccccgccgccacctaccacaagcaggtgagcctgagccacgtgtag

SEQ ID NO: 138479 - DNA, 6708 bp, Artificial Sequence
  derived and/or modified sequence
ctcccggccccggggagaacgcacggcctgcccctgcccggctccgtctggatcatgcggggggctcccgaggaggagagggcgagtgaccggcctgcgccgcccctgttctgggggcgccccccactctgagtcgcccccacctgctgccatgtgccgctgccacgggtacccagcctgtcgctaaactttccgggcgccagcccggctctgagtcgcgcttctcagcggagtgacccagggacggaggacccaggctggctggggactgtctgctcttctcggcgggatccgtggagagtcctttccctggaatccgagccctaaccgtctctccccagccctatccggcgaggagcggagcgctgccagcggaggcagcgccttcccgaagcagtttatctttggacggttttctttaaaggaaaaagcaaccaacaggttgccagccccggcgccacacacgagacgccggagggagaagccccggcccggattcctctgcctgtgtgcgtccctcgcgggctgctggaggcgaggggagggagggggcgatggctcggcctgacccatccgcgccgccctcgctgttgctgctgctcctagcgcagctggtgggccgggcggccgccgcgtccaaggccccggtgtgccaggaaatcacggtgcccatgtgccgcggcatcggctacaacctgacgcacatgcccaaccagttcaaccacgacacgcaggacgaggcgggcctggaggtgcaccagttctggccgctggtggagatccaatgctcgccggacctgcgcttcttcctatgctctatgtacacgcccatctgtctgcccgactaccacaagccgctgccgccctgccgctcggtgtgcgagcgcgccaaggccggctgctcgccgctgatgcgccagtacggcttcgcctggcccgagcgcatgagctgcgaccgcctcccggtgctgggccgcgacgccgaggtcctctgcatggattacaaccgcagcgaggccaccacggcgccccccaggcctttcccagccaagcccacccttccaggcccgccaggggcgccggcctcggggggcgaatgccccgctgggggcccgttcgtgtgcaagtgtcgcgagcccttcgtgcccattctgaaggagtcacacccgctctacaacaaggtgcggacgggccaggtgcccaactgcgcggtaccctgctaccagccgtccttcagtgccgacgagcgcacgttcgccaccttctggataggcctgtggtcggtgctgtgcttcatctccacgtccaccacagtggccaccttcctcatcgacatggaacgcttccgctatcctgagcgccccatcatcttcctgtcagcctgctacctgtgcgtgtcgctgggcttcctggtgcgtctggtcgtgggccatgccagcgtggcctgcagccgcgagcacaaccacatccactacgagaccacgggccctgcactgtgcaccatcgtcttcctcctggtctacttcttcggcatggccagctccatctggtgggtcatcctgtcgctcacctggttcctggccgccggcatgaagtggggcaacgaggccatcgcgggctacgcgcagtacttccacctggctgcgtggctcatccccagcgtcaagtccatcacggcactggcgctgagctccgtggacggggacccagtggccggcatctgctacgtgggcaaccagaacctgaactcgctgcgcggcttcgtgctgggcccgctggtgctctacctgctggtgggcacgctcttcctgctggcgggcttcgtgtcgctcttccgcatccgcagcgtcatcaagcagggcggcaccaagacggacaagctggagaagctcatgatccgcatcggcatcttcacgctgctctacacggtccccgccagcattgtggtggcctgctacctgtacgagcagcactaccgcgagagctgggaggcggcgctcacctgcgcctgcccgggccacgacaccggccagccgcgcgccaagcccgagtactgggtgctcatgctcaagtacttcatgtgcctggtggtgggcatcacgtcgggcgtctggatctggtcgggcaagacggtggagtcgtggcggcgtttcaccagccgctgctgctgccgcccgcggcgcggccacaagagcgggggcgccatggccgcaggggactaccccgaggcgagcgccgcgctcacaggcaggaccgggccgccgggccccgccgccacctaccacaagcaggtgtccctgtcgcacgtgtaggaggctgccgccgagggactcggccggagagctgaggggaggggggcgttttgtttggtagttttgccaaggtcacttccgtttaccttcatggtgctgttgccccctcccgcggcgacttggagagagggaagaggggcgttttcgaggaagaacctgtcccaggtcttctccaaggggcccagctcacgtgtattctattttgcgtttcttactgccttctttatgggaaccctctttttaatttatatgtatttttcttaatttgtaactttgttgcattttggcaacaatttacctttgctttgggggctttacaatcctaaggttggcgttgtaatgaagttccacttggttcaggtttctttgaactgtgtggtctcaattgggaaaatatatttcctatacgtgtgtctttaaaaaaaaatgtgaacagtgaacgtttcggttgctgtgactgggaagttgttgggtgtgctttttcagccagcttctccttccactgcttaaagtgtccatgattctttaaggtgagctgcagtttatagccccaggtcatacctaggaggggagcataatgagctcagggcctccccaaagtgacaaggttagggagtgcttagcggttttgtgttcagccttagctttgtttatagagggaggttcagtttcttttctgtagtgcttgtaataattctcactcctaacagcaccatcgttgtgtcttgaataagttagaggtagcattatagaggatctggcataaatatttgcagtagtgagagcctaagcgatggtgattggtggagcttgaattttaggctggtgagatggcagctttgtgcctgagaggtagtgggtggttcttaagcttcagtgatcccctttttttttttttttttttttttttaaggaacttgtgttataattttggtaaaagtataaacccactccctctggacaatacttagcgacagttgctaaagggggctcctttttaaatgtaaggactgaaatggatatacttctaataagtaaatttccaacacttatttgctccaccccctcccccctcccccctccccctttatcatgttaaacagcctttttgcttttcttattcctcctctcctggagagctgtgattagaaaccacacccacccttgaatgaagtgcttgaactgggggagggaggctggctacctgtgaacaaacattggcccaaataagggaaaataagtgttcctggactttggactagtttatagccagatattccaagagcagcaagacgttgctctctgccgtctctgaaaacaaaagagatgcataacatgcttgcacaaccttttaaaatatagatcagtatagtgctacctctatagttttcttcctcttctgagaaagcctgtatattgatgatcacacacacacacactttgcaattagagaatttggtttgctttactaatctgtttaactattccttcattcattatgaacgcttatattgatgaacatacacacagaggtttctttgctattagaaaattctgtttgctttcctaatctgtttaagcattcattcatgaagagtgtggggccattactggggaaggggggtgacagtgcctcagccagcaaaataccaatgaccaggattggggactaaatttaggaagctaaaatggccagagcaattaacatttgagaaaatcctgtctaggaaaacaacttgagtgtaggcatttgtaattcacttataccaaagttggaaaagtaaaatttaagcctaggacaatttttacttcatggatgttaaatagacaaatgcatagttcccagggggaatttaaacactttactggtgggaagaaacctagtattaaagttgtaaggactctcaaaaacttcacatttattaaaatgcactgctcttacccaatttatcctctgaattaaaatttcagtggattctacaaaacctcgtacaaatagctacagaactttgtgcctattttattcctctatttattcttctaggaagaagcctcttcctagaatcttgaaatagatcccttgactgaatgccaattcctctcctgtttttcaaatgagagaaccttttctgatcaccttgaccttttccctcatttcatatgtcttcccagaaagtagacagactgctctgctgccttcagtcattgtgcctcatttgggttgtccctccttctttgtggagaaatctggaaatgatgcacagtgtatccaaaagttgtgggatgaagtggatgaaagtgatttaattcatttttagaatttttttttgttttgttttagcaacatgctgaacaactaatttactttaaaaataagccagttaaaacaaaggacgctaagcccaagtggggggcaatattagtcaggatctttggggtctaattccagaccaactttcagaagcacttctttgtctctgttctcacctctgctgtccctctcttccctcatcccctaagagagacaaagataaaagcccacctgcatccctaagtcttactgagatcagccaccccaggggagagaaactggatctacttacagccaccccctgtttccatccatatagttacttcccccaatttgcatgtgattatggaaacaagtcatgctcatgaaagcaactgtaaaataaaaggttatggagtagttcagcaacttcttcacagccagctttgtggagctggggaggacttagggcccattggagtctcttatgtgtacagcttcagggctgtccctttcagtttgattttaagcaatgcctcacttcatagcttagggggtaaggattccattcaggtaggttgtctaaaggaactaatgggacctctcagtgaattagctgaccagattttaggaaatctttttaatttctatgattttccttctcacattttgaaatggtaaaattgactggaaataatttttcttggtgccttattggttttccttgcaaacctttctcatattttctcatgaccattgccagtgaccaaggcccatgtgtgtgttgtgtgtaattgtgggcatgtacaagcttaaataacgtgccgacagcactgtttcaaagttggtattcattaggctgttgcctcctgggctggagctgcgctaatcctgacaccggctgccaggagaaaacctcatggatcacacaccaaaccttaataacagcatccgtgacctgcactctccagtacagaatgggaaccccagagctaggaaatgtagttgtatattttaatgaactgctaccccagccaaagaagcttctttcacttttgtgctctacagaaagcccaaggggggtaggagggacagagctttgaataactgctttctaacactaaatgtggccaacaggacagagcacatcacacgtataggcaggtgtgagggacagtggctaagaattgcctgctccctctgcatgctctttcttgtttccaaagtccaatcaagtgatcctgggaaacaaatctgtctggattgcggagggtggttctgaaagaactgccaagacgttaaagaagggtgaagagtaggcagaatataagtagctaacctgagtcaagactctcaaaagctagcagcctgatgacaataggatttatttcagccaggatagtgtctgtctgtgagtgcatcattttaagacagtatgacttcatgttgttacaaactatgtatagtatgtatgttttgtgggttgtatatatacataatatatattatatatatatatgagagatttggtgacttttgatacgggtttggtgcaggtgaatttattactgagccaaatgaggcacataccgagtcagtagttgaagtccagggcattcgatactgtttatgatttccatatatgtatagtgcctatcccatgctgtagtcactgttatgttaaatccagaagttacactagagccagcgatactttatttgtagacaatcaatttgaatccatatgttattactggcagatgatacatgattacagttctgaatctgtaacacttacaaaaggaaacccagagcagcttgatgagtttttgtttctgcttcgttcctgggagtcagtagaaacagcagttgtatgtggttatgttagtctcaagatacttaatttgttgaccttacttcagaaaaattttgtatgtattatatttgtgggaaggtaaaataatcatttgagatttttatcaaatatgaagattagttatttatgaaaaacaaagaaatgtctatttttctttgttcccaattaatgtagataaattttaaaatgcattaaagtaatggtaaagacaataaaaagatgctgtagaa

SEQ ID NO: 138480 - DNA, 1758 bp, Artificial Sequence
  derived and/or modified sequence
atggcgaggcctgacccttctgccccaccctcattgctcctactgttgctcgcacagctggtcgggagagccgcagcggcctcaaaggccccagtgtgccaggaaattactgttcccatgtgtcgcggcattggctataacttgactcacatgcctaatcagtttaatcacgacacacaggacgaagcaggattggaagtgcaccagttttggccgctggtggagattcagtgctcgccagatctgaggtttttcttatgttccatgtacacacccatctgtctgcccgattaccacaaacctttgcctccttgcagatctgtttgcgagcgggccaaagccggctgctctccacttatgagacaatacggcttcgcctggccagaacgtatgagttgtgacaggctgcccgtgctcggccgtgacgctgaagtcttgtgcatggactataatcggtcggaagctactactgcgccacctaggccctttcctgctaaacccactctgcctgggccccccggggccccggccagtggtggcgagtgccctgccggtgggccttttgtctgtaaatgtcgggagcctttcgtgccaattctaaaggagagtcatcctctctacaataaggtgcgcactggtcaggtccctaactgtgctgtcccatgctatcagccgtctttcagcgcagacgaacggacgttcgcaaccttttggattggtctttggtctgtactgtgcttcattagtacctctacaaccgtggccactttcctgatagatatggaaaggtttagatatcccgagagacctattatcttcttgagcgcctgttatctatgtgtcagccttggctttctagttaggctcgttgttggtcatgcctccgtcgcatgtagtcgggaacataatcatattcattacgaaacaacaggcccggcactgtgcaccatcgtgttcctcctggtatattttttcggcatggcatcttctatatggtgggtgatactgtcgctgacctggtttctagcagcgggtatgaagtgggggaacgaggctatcgcgggctatgcccagtacttccacttagctgcctggttaataccctctgtaaagtccattactgctctggccctgtcctcagtagacggcgatcctgtggctggaatctgctatgtgggaaatcaaaatctaaacagccttaggggctttgtgctgggacctctcgttctctatttacttgtgggcactctgttcctcttggcagggtttgttagtcttttccgtatcagatctgtgatcaaacagggagggaccaaaactgacaaacttgagaagctgatgattaggatcggcatctttactctgctgtacactgtgcccgctagtatcgtcgttgcttgttacctctatgaacagcactaccgggagtcctgggaggctgcattgacatgcgcatgtcctggccacgacactgggcagccccgcgctaagccggaatactgggttctcatgcttaaatactttatgtgtctggtggtgggaatcacatctggggtgtggatctggagtggaaaaactgtcgagtcctggagacgctttacgagccgttgctgttgcaggcccaggaggggacataagagtggcggcgccatggccgctggtgactatcccgaagctagcgcggccctgaccggccggaccggtccgcccggaccagcagctacttatcacaaacaagtgtcattaagccatgtgtag

SEQ ID NO: 138481 - DNA, 1758 bp, Artificial Sequence
  derived and/or modified sequence
atggcccggccagaccccagcgccccacccagcctgctgctgctgctgctggcccagctggtgggccgggctgctgctgccagcaaggcccctgtgtgccaggagatcaccgtgcccatgtgccggggcatcggctacaacctgacccacatgcccaaccagttcaaccacgacacccaggatgaagctggcctggaggtgcaccagttctggcccctggtggagatccagtgcagcccagacctgcgcttcttcctgtgcagcatgtacacccccatctgcctgcctgactaccacaagcccctgcccccctgccgctctgtgtgtgagcgggccaaggccggctgcagccccctgatgaggcagtatggctttgcctggccagagaggatgagctgtgaccggctgcctgtgctgggcagagatgctgaggtgctgtgcatggactacaacagaagtgaggccaccacagccccaccccggcccttccctgccaagcccaccctgcccggccccccaggggccccagccagcggaggagaatgtcctgctgggggcccctttgtgtgcaagtgccgggagccctttgtgcccatcctgaaggagagccaccccctgtacaacaaggtgaggacaggccaggtgcccaactgtgctgtgccctgctaccagcccagcttcagcgcagatgagaggacctttgccaccttctggattggcctgtggagcgtgctgtgcttcatcagcaccagcaccaccgtggccaccttcctgattgacatggagcgcttccgctacccagagcggcccatcatcttcctgagcgcctgctacctgtgtgtgtccctgggcttcctggtgcggctggtggtgggccacgcctctgtggcctgcagccgggagcacaaccacatccactatgagaccaccggccctgccctgtgcaccatcgtgttcctgctggtgtacttcttcggcatggccagcagcatctggtgggtgatcctgagcctgacctggttcctggccgccggcatgaagtggggcaatgaggccatcgccggctacgcccagtacttccacctggccgcctggctgatccccagcgtgaagagcatcacagccctggccctgagctctgtggatggagaccctgtggccggcatctgctacgtgggcaaccagaacctgaacagcctgcggggctttgtgctgggccccctggtgctgtacctgctggtgggcaccctcttcctgctggccggctttgtgtccctcttccgcatccgcagcgtcatcaagcagggcggcaccaagacagacaagctggagaagctgatgatccgcatcggcatcttcaccctgctgtacacagtgcctgccagcatcgtggtggcctgctacctgtatgagcagcactaccgggagagctgggaggccgccctgacctgtgcctgccccggccatgacaccggccagccccgggccaagccagagtactgggtgctgatgctgaagtacttcatgtgcctggtggtgggcatcaccagcggcgtgtggatctggagcggcaagacagtggagagctggaggcgcttcaccagccgctgctgctgccggccccggcggggccacaagtctggaggagccatggctgctggggactacccagaggccagcgctgccctgaccggccgcactggacctcctggccctgctgccacctaccacaagcaggtgtccctgagccacgtgtag

SEQ ID NO: 138482 - DNA, 1758 bp, Artificial Sequence
  derived and/or modified sequence
atggcccggcccgaccccagcgccccccccagcctgctgctgctgctcctcgcccagctggtgggccgggcagccgctgccagcaaagcccccgtttgtcaggagattaccgttccgatgtgcagaggtatcggctacaacctgacccatatgcccaaccagtttaaccatgatacacaggacgaggcaggcctggaagttcaccaattctggcccctggtcgaaatccagtgctccccagacctccgcttcttcttgtgttccatgtacacccctatctgtttgcccgactaccataaacctttgcccccctgcagatcggtttgtgagagggccaaagcagggtgttcccctttgatgcgacaatacggctttgcctggccagagcggatgtcctgcgatcgcttgcccgttctgggccgagacgccgaggttctgtgtatggattacaatcgctctgaggctacaacggccccacctagaccctttcccgcaaagcctacactgcccggccccccgggagcacctgcctccggaggcgaatgtcccgcaggcgggcccttcgtgtgcaaatgcagagaacccttcgtgccgattctgaaggagagccaccccctgtataacaaggttaggaccggtcaagttcccaattgtgcagtgccgtgctaccagccatcgttcagcgccgacgagaggaccttcgccaccttctggattggcctgtggtcagtactgtgctttatctccacctcaaccactgtggcaacgttcctgatcgatatggaaaggttccggtatcccgagcgacccatcatttttctctctgcgtgctacctgtgtgtctctctgggcttcctggtgaggctggtggttggccacgccagcgtggcttgctcccgcgagcacaatcatattcactatgagactaccggacctgccctgtgcactatagtgttcctgctggtatacttttttggcatggcttcaagtatctggtgggtcatactgtctctgacttggtttcttgccgcagggatgaagtggggaaatgaagcaattgccggatacgcgcagtactttcacctggccgcgtggctgataccttcagtcaaatcaatcacagctctggcgttgtcttccgtcgacggggaccctgttgcggggatctgctatgtgggcaatcagaatctcaacagcctgcgggggttcgtgctaggacccttagtcctgtacttgctggtcggcaccctcttcctcctggccgggttcgtgagtctatttagaatcagaagtgttatcaagcagggcgggacgaagacagacaaactggagaagctgatgatccggatcggaatctttactctgctgtatacggttccagccagcatcgttgtggcatgttatctctatgagcaacattatagagaatcatgggaggcagccctcacctgtgcttgcccggggcatgacaccggtcagccccgggccaagcccgagtactgggtgctgatgctgaagtacttcatgtgtttagtcgtggggattacttccggtgtttggatctggagcggcaagaccgtggagagctggcgtaggttcacctcaagatgctgttgccggccgcgacgaggtcacaaatcgggcggagcaatggccgcaggcgactaccctgaggcaagcgccgctctgactggacggaccggtccccccggcccagctgccacctatcacaagcaggtcagtttgtctcacgtgtag

SEQ ID NO: 138483 - DNA, 1758 bp, Artificial Sequence
  derived and/or modified sequence
atggctcggcctgatcccagcgctcccccttcccttctgttgctcctcctggctcagttggttggtcgggctgcagctgcgagcaaggcacccgtttgccaagagattacagtgcctatgtgccggggtattggctataacctcactcacatgcctaatcagtttaatcatgatacccaggacgaggccggtctagaggttcaccagttttggccccttgtggaaatacaatgctctcctgatttacgcttctttctctgttcaatgtatacccctatatgccttcctgactatcacaaaccactacccccttgcagatcagtatgcgagagagccaaagcgggttgctccccgctgatgcgacagtacgggttcgcctggcccgaacggatgagctgtgaccgcttgccagtgctgggaagggacgccgaagtgctttgcatggattataataggtcagaagccactaccgcgcctccgagaccatttcctgcaaaaccaaccctacccggacctcccggagccccagccagcggtggcgagtgccccgctgggggaccttttgtgtgcaagtgtagagagccattcgtccctatactgaaggagtcacaccctctctacaataaagttaggaccggccaggtccccaactgcgccgtgccttgttatcagcctagcttctccgccgacgagagaacttttgccaccttttggatcggactctggtctgtgttgtgcttcattagcacctcaaccacagttgctaccttcctcattgatatggaacggttcagataccctgaacgacctatcatttttctctctgcctgctatctctgtgtgtcattgggatttcttgtacgcctcgtggtcggccatgcatcggtcgcatgtagtcgggagcacaaccacatccactatgaaaccactggacctgctctttgtaccatcgtgttcctcttggtgtacttttttgggatggcatctagtatctggtgggtcatcctaagcttaacgtggttcctagccgctgggatgaaatggggcaacgaagcaatcgccggatacgcacagtatttccacttagcagcctggttgattccttcggtcaaaagtataacggcgctcgcactgagcagcgtggacggcgacccagttgccggtatttgctacgtaggcaatcagaacctgaactccctacgcggatttgtcctgggacccctggtgttgtacctgctggtaggcactctcttcttgttagctggcttcgtgagcctctttcgcatcagatcggttataaagcaaggcggaaccaaaaccgacaagctggagaagttgatgatcaggatcggaatatttaccctcttatacactgttcctgcctcaatcgtggttgcctgctatctgtatgaacagcattatcgagagtcctgggaggctgcattgacatgtgcctgccctgggcatgatactggccaaccgagagcaaaaccggaatactgggtactcatgcttaaatactttatgtgtctggtggtaggcattacatcaggtgtgtggatttggtctggcaaaacagtggaaagctggcgcagatttacgtcaagatgctgttgtaggcctcggcgtggccacaaaagcggcggtgcaatggctgctggcgactaccctgaggccagcgcagctctcacaggcaggactggacctccaggcccagctgccacataccataaacaggtcagtctctctcatgtatag

SEQ ID NO: 138484 - protein, 617 aa, Artificial Sequence
  derived and/or modified sequence
MAEAKTHWLGAALSLIPLIFLISGAEAASFQRNQLLQKEPDLRLENVQKFPSPEMIRALEYIENLRQQAHKEESSPDYNPYQGVSVPLQQKENGDESHLPERDSLSEEDWMRIILEALRQAENEPQSAPKENKPYALNSEKNFPMDMSDDYETQQWPERKLKHMQFPPMYEENSRDNPFKRTNEIVEEQYTPQSLATLESVFQELGKLTGPNNQKRERMDEEQKLYTDDEDDIYKANNIAYEDVVGGEDWNPVEEKIESQTQEEVRDSKENIEKNEQINDEMKRSGQLGIQEEDLRKESKDQLSDDVSKVIAYLKRLVNAAGSGRLQNGQNGERATRLFEKPLDSQSIYQLIEISRNLQIPPEDLIEMLKTGEKPNGSVEPERELDLPVDLDDISEADLDHPDLFQNRMLSKSGYPKTPGRAGTEALPDGLSVEDILNLLGMESAANQKTSYFPNPYNQEKVLPRLPYGAGRSRSNQLPKAAWIPHVENRQMAYENLNDKDQELGEYLARMLVKYPEIINSNQVKRVPGQGSSEDDLQEEEQIEQAIKEHLNQGSSQETDKLAPVSKRFPVGPPKNDDTPNRQYWDEDLLMKVLEYLNQEKAEKGREHIAKRAMENM

SEQ ID NO: 138485 - protein, 144 aa, Artificial Sequence
  derived and/or modified sequence
MAEAKTHWLGAALSLIPLIFLISGAEAASFQRNQLLQKEPDLRLENVQKFPSPEMIRALEYIENLRQQAHKEESSPDYNPYQGVSVPLQQKENGDESHLPERDSLSEEDWMRIILEALRQAENEPQSAPKENKPYALNSEKNFP

SEQ ID NO: 138486 - protein, 125 aa, Artificial Sequence
  derived and/or modified sequence
MAEAKTHWLGAALSLIPLIFLISGAEAASFQRNQLLQKEPDLRLENVQKFPSPEMIRALEYIENLRQQAHKEESSPDYNPYQGVSVPLQQKENGDESHLPERDSLSEEDWMRIILEALRQAENEP

SEQ ID NO: 138487 - protein, 477 aa, Artificial Sequence
  derived and/or modified sequence
MAEAKTHWLGAALSLIPLIFLISGAEAASFQRNQLLQKEPDLRLENVQKFPSPEMIRALEYIENLRQQAHKEESSPDYNPYQGVSVPLQQKENGDESHLPERDSLRGEDWNPVEEKIESQTQEEVRDSKENIEKNEQINDEMKRSGQLGIQEEDLRKESKDQLSDDVSKVIAYLKRLVNAAGSGRLQNGQNGERATRLFEKPLDSQSIYQLIEISRNLQIPPEDLIEMLKTGEKPNGSVEPERELDLPVDLDDISEADLDHPDLFQNRMLSKSGYPKTPGRAGTEALPDGLSVEDILNLLGMESAANQKTSYFPNPYNQEKVLPRLPYGAGRSRSNQLPKAAWIPHVENRQMAYENLNDKDQELGEYLARMLVKYPEIINSNQVKRVPGQGSSEDDLQEEEQIEQAIKEHLNQGSSQETDKLAPVSKRFPVGPPKNDDTPNRQYWDEDLLMKVLEYLNQEKAEKGREHIAKRAMENM

SEQ ID NO: 138488 - DNA, 1854 bp, Artificial Sequence
  derived and/or modified sequence
atggccgaggcgaaaacgcattggctgggagccgctctatccctcatccctctaatatttcttatttccggagctgaggctgcatctttccagcgaaaccagcttttacagaaggaacccgacctaaggctggagaacgtccagaaatttccctcaccagaaatgataagggcactagaatacattgagaatcttcgccaacaggcacacaaagaggagtcatctccagactataacccttaccaaggggtctccgtgcccctgcagcaaaaagagaatggggatgagagccatctcccagagcgagactccctcagtgaggaggactggatgcgtatcatcctggaagcgctacggcaggccgagaacgagccgcagagcgcccccaaggagaataaaccctacgcgctgaacagcgaaaaaaattttccaatggatatgagtgacgattacgagactcagcaatggccggagaggaagctcaaacacatgcagttcccccctatgtacgaagaaaacagccgggacaatccgtttaaaaggaccaacgagatagtggaagagcagtacacccctcagagtcttgcaacccttgaatccgtgtttcaggagctgggaaagctaacaggcccaaataaccaaaaacgggaaaggatggatgaagagcagaagctctacaccgatgatgaagacgatatctataaggccaataatatcgcatatgaggatgtcgtgggcggtgaagattggaaccctgtcgaggagaagatagaaagtcagactcaggaggaggtgcgcgactcaaaggagaacatcgaaaagaacgagcagatcaatgatgagatgaagcggagcggacagcttgggatacaggaggaagatctgcgcaaggagagcaaggaccagctgtcagacgacgtcagcaaggtgatcgcttatctgaagcggctagtgaatgcagctggcagcggaagactgcaaaacgggcaaaacggggagcgcgcaacacgcttatttgaaaaacctctggactctcaatctatttaccagctaattgaaattagcaggaatctgcaaattccccccgaggacctcattgaaatgcttaagaccggtgaaaaacctaacggtagcgttgagccagagcgtgagctcgacctgccagttgacttggacgatattagcgaggcggacctggaccacccagacctgtttcagaatcggatgttgagcaagtctggctaccctaaaaccccaggccgggctgggactgaagccctgcccgacgggctgtctgtcgaagacatcctcaatttactgggcatggagtccgccgctaatcagaagacctcctacttcccaaatccatacaatcaggaaaaagtcttgcccaggctaccgtacggcgccggccggtcccgttcaaaccagctccccaaggcggcatggattccccacgtcgagaaccgccagatggcgtatgagaacttgaatgataaggaccaagaacttggcgagtacttggcccgtatgctggttaagtaccctgagattattaattccaaccaggtcaaacgcgtcccagggcagggctcttccgaagatgacttacaggaggaagagcaaatcgaacaggctattaaagagcacttgaatcagggctcttcacaggaaactgataagctggcaccagtaagtaagaggttccctgttggaccaccaaaaaatgacgacacaccaaatcgtcagtactgggacgaggatcttctgatgaaggttctggagtacttgaatcaggagaaagccgaaaaagggcgcgaacacatcgcgaagcgggcgatggaaaacatgtag

SEQ ID NO: 138489 - DNA, 435 bp, Artificial Sequence
  derived and/or modified sequence
atggccgaggccaaaacacactggctcggtgcagcgctgtctttgatcccattaatctttctcatttcaggagctgaggccgcatcattccaaagaaaccaactcctgcagaaggagcccgacctgagacttgagaacgttcagaagttcccgagccccgaaatgattagggcccttgagtacattgaaaacctgcgtcaacaagcccacaaggaggagagtagtcccgattacaacccctatcagggagtttctgtccctctccagcaaaaggagaatggtgatgagtcacacctgcccgagcgcgacagtctgagtgaagaggactggatgaggatcattctggaagcactgaggcaggccgaaaacgagccccagtctgcgcctaaagaaaacaagccgtacgctctcaactctgagaagaattttccatag

SEQ ID NO: 138490 - DNA, 378 bp, Artificial Sequence
  derived and/or modified sequence
atggctgaggccaaaacccattggcttggcgcagctctgtcactgattcccctcattttcctaattagtggggcagaggccgcctcttttcagcggaaccaattgctgcaaaaagagccggacctccgactggaaaatgtgcagaagttcccttccccagaaatgatccgagctcttgagtacatcgagaatctccgacagcaggctcataaggaggagtcgagcccggactataatccttatcaaggagtttccgtgcctctgcagcagaaggagaatggagacgaatctcatctccccgaacgggactcgctgtctgaggaggattggatgagaatcatactggaggctctcagacaagccgagaacgaaccatag

SEQ ID NO: 138491 - DNA, 1434 bp, Artificial Sequence
  derived and/or modified sequence
atggctgaagcgaaaacccactggttgggagccgccttgtctcttatcccactcatctttctcattagcggcgcggaggccgcgagcttccagagaaaccagcttctgcagaaggagcctgacctaaggctcgaaaacgttcagaaatttcctagtccagagatgattcgggccttagaatacatcgagaacctgagacagcaggctcataaagaagagtcttctccggattataacccttaccaaggggtttctgtgcccttgcagcaaaaggagaatggtgatgagagccacctgcccgaacgcgactccctgcggggagaggactggaatcccgtggaagaaaaaatcgagagccaaacccaggaggaagttcgagattccaaagagaacattgaaaagaacgaacagatcaacgatgaaatgaagcggtctggccaactggggatacaagaggaagatctccgcaaagagagcaaagaccagctgagcgatgacgttagcaaggtgattgcatacctcaagcgactggtgaatgcagctgggtctggacgtctgcagaacggacagaacggtgaaagagctacacgcctgttcgagaagcccttagactctcaatcaatttatcagctcatcgaaatcagcagaaatttgcagattcccccggaggacttaatcgaaatgctaaaaaccggggagaaacccaacggcagcgtcgaacccgaacgggaactggatctacccgtggatctggacgatatcagtgaggcagatctggatcaccctgatttattccagaaccggatgctctctaaaagtgggtaccccaagacacccggtcgcgccggcaccgaggctctaccagacggcttgagcgtggaagacatcctcaacttgctcgggatggagagtgctgctaatcagaagacctcatactttccaaatccttacaaccaggaaaaagtgctcccacgactcccttacggtgccgggagatcgcgatccaatcagttgcccaaagccgcctggattcctcacgtcgagaatagacagatggcatacgaaaaccttaatgataaggaccaggagctgggtgaatatctcgcacgcatgctggtgaaatatccagagatcattaactctaaccaggttaagagagtgcctgggcagggatcatcagaggatgatcttcaggaagaggagcagattgaacaggcgattaaagaacacctgaaccagggctcctcgcaggagacagacaaattagccccagtcagcaagaggttcccagtcggacctccaaagaacgatgacacacccaatcgccagtattgggatgaagaccttctgatgaaagtgctcgagtacctgaaccaggaaaaagctgagaagggcagagagcacatcgctaaaagagctatggaaaatatgtag

SEQ ID NO: 138492 - DNA, 1854 bp, Artificial Sequence
  derived and/or modified sequence
atggccgaggccaagacccactggctgggcgccgccctgagcctcatccccctcatcttcctgatctctggagctgaggccgccagcttccagaggaaccagctgctgcagaaggagccagacctgcggctggagaatgtgcagaagttccccagccctgagatgatccgggccctggagtacatcgagaacctgcggcagcaggcccacaaggaggagagcagcccagactacaacccctaccagggcgtgtctgtgcccctgcagcagaaggaaaatggagatgagagccacctgcctgagcgggacagcctgtctgaggaggactggatgaggatcatcctggaggccctgcggcaggccgagaatgagccccagagcgcccccaaggagaacaagccctatgccctgaacagcgagaagaacttccccatggacatgtctgatgattatgagacccagcagtggccagagaggaagctgaagcacatgcagtttcctcccatgtatgaggagaacagccgggacaaccccttcaagaggaccaatgaaattgtggaggagcagtacaccccccagagcctggccaccctggagagcgtcttccaggagctgggcaagctgaccggccccaacaaccagaagcgggagaggatggatgaggagcagaagctgtacacagatgatgaagatgacatctacaaggccaacaacatcgcctatgaagatgtggtgggcggggaggactggaaccctgtggaggagaagattgagagccagacccaggaggaggtgcgggacagcaaggagaacatcgagaagaatgagcagatcaatgatgagatgaagaggagcggccagctgggcatccaggaggaggacctgaggaaggagagcaaggaccagctgagtgatgatgtgtccaaggtgattgcctacctgaagaggctggtgaatgctgctggcagcggccgcctgcagaatggccagaatggagagcgggccacccggctgtttgagaagcccctggacagccagagcatctaccagctgattgagatcagcaggaacctgcagatccccccagaagatctcatcgagatgctgaagacaggagagaagcccaacggctctgtggagcctgagcgggagctggacctgcctgtggacctggatgacatcagcgaggccgacctggaccacccagacctcttccagaacaggatgctgagcaagagcggctaccccaagaccccaggccgggccggcacagaggccctgcctgatggcctgtctgtggaggacatcctgaacctgctgggcatggagagcgctgccaaccagaagaccagctacttccccaacccctacaaccaggagaaggtgctgccccggctgccctacggggccggccgcagccgcagcaaccagctgcccaaggccgcctggatcccccacgtggagaaccggcagatggcctatgagaacctgaatgacaaggaccaggagctgggggagtacctggccaggatgctggtgaagtacccagagatcatcaacagcaaccaggtgaagagggtgcccggccagggcagcagtgaagatgacctgcaggaggaggagcagatcgagcaggccatcaaggagcacctgaaccagggcagcagccaggagacagacaagctggcccctgtgtccaagcgcttccctgtgggcccccccaagaatgatgacacccccaaccggcagtactgggatgaggacctgctgatgaaggtgctggagtacctgaaccaggagaaggccgagaagggccgggagcacatcgccaagagggccatggagaacatgtag

SEQ ID NO: 138493 - DNA, 435 bp, Artificial Sequence
  derived and/or modified sequence
atggccgaggccaagacccactggctgggcgccgccctgagcctcatccccctcatcttcctgatctctggagctgaggccgccagcttccagaggaaccagctgctgcagaaggagccagacctgcggctggagaatgtgcagaagttccccagccctgagatgatccgggccctggagtacatcgagaacctgcggcagcaggcccacaaggaggagagcagcccagactacaacccctaccagggcgtgtctgtgcccctgcagcagaaggaaaatggagatgagagccacctgcctgagcgggacagcctgtctgaggaggactggatgaggatcatcctggaggccctgcggcaggccgagaatgagccccagagcgcccccaaggagaacaagccctatgccctgaacagcgagaagaacttcccctag

SEQ ID NO: 138494 - DNA, 378 bp, Artificial Sequence
  derived and/or modified sequence
atggccgaggccaagacccactggctgggcgccgccctgagcctcatccccctcatcttcctgatctctggagctgaggccgccagcttccagaggaaccagctgctgcagaaggagccagacctgcggctggagaatgtgcagaagttccccagccctgagatgatccgggccctggagtacatcgagaacctgcggcagcaggcccacaaggaggagagcagcccagactacaacccctaccagggcgtgtctgtgcccctgcagcagaaggaaaatggagatgagagccacctgcctgagcgggacagcctgtctgaggaggactggatgaggatcatcctggaggccctgcggcaggccgagaatgagccctag

SEQ ID NO: 138495 - DNA, 1434 bp, Artificial Sequence
  derived and/or modified sequence
atggccgaggccaagacccactggctgggcgccgccctgagcctcatccccctcatcttcctgatctctggagctgaggccgccagcttccagaggaaccagctgctgcagaaggagccagacctgcggctggagaatgtgcagaagttccccagccctgagatgatccgggccctggagtacatcgagaacctgcggcagcaggcccacaaggaggagagcagcccagactacaacccctaccagggcgtgtctgtgcccctgcagcagaaggaaaatggagatgagagccacctgcctgagcgggacagcctgcggggggaggactggaaccctgtggaggagaagattgagagccagacccaggaggaggtgcgggacagcaaggagaacatcgagaagaatgagcagatcaatgatgagatgaagaggagcggccagctgggcatccaggaggaggacctgaggaaggagagcaaggaccagctgagtgatgatgtgtccaaggtgattgcctacctgaagaggctggtgaatgctgctggcagcggccgcctgcagaatggccagaatggagagcgggccacccggctgtttgagaagcccctggacagccagagcatctaccagctgattgagatcagcaggaacctgcagatccccccagaagatctcatcgagatgctgaagacaggagagaagcccaacggctctgtggagcctgagcgggagctggacctgcctgtggacctggatgacatcagcgaggccgacctggaccacccagacctcttccagaacaggatgctgagcaagagcggctaccccaagaccccaggccgggccggcacagaggccctgcctgatggcctgtctgtggaggacatcctgaacctgctgggcatggagagcgctgccaaccagaagaccagctacttccccaacccctacaaccaggagaaggtgctgccccggctgccctacggggccggccgcagccgcagcaaccagctgcccaaggccgcctggatcccccacgtggagaaccggcagatggcctatgagaacctgaatgacaaggaccaggagctgggggagtacctggccaggatgctggtgaagtacccagagatcatcaacagcaaccaggtgaagagggtgcccggccagggcagcagtgaagatgacctgcaggaggaggagcagatcgagcaggccatcaaggagcacctgaaccagggcagcagccaggagacagacaagctggcccctgtgtccaagcgcttccctgtgggcccccccaagaatgatgacacccccaaccggcagtactgggatgaggacctgctgatgaaggtgctggagtacctgaaccaggagaaggccgagaagggccgggagcacatcgccaagagggccatggagaacatgtag

SEQ ID NO: 138496 - DNA, 1854 bp, Artificial Sequence
  derived and/or modified sequence
atggccgaggccaagacccactggctgggcgccgccctgagcctgatccccctgatttttctgatttccggggctgaagctgcgagctttcagcggaaccagcttctgcagaaggaacctgatctgagacttgagaacgtgcagaagtttcccagcccagagatgattcgtgctcttgaatatatcgagaaccttcggcagcaagcccataaagaggaatcctcacctgattacaacccataccaaggcgtgtctgttcccctgcagcagaaggaaaatggagacgaatcccatctgccagaacgcgatagtctttccgaagaggattggatgaggattatactggaggctctgaggcaggcagaaaacgagccccagtccgcccccaaggaaaacaagccttacgcgctcaacagcgaaaagaacttcccaatggatatgtccgacgattatgagactcagcaatggcctgagaggaaattgaagcacatgcaattcccacccatgtatgaagaaaacagccgggacaatccattcaaaaggaccaacgagattgttgaagagcaatacaccccacaatcactggccacattagaaagcgtcttccaggaactcggcaaactcacagggcctaataaccaaaagcgagaaagaatggacgaggagcaaaaactgtacaccgacgacgaggatgacatctacaaagctaacaatatcgcatacgaggacgttgtgggcggagaggactggaaccccgtggaggagaagattgagagtcagacccaggaagaggtccgggacagcaaggaaaacattgagaagaacgagcagattaacgatgaaatgaaacggtcaggacaactggggattcaagaggaagaccttcgtaaagaaagcaaagatcaacttagtgacgatgtgagcaaagtaattgcctatctgaagcggctggtgaatgctgcgggatcaggccgtctgcagaatggtcagaatggcgagcgggccacccgactcttcgagaagcctctggattcacagtcaatttatcagctgatagaaatttcacggaaccttcagattcctcctgaggatctgattgagatgctaaagacaggagagaagcctaacggctccgtggaaccagaaagggagctggatctgccagttgatctggacgacatcagcgaggctgatctcgaccatcctgacctgttccagaataggatgctctcgaaatcaggttacccaaaaaccccgggtcgagccggaaccgaggcgctgccagacggattaagtgtcgaggatatacttaacctgctaggaatggaaagcgcggcgaatcagaaaacttcatactttccaaatccatacaatcaggaaaaggtgctgcccagactcccatatggggcgggccgcagcaggagtaatcagctgcccaaggccgcctggatcccccacgtggagaataggcagatggcgtatgaaaacttgaatgataaagaccaggaactgggcgagtacctcgccagaatgctcgttaagtaccccgaaataatcaacagtaatcaagtcaagcgggtgcctggccaggggagctctgaggatgacctgcaagaagaagagcaaatagagcaagctataaaggagcaccttaatcagggctcctcccaagagacggataagctggcccctgtgtccaagcggttccctgtcggcccaccgaagaacgatgacacacctaataggcagtactgggatgaagatttgctgatgaaagttctggaatacctcaaccaggagaaagcggagaaaggacgcgaacacattgctaagagggcaatggagaatatgtag

SEQ ID NO: 138497 - DNA, 435 bp, Artificial Sequence
  derived and/or modified sequence
atggccgaggccaagacccactggctgggcgccgccctgagcctgatccctttaattttcctgatctctggtgccgaggccgccagttttcagaggaaccagctcctgcagaaggaaccggacctaaggctcgagaacgtgcagaagttcccgagccctgagatgatcagggcattagagtatattgaaaatctgagacaacaggcacacaaggaagagtcatccccggactataatccctatcagggcgttagcgtgcccctgcagcaaaaggagaatggagacgagtcccacctgcccgagcgcgactctctctccgaggaggactggatgaggattatcctggaggccctcaggcaagccgaaaacgagcctcagtcagccccaaaggaaaacaaaccctacgcccttaatagtgaaaagaatttcccatag

SEQ ID NO: 138498 - DNA, 378 bp, Artificial Sequence
  derived and/or modified sequence
atggccgaggccaagacccactggctgggcgccgccctgagcctgatacctctaattttcttgattagcggcgcagaagctgccagtttccagaggaatcagttgctgcagaaggagcctgacctgcgactggaaaatgttcagaagttccccagccctgaaatgattagagcactcgagtacatcgagaatctccgccagcaggcccacaaggaggagagtagtcccgattacaacccataccagggggtttcagtgcccctgcagcagaaggagaacggcgatgagagccatcttcccgagcgggattcactgagcgaagaagactggatgcgaattatcctggaagctctgaggcaggctgagaatgagccgtag

SEQ ID NO: 138499 - DNA, 1434 bp, Artificial Sequence
  derived and/or modified sequence
atggccgaggccaagacccactggctgggcgccgccctgagcctgatcccccttatattcctgatttcaggagccgaggccgccagcttccagcgtaaccagctgctccagaaggagcctgatctacgtctggagaacgtgcagaagttccctagcccagagatgattagggccctggaatatatcgagaatcttagacagcaggctcacaaagaggaatcttcccctgactacaacccgtaccagggggttagcgttccccttcagcagaaggaaaatggcgatgagagtcatttacctgaaagggactcactccgtggggaagattggaatccagttgaggaaaagatagagagtcagacccaggaggaggtacgggatagcaaggagaatatcgagaagaacgagcagatcaatgatgaaatgaaaagaagcgggcaactggggattcaggaagaagacctgcggaaagagtccaaggatcaactctccgacgacgtcagcaaagttatcgcatatttgaagagactggttaatgccgccgggtccggtagactgcaaaacggccagaacggggagagggccactaggctttttgagaagccactggattctcagagtatataccaactcatcgagattagtagaaatctgcagattccccccgaggacctgatcgaaatgctgaaaactggagagaagcccaatggcagtgttgagccggagcgcgagctggacctgccagtcgatctggatgacatatccgaagcagatcttgaccaccctgatttattccagaacagaatgctgtcgaagtcaggataccctaagacacccggccgagcaggtacggaagcactcccggacggcttgagtgttgaagatatactgaacctgctcgggatggaatcagccgctaatcaaaagacctcctatttccccaacccatacaatcaagaaaaggtcttaccacggctcccatatggcgccggaagatcaaggtctaatcagctgcccaaagctgcttggataccccacgtggaaaacaggcagatggcatatgaaaatcttaacgacaaagaccaggagctgggagaatacctagctcgaatgcttgtcaaataccccgagatcattaactccaaccaggtaaaaagggtacctgggcaggggagctctgaagacgacctgcaggaggaggaacagatcgagcaagctataaaggaacacctgaatcaaggatccagccaggagactgacaaacttgctcctgttagtaaaagattccctgtcggcccgcccaaaaacgatgacactccgaatcggcagtattgggatgaggatctgttgatgaaagttctggagtatctcaaccaggaaaaagctgagaaaggaagggaacatatcgcaaaaagggctatggagaatatgtag

SEQ ID NO: 138500 - DNA, 1854 bp, Artificial Sequence
  derived and/or modified sequence
atggctgaagctaaaactcactggctgggtgccgcactgagccttatccctctgatttttctcataagtggtgccgaggcagcgagttttcaaaggaaccagcttttacagaaagagcctgacctcagattagagaatgtgcagaagtttccaagtcctgagatgatacgcgctctcgagtacatagaaaatctcagacaacaggcccataaggaagaatcaagccccgattacaacccttaccagggcgtgtcggtgccgctacagcaaaaggagaatggtgacgagagccacctgccggaacgagactcgctcagcgaggaggattggatgcggataatccttgaggccctgcggcaggccgagaatgagccacaatcagcccctaaggaaaacaagccctacgccctcaactcagagaaaaattttcctatggacatgtctgatgactacgaaacccaacaatggcccgagcggaagctgaaacatatgcagtttccgccaatgtacgaggagaattctcgagacaatccatttaaacggaccaatgagatagtagaagaacaatatacgcctcagtccttggccacccttgagtctgtctttcaggagttaggtaagttgactggccctaacaaccagaagcgcgagcgcatggacgaagaacaaaagctgtacacggatgacgaggacgacatttataaagctaacaacatcgcatacgaggatgtcgttggaggggaagactggaaccccgtggaggagaaaattgaatctcaaacacaggaagaagtcagagattctaaggaaaacatcgagaagaacgagcagattaatgatgagatgaaacggagcgggcagctcgggatccaggaagaggacttaaggaaggagtcgaaggatcagctctcagacgacgtgagtaaagtcattgcctatcttaaacggctagtcaacgccgcaggatctggcagattacaaaacggccagaatggggagcgcgctacccgcctgttcgagaaaccactcgactctcaatctatttaccagctgattgagatttcccgaaacctgcagatccccccagaggatctcattgaaatgttaaaaactggggaaaaaccaaatggatctgtggagcctgaaagagagttggacttgcccgtggacttggacgatattagcgaggccgacctagatcaccccgacctattccagaaccggatgctgagcaagtctggctatccaaaaactccaggacgggctgggacggaagccctaccagatggcctgagtgtggaggatattcttaatctgctggggatggagagtgccgctaaccagaagacttcctatttccctaacccatataatcaggaaaaagtgctccccaggttgccatatggcgctgggagatctaggtccaaccagttgccaaaggccgcttggattccccacgtggaaaacaggcaaatggcatacgagaatctgaatgataaggaccaggagttaggtgagtatttagcccgaatgttagtaaaatatccggaaatcattaactcaaatcaggtgaaaagggtccccggtcagggctcctctgaggatgatcttcaagaagaagagcaaatcgaacaggctatcaaggagcacctgaaccagggttcgtcccaggaaaccgacaaactcgctcccgtatcaaaaagattccctgtcgggccacccaagaacgacgataccccaaataggcagtactgggacgaagacctgcttatgaaagttctcgaatacctcaatcaggagaaagcagagaagggaagggagcatatcgctaaacgggcaatggagaacatgtag

SEQ ID NO: 138501 - DNA, 435 bp, Artificial Sequence
  derived and/or modified sequence
atggccgaggccaaaacacattggttgggcgctgcactctcattgatcccattaatcttcctgatatcaggggctgaagccgcttcctttcagaggaatcaactgctgcagaaggagcctgatctgcgcctcgagaacgtgcagaagtttccaagccctgagatgattcgtgcgctcgagtacattgaaaacctgcgtcagcaagcccataaggaggaatcatccccagactataatccatatcagggtgtgtctgtgcctctccagcagaaagagaacggcgacgaaagccacctaccggaaagggattccctatccgaagaagactggatgagaattattcttgaggccctgaggcaggctgagaatgaaccccagtctgcccctaaagagaataaaccatacgccctcaattccgagaaaaatttcccctag

SEQ ID NO: 138502 - DNA, 378 bp, Artificial Sequence
  derived and/or modified sequence
atggcagaagcaaagactcactggcttggagcggcacttagtctcataccgcttatattcctcatcagcggcgcagaagccgcttcttttcagagaaaccagctgctgcagaaagagccagacctccggctcgaaaacgtacagaaattccctagccccgaaatgattcgagcattagaatacatagaaaatttgagacaacaggcgcacaaggaagagtctagcccagactataacccgtaccaaggggtgagtgttcctctgcaacaaaaggagaatggcgacgagagtcacctccctgagcgagactcactgagcgaggaggactggatgcgcattatactcgaagccttgcgccaggctgagaatgagccatag

SEQ ID NO: 138503 - DNA, 1434 bp, Artificial Sequence
  derived and/or modified sequence
atggctgaggctaaaacccattggcttggcgcagcgctttctctgatccctcttatctttctcattagcggtgcagaagccgcatcctttcagagaaatcagctgctccaaaaggaacccgaccttcgattagagaatgtccagaaattccccagccccgagatgatccgggctttggagtacatcgagaatctgcgacaacaggcccataaggaggagtcttccccagactacaatccatatcagggtgtgtctgttcctctgcagcaaaaagagaacggagatgagtcacacttacctgaaagagactctcttcgcggagaagattggaatcccgtagaggagaagattgagtcccagacacaagaggaggtacgagactctaaggagaacatcgagaagaatgagcagatcaacgacgaaatgaagcgaagtggacagctcggaatccaggaggaggacctgagaaaggagtcaaaggaccaactgagtgatgacgtctccaaggtgatcgcctacctgaaaaggctcgtcaacgctgcagggtctggccgattgcagaacggccagaacggggaaagagctacaagactgttcgaaaaacccctagacagccagtctatatatcaattgatagagatatcacgcaacctccagattccaccagaggatctaatcgagatgttgaaaacaggcgagaagcctaatggctcggtggaaccagaacgagagctagacttgcccgtcgatttagatgacatctcagaagcagatttagaccacccggatttatttcaaaatcggatgctctctaaatccgggtatcctaagactccgggaagggccggaacagaagcgttaccagacggattgagtgtggaagatatcttgaatctcttaggcatggagagcgctgcgaaccagaaaacttcatacttccctaacccttataatcaggagaaggtcttacctcgactgccatacggcgctggaaggtcccgttccaaccagctgccgaaagccgcttggattccacatgtggaaaataggcagatggcctacgagaatctgaacgacaaggatcaggaattgggcgagtacctagccagaatgctggtaaaatatccggagatcattaacagtaatcaagtgaaaagagtgcccggacagggatcatccgaggatgatctccaggaagaggaacaaattgaacaggccatcaaggaacacctgaaccaggggtccagccaggagactgacaaactcgctccagtttctaaacgcttccccgttggaccgccaaagaacgatgacacccctaaccgtcagtattgggacgaggatctgctgatgaaggtcctggaatacctgaatcaggagaaagcagagaaaggcagggaacacattgctaaacgggctatggagaacatgtag

SEQ ID NO: 138504 - DNA, 2576 bp, Artificial Sequence
  derived and/or modified sequence
aaatataaagtgattattttctcttggttctttgaaaaacctcgcttgtgctggggtttgtggctgaacccggtgacgtcagtgtggcagtgcggagtcaggcgcagcggctccctataagcagaggagctgtccgtgtgctgaaacggcccgagaagctcgcccggagaacggggaggaatatgctgtggagctcctctgccatataaacaaaaagaggaaatctttcaaacatggctgaagcaaagacccactggcttggagcagccctgtctcttatccctttaattttcctcatctctggggctgaagcagcttcatttcagagaaaccagctgcttcagaaagaaccagacctcaggttggaaaatgtccaaaagtttcccagtcctgaaatgatcagggctttggagtacatagaaaacctccgacaacaagctcataaggaagaaagcagcccagattataatccctaccaaggtgtctctgtcccccttcagcaaaaagaaaatggcgatgaaagccacttgcccgagagggattcactgagtgaagaagactggatgagaataatactcgaagctttgagacaggctgaaaatgagcctcagtctgcaccaaaagaaaataagccctatgccttgaattcagaaaagaactttccaatggacatgagtgatgattatgagacacagcagtggccagaaagaaagcttaagcacatgcaattccctcctatgtatgaagagaattccagggataacccctttaaacgcacaaatgaaatagtggaggaacaatatactcctcaaagccttgctacattggaatctgtcttccaagagctggggaaactgacaggaccaaacaaccagaaacgtgagaggatggatgaggagcaaaaactttatacggatgatgaagatgatatctacaaggctaataacattgcctatgaagatgtggtcgggggagaagactggaacccagtagaggagaaaatagagagtcaaacccaggaagaggtgagagacagcaaagagaatatagaaaaaaatgaacaaatcaacgatgagatgaaacgctcagggcagcttggcatccaggaagaagatcttcggaaagagagtaaagaccaactctcagatgatgtctccaaagtaattgcctatttgaaaaggttagtaaatgctgcaggaagtgggaggttacagaatgggcaaaatggggaaagggccaccaggctttttgagaaacctcttgattctcagtctatttatcagctgattgaaatctcaaggaatttacagatacccccagaagacttaattgagatgctcaaaactggggagaagccgaatggatcagtggaaccggagcgggagcttgaccttcctgttgacctagatgacatctcagaggctgacttagaccatccagacctgttccaaaataggatgctctccaagagtggctaccctaaaacacctggtcgtgctgggactgaggccctaccagacgggctcagtgttgaggatattttaaatcttttagggatggagagtgcagcaaatcagaaaacgtcgtattttcccaatccatataaccaggagaaagttctgccaaggctcccttatggtgctggaagatctagatcgaaccagcttcccaaagctgcctggattccacatgttgaaaacagacagatggcatatgaaaacctgaacgacaaggatcaagaattaggtgagtacttggccaggatgctagttaaataccctgagatcattaattcaaaccaagtgaagcgagttcctggtcaaggctcatctgaagatgacctgcaggaagaggaacaaattgagcaggccatcaaagagcatttgaatcaaggcagctctcaggagactgacaagctggccccggtgagcaaaaggttccctgtggggcccccgaagaatgatgataccccaaataggcagtactgggatgaagatctgttaatgaaagtgctggaatacctcaaccaagaaaaggcagaaaagggaagggagcatattgctaagagagcaatggaaaatatgtaagctgctttcattaattaccctactttcattcctcccaccccaagcaaatcccaacatttctcttcagtgtgttgacttctatcctgttaacactgtaatatctttaaatgatgtacaggcagatgaaaccaggtcactggggagtctgcttcatttcctctgagctgttatcttgtgtatggatatgtgtaaatgttatgactccttgataaaaaatttattatgtccattattcaagaaagatatctatgactgtgtttaatagtatatctaatggctgtggcattgttgatgctcacatatgataaaaaagtgtcctataattctattgaaagtttttaatatttattgaattattttgttactgtctgtagtgttttgtggagtactggaccaaaaaaataaagcattataaatatatagttttatttataaggccttttctattgtgtgttttactgttgattaataaatgttatttctggacaa

SEQ ID NO: 138505 - DNA, 589 bp, Artificial Sequence
  derived and/or modified sequence
gtaaggctgcttttctctttgatttattggaaagttccaaattgcatgctcttcttttaattcctagctgagaagaaaaagactgtttggcaagcttatgtcgataggataactgaatagcaacctgctgctcatcagccaatgaaatctttcaaacatggctgaagcaaagacccactggcttggagcagccctgtctcttatccctttaattttcctcatctctggggctgaagcagcttcatttcagagaaaccagctgcttcagaaagaaccagacctcaggttggaaaatgtccaaaagtttcccagtcctgaaatgatcagggctttggagtacatagaaaacctccgacaacaagctcataaggaagaaagcagcccagattataatccctaccaaggtgtctctgtcccccttcagcaaaaagaaaatggcgatgaaagccacttgcccgagagggattcactgagtgaagaagactggatgagaataatactcgaagctttgagacaggctgaaaatgagcctcagtctgcaccaaaagaaaataagccctatgccttgaattcagaaaagaactttcca

SEQ ID NO: 138506 - DNA, 544 bp, Artificial Sequence
  derived and/or modified sequence
gaaacggcccgagaagctcgcccggagaacggggaggaatatgctgtggagctcctctgccatataaacaaaaagagctgagaagaaaaagactgtttggcaagcttatgtcgataggataactgaatagcaacctgctgctcatcagccaatgaaatctttcaaacatggctgaagcaaagacccactggcttggagcagccctgtctcttatccctttaattttcctcatctctggggctgaagcagcttcatttcagagaaaccagctgcttcagaaagaaccagacctcaggttggaaaatgtccaaaagtttcccagtcctgaaatgatcagggctttggagtacatagaaaacctccgacaacaagctcataaggaagaaagcagcccagattataatccctaccaaggtgtctctgtcccccttcagcaaaaagaaaatggcgatgaaagccacttgcccgagagggattcactgagtgaagaagactggatgagaataatactcgaagctttgagacaggctgaaaatgagcctca

SEQ ID NO: 138507 - DNA, 1434 bp, Artificial Sequence
  derived and/or modified sequence
atggctgaagcaaagacccactggcttggagcagccctgtctcttatccctttaattttcctcatctctggggctgaagcagcttcatttcagagaaaccagctgcttcagaaagaaccagacctcaggttggaaaatgtccaaaagtttcccagtcctgaaatgatcagggctttggagtacatagaaaacctccgacaacaagctcataaggaagaaagcagcccagattataatccctaccaaggtgtctctgtcccccttcagcaaaaagaaaatggcgatgaaagccacttgcccgagagggattcactgaggggagaagactggaacccagtagaggagaaaatagagagtcaaacccaggaagaggtgagagacagcaaagagaatatagaaaaaaatgaacaaatcaacgatgagatgaaacgctcagggcagcttggcatccaggaagaagatcttcggaaagagagtaaagaccaactctcagatgatgtctccaaagtaattgcctatttgaaaaggttagtaaatgctgcaggaagtgggaggttacagaatgggcaaaatggggaaagggccaccaggctttttgagaaacctcttgattctcagtctatttatcagctgattgaaatctcaaggaatttacagatacccccagaagacttaattgagatgctcaaaactggggagaagccgaatggatcagtggaaccggagcgggagcttgaccttcctgttgacctagatgacatctcagaggctgacttagaccatccagacctgttccaaaataggatgctctccaagagtggctaccctaaaacacctggtcgtgctgggactgaggccctaccagacgggctcagtgttgaggatattttaaatcttttagggatggagagtgcagcaaatcagaaaacgtcgtattttcccaatccatataaccaggagaaagttctgccaaggctcccttatggtgctggaagatctagatcgaaccagcttcccaaagctgcctggattccacatgttgaaaacagacagatggcatatgaaaacctgaacgacaaggatcaagaattaggtgagtacttggccaggatgctagttaaataccctgagatcattaattcaaaccaagtgaagcgagttcctggtcaaggctcatctgaagatgacctgcaggaagaggaacaaattgagcaggccatcaaagagcatttgaatcaaggcagctctcaggagactgacaagctggccccggtgagcaaaaggttccctgtggggcccccgaagaatgatgataccccaaataggcagtactgggatgaagatctgttaatgaaagtgctggaatacctcaaccaagaaaaggcagaaaagggaagggagcatattgctaagagagcaatggaaaatatgtaa

SEQ ID NO: 138508 - DNA, 1854 bp, Artificial Sequence
  derived and/or modified sequence
atggccgaggccaagacccactggctgggcgccgccctgagcctgatccccctgatcttcctgatcagcggcgccgaggccgccagcttccagagaaaccagctgctgcagaaggagcccgacctgagactggagaacgtgcagaagttccccagccccgagatgatcagagccctggagtacatcgagaacctgagacagcaggcccacaaggaggagagcagccccgactacaacccctaccagggcgtgagcgtgcccctgcagcagaaggagaacggcgacgagagccacctgcccgagagagacagcctgagcgaggaggactggatgagaatcatcctggaggccctgagacaggccgagaacgagccccagagcgcccccaaggagaacaagccctacgccctgaacagcgagaagaacttccccatggacatgagcgacgactacgagacccagcagtggcccgagagaaagctgaagcacatgcagttcccccccatgtacgaggagaacagcagagacaaccccttcaagagaaccaacgagatcgtggaggagcagtacaccccccagagcctggccaccctggagagcgtgttccaggagctgggcaagctgaccggccccaacaaccagaagagagagagaatggacgaggagcagaagctgtacaccgacgacgaggacgacatctacaaggccaacaacatcgcctacgaggacgtggtgggcggcgaggactggaaccccgtggaggagaagatcgagagccagacccaggaggaggtgagagacagcaaggagaacatcgagaagaacgagcagatcaacgacgagatgaagagaagcggccagctgggcatccaggaggaggacctgagaaaggagagcaaggaccagctgagcgacgacgtgagcaaggtgatcgcctacctgaagagactggtgaacgccgccggcagcggcagactgcagaacggccagaacggcgagagagccaccagactgttcgagaagcccctggacagccagagcatctaccagctgatcgagatcagcagaaacctgcagatcccccccgaggacctgatcgagatgctgaagaccggcgagaagcccaacggcagcgtggagcccgagagagagctggacctgcccgtggacctggacgacatcagcgaggccgacctggaccaccccgacctgttccagaacagaatgctgagcaagagcggctaccccaagacccccggcagagccggcaccgaggccctgcccgacggcctgagcgtggaggacatcctgaacctgctgggcatggagagcgccgccaaccagaagaccagctacttccccaacccctacaaccaggagaaggtgctgcccagactgccctacggcgccggcagaagcagaagcaaccagctgcccaaggccgcctggatcccccacgtggagaacagacagatggcctacgagaacctgaacgacaaggaccaggagctgggcgagtacctggccagaatgctggtgaagtaccccgagatcatcaacagcaaccaggtgaagagagtgcccggccagggcagcagcgaggacgacctgcaggaggaggagcagatcgagcaggccatcaaggagcacctgaaccagggcagcagccaggagaccgacaagctggcccccgtgagcaagagattccccgtgggcccccccaagaacgacgacacccccaacagacagtactgggacgaggacctgctgatgaaggtgctggagtacctgaaccaggagaaggccgagaagggcagagagcacatcgccaagagagccatggagaacatgtag

SEQ ID NO: 138509 - DNA, 435 bp, Artificial Sequence
  derived and/or modified sequence
atggccgaggccaagacccactggctgggcgccgccctgagcctgatccccctgatcttcctgatcagcggcgccgaggccgccagcttccagagaaaccagctgctgcagaaggagcccgacctgagactggagaacgtgcagaagttccccagccccgagatgatcagagccctggagtacatcgagaacctgagacagcaggcccacaaggaggagagcagccccgactacaacccctaccagggcgtgagcgtgcccctgcagcagaaggagaacggcgacgagagccacctgcccgagagagacagcctgagcgaggaggactggatgagaatcatcctggaggccctgagacaggccgagaacgagccccagagcgcccccaaggagaacaagccctacgccctgaacagcgagaagaacttcccctag

SEQ ID NO: 138510 - DNA, 378 bp, Artificial Sequence
  derived and/or modified sequence
atggccgaggccaagacccactggctgggcgccgccctgagcctgatccccctgatcttcctgatcagcggcgccgaggccgccagcttccagagaaaccagctgctgcagaaggagcccgacctgagactggagaacgtgcagaagttccccagccccgagatgatcagagccctggagtacatcgagaacctgagacagcaggcccacaaggaggagagcagccccgactacaacccctaccagggcgtgagcgtgcccctgcagcagaaggagaacggcgacgagagccacctgcccgagagagacagcctgagcgaggaggactggatgagaatcatcctggaggccctgagacaggccgagaacgagccctag

SEQ ID NO: 138511 - DNA, 1434 bp, Artificial Sequence
  derived and/or modified sequence
atggccgaggccaagacccactggctgggcgccgccctgagcctgatccccctgatcttcctgatcagcggcgccgaggccgccagcttccagagaaaccagctgctgcagaaggagcccgacctgagactggagaacgtgcagaagttccccagccccgagatgatcagagccctggagtacatcgagaacctgagacagcaggcccacaaggaggagagcagccccgactacaacccctaccagggcgtgagcgtgcccctgcagcagaaggagaacggcgacgagagccacctgcccgagagagacagcctgagaggcgaggactggaaccccgtggaggagaagatcgagagccagacccaggaggaggtgagagacagcaaggagaacatcgagaagaacgagcagatcaacgacgagatgaagagaagcggccagctgggcatccaggaggaggacctgagaaaggagagcaaggaccagctgagcgacgacgtgagcaaggtgatcgcctacctgaagagactggtgaacgccgccggcagcggcagactgcagaacggccagaacggcgagagagccaccagactgttcgagaagcccctggacagccagagcatctaccagctgatcgagatcagcagaaacctgcagatcccccccgaggacctgatcgagatgctgaagaccggcgagaagcccaacggcagcgtggagcccgagagagagctggacctgcccgtggacctggacgacatcagcgaggccgacctggaccaccccgacctgttccagaacagaatgctgagcaagagcggctaccccaagacccccggcagagccggcaccgaggccctgcccgacggcctgagcgtggaggacatcctgaacctgctgggcatggagagcgccgccaaccagaagaccagctacttccccaacccctacaaccaggagaaggtgctgcccagactgccctacggcgccggcagaagcagaagcaaccagctgcccaaggccgcctggatcccccacgtggagaacagacagatggcctacgagaacctgaacgacaaggaccaggagctgggcgagtacctggccagaatgctggtgaagtaccccgagatcatcaacagcaaccaggtgaagagagtgcccggccagggcagcagcgaggacgacctgcaggaggaggagcagatcgagcaggccatcaaggagcacctgaaccagggcagcagccaggagaccgacaagctggcccccgtgagcaagagattccccgtgggcccccccaagaacgacgacacccccaacagacagtactgggacgaggacctgctgatgaaggtgctggagtacctgaaccaggagaaggccgagaagggcagagagcacatcgccaagagagccatggagaacatgtag

SEQ ID NO: 138512 - protein, 1102 aa, Artificial Sequence
  derived and/or modified sequence
MNHQQQQQQQKAGEQQLSEPEDMEMEAGDTDDPPRITQNPVINGNVALSDGHNTAEEDMEDDTSWRSEATFQFTVERFSRLSESVLSPPCFVRNLPWKIMVMPRFYPDRPHQKSVGFFLQCNAESDSTSWSCHAQAVLKIINYRDDEKSFSRRISHLFFHKENDWGFSNFMAWSEVTDPEKGFIDDDKVTFEVFVQADAPHGVAWDSKKHTGYVGLKNQGATCYMNSLLQTLFFTNQLRKAVYMMPTEGDDSSKSVPLALQRVFYELQHSDKPVGTKKLTKSFGWETLDSFMQHDVQELCRVLLDNVENKMKGTCVEGTIPKLFRGKMVSYIQCKEVDYRSDRREDYYDIQLSIKGKKNIFESFVDYVAVEQLDGDNKYDAGEHGLQEAEKGVKFLTLPPVLHLQLMRFMYDPQTDQNIKINDRFEFPEQLPLDEFLQKTDPKDPANYILHAVLVHSGDNHGGHYVVYLNPKGDGKWCKFDDDVVSRCTKEEAIEHNYGGHDDDLSVRHCTNAYMLVYIRESKLSEVLQAVTDHDIPQQLVERLQEEKRIEAQKRKERQEAHLYMQVQIVAEDQFCGHQGNDMYDEEKVKYTVFKVLKNSSLAEFVQSLSQTMGFPQDQIRLWPMQARSNGTKRPAMLDNEADGNKTMIELSDNENPWTIFLETVDPELAASGATLPKFDKDHDVMLFLKMYDPKTRSLNYCGHIYTPISCKIRDLLPVMCDRAGFIQDTSLILYEEVKPNLTERIQDYDVSLDKALDELMDGDIIVFQKDDPENDNSELPTAKEYFRDLYHRVDVIFCDKTIPNDPGFVVTLSNRMNYFQVAKTVAQRLNTDPMLLQFFKSQGYRDGPGNPLRHNYEGTLRDLLQFFKPRQPKKLYYQQLKMKITDFENRRSFKCIWLNSQFREEEITLYPDKHGCVRDLLEECKKAVELGEKASGKLRLLEIVSYKIIGVHQEDELLECLSPATSRTFRIEEIPLDQVDIDKENEMLVTVAHFHKEVFGTFGIPFLLRIHQGEHFREVMKRIQSLLDIQEKEFEKFKFAIVMMGRHQYINEDEYEVNLKDFEPQPGNMSHPRPWLGLDHFNKAPKRSRYTYLEKAIKIHN

SEQ ID NO: 138513 - protein, 1003 aa, Artificial Sequence
  derived and/or modified sequence
MVMPRFYPDRPHQKSVGFFLQCNAESDSTSWSCHAQAVLKIINYRDDEKSFSRRISHLFFHKENDWGFSNFMAWSEVTDPEKGFIDDDKVTFEVFVQADAPHGVAWDSKKHTGYVGLKNQGATCYMNSLLQTLFFTNQLRKAVYMMPTEGDDSSKSVPLALQRVFYELQHSDKPVGTKKLTKSFGWETLDSFMQHDVQELCRVLLDNVENKMKGTCVEGTIPKLFRGKMVSYIQCKEVDYRSDRREDYYDIQLSIKGKKNIFESFVDYVAVEQLDGDNKYDAGEHGLQEAEKGVKFLTLPPVLHLQLMRFMYDPQTDQNIKINDRFEFPEQLPLDEFLQKTDPKDPANYILHAVLVHSGDNHGGHYVVYLNPKGDGKWCKFDDDVVSRCTKEEAIEHNYGGHDDDLSVRHCTNAYMLVYIRESKLSEVLQAVTDHDIPQQLVERLQEEKRIEAQKRKERQEAHLYMQVQIVAEDQFCGHQGNDMYDEEKVKYTVFKVLKNSSLAEFVQSLSQTMGFPQDQIRLWPMQARSNGTKRPAMLDNEADGNKTMIELSDNENPWTIFLETVDPELAASGATLPKFDKDHDVMLFLKMYDPKTRSLNYCGHIYTPISCKIRDLLPVMCDRAGFIQDTSLILYEEVKPNLTERIQDYDVSLDKALDELMDGDIIVFQKDDPENDNSELPTAKEYFRDLYHRVDVIFCDKTIPNDPGFVVTLSNRMNYFQVAKTVAQRLNTDPMLLQFFKSQGYRDGPGNPLRHNYEGTLRDLLQFFKPRQPKKLYYQQLKMKITDFENRRSFKCIWLNSQFREEEITLYPDKHGCVRDLLEECKKAVELGEKASGKLRLLEIVSYKIIGVHQEDELLECLSPATSRTFRIEEIPLDQVDIDKENEMLVTVAHFHKEVFGTFGIPFLLRIHQGEHFREVMKRIQSLLDIQEKEFEKFKFAIVMMGRHQYINEDEYEVNLKDFEPQPGNMSHPRPWLGLDHFNKAPKRSRYTYLEKAIKIHN

SEQ ID NO: 138514 - protein, 509 aa, Artificial Sequence
  derived and/or modified sequence
MEDDTSWRSEATFQFTVERFSRLSESVLSPPCFVRNLPWKIMVMPRFYPDRPHQKSVGFFLQCNAESDSTSWSCHAQAVLKIINYRDDEKSFSRRISHLFFHKENDWGFSNFMAWSEVTDPEKGFIDDDKVTFEVFVQADAPHGVAWDSKKHTGYVGLKNQGATCYMNSLLQTLFFTNQLRKAVYMMPTEGDDSSKSVPLALQRVFYELQHSDKPVGTKKLTKSFGWETLDSFMQHDVQELCRVLLDNVENKMKGTCVEGTIPKLFRGKMVSYIQCKEVDYRSDRREDYYDIQLSIKGKKNIFESFVDYVAVEQLDGDNKYDAGEHGLQEAEKGVKFLTLPPVLHLQLMRFMYDPQTDQNIKINDRFEFPEQLPLDEFLQKTDPKDPANYILHAVLVHSGDNHGGHYVVYLNPKGDGKWCKFDDDVVSRCTKEEAIEHNYGGHDDDLSVRHCTNAYMLVYIRESKLTVGGAITRREKDRGSEAEGAAGSPSLYASADSRRGPVLWPPRE

SEQ ID NO: 138515 - DNA, 3309 bp, Artificial Sequence
  derived and/or modified sequence
atgaaccaccagcagcagcagcagcagcagaaggccggcgagcagcagctgagcgagcccgaggacatggagatggaggccggcgacaccgacgacccccccagaatcacccagaaccccgtgatcaacggcaacgtggccctgagcgacggccacaacaccgccgaggaggacatggaggacgacaccagctggagaagcgaggccaccttccagttcaccgtggagagattcagcagactgagcgagagcgtgctgagccccccctgcttcgtgagaaacctgccctggaagatcatggtgatgcccagattctaccccgacagaccccaccagaagagcgtgggcttcttcctgcagtgcaacgccgagagcgacagcaccagctggagctgccacgcccaggccgtgctgaagatcatcaactacagagacgacgagaagagcttcagcagaagaatcagccacctgttcttccacaaggagaacgactggggcttcagcaacttcatggcctggagcgaggtgaccgaccccgagaagggcttcatcgacgacgacaaggtgaccttcgaggtgttcgtgcaggccgacgccccccacggcgtggcctgggacagcaagaagcacaccggctacgtgggcctgaagaaccagggcgccacctgctacatgaacagcctgctgcagaccctgttcttcaccaaccagctgagaaaggccgtgtacatgatgcccaccgagggcgacgacagcagcaagagcgtgcccctggccctgcagagagtgttctacgagctgcagcacagcgacaagcccgtgggcaccaagaagctgaccaagagcttcggctgggagaccctggacagcttcatgcagcacgacgtgcaggagctgtgcagagtgctgctggacaacgtggagaacaagatgaagggcacctgcgtggagggcaccatccccaagctgttcagaggcaagatggtgagctacatccagtgcaaggaggtggactacagaagcgacagaagagaggactactacgacatccagctgagcatcaagggcaagaagaacatcttcgagagcttcgtggactacgtggccgtggagcagctggacggcgacaacaagtacgacgccggcgagcacggcctgcaggaggccgagaagggcgtgaagttcctgaccctgccccccgtgctgcacctgcagctgatgagattcatgtacgacccccagaccgaccagaacatcaagatcaacgacagattcgagttccccgagcagctgcccctggacgagttcctgcagaagaccgaccccaaggaccccgccaactacatcctgcacgccgtgctggtgcacagcggcgacaaccacggcggccactacgtggtgtacctgaaccccaagggcgacggcaagtggtgcaagttcgacgacgacgtggtgagcagatgcaccaaggaggaggccatcgagcacaactacggcggccacgacgacgacctgagcgtgagacactgcaccaacgcctacatgctggtgtacatcagagagagcaagctgagcgaggtgctgcaggccgtgaccgaccacgacatcccccagcagctggtggagagactgcaggaggagaagagaatcgaggcccagaagagaaaggagagacaggaggcccacctgtacatgcaggtgcagatcgtggccgaggaccagttctgcggccaccagggcaacgacatgtacgacgaggagaaggtgaagtacaccgtgttcaaggtgctgaagaacagcagcctggccgagttcgtgcagagcctgagccagaccatgggcttcccccaggaccagatcagactgtggcccatgcaggccagaagcaacggcaccaagagacccgccatgctggacaacgaggccgacggcaacaagaccatgatcgagctgagcgacaacgagaacccctggaccatcttcctggagaccgtggaccccgagctggccgccagcggcgccaccctgcccaagttcgacaaggaccacgacgtgatgctgttcctgaagatgtacgaccccaagaccagaagcctgaactactgcggccacatctacacccccatcagctgcaagatcagagacctgctgcccgtgatgtgcgacagagccggcttcatccaggacaccagcctgatcctgtacgaggaggtgaagcccaacctgaccgagagaatccaggactacgacgtgagcctggacaaggccctggacgagctgatggacggcgacatcatcgtgttccagaaggacgaccccgagaacgacaacagcgagctgcccaccgccaaggagtacttcagagacctgtaccacagagtggacgtgatcttctgcgacaagaccatccccaacgaccccggcttcgtggtgaccctgagcaacagaatgaactacttccaggtggccaagaccgtggcccagagactgaacaccgaccccatgctgctgcagttcttcaagagccagggctacagagacggccccggcaaccccctgagacacaactacgagggcaccctgagagacctgctgcagttcttcaagcccagacagcccaagaagctgtactaccagcagctgaagatgaagatcaccgacttcgagaacagaagaagcttcaagtgcatctggctgaacagccagttcagagaggaggagatcaccctgtaccccgacaagcacggctgcgtgagagacctgctggaggagtgcaagaaggccgtggagctgggcgagaaggccagcggcaagctgagactgctggagatcgtgagctacaagatcatcggcgtgcaccaggaggacgagctgctggagtgcctgagccccgccaccagcagaaccttcagaatcgaggagatccccctggaccaggtggacatcgacaaggagaacgagatgctggtgaccgtggcccacttccacaaggaggtgttcggcaccttcggcatccccttcctgctgagaatccaccagggcgagcacttcagagaggtgatgaagagaatccagagcctgctggacatccaggagaaggagttcgagaagttcaagttcgccatcgtgatgatgggcagacaccagtacatcaacgaggacgagtacgaggtgaacctgaaggacttcgagccccagcccggcaacatgagccaccccagaccctggctgggcctggaccacttcaacaaggcccccaagagaagcagatacacctacctggagaaggccatcaagatccacaactag

SEQ ID NO: 138516 - DNA, 3012 bp, Artificial Sequence
  derived and/or modified sequence
atggtgatgcccagattctaccccgacagaccccaccagaagagcgtgggcttcttcctgcagtgcaacgccgagagcgacagcaccagctggagctgccacgcccaggccgtgctgaagatcatcaactacagagacgacgagaagagcttcagcagaagaatcagccacctgttcttccacaaggagaacgactggggcttcagcaacttcatggcctggagcgaggtgaccgaccccgagaagggcttcatcgacgacgacaaggtgaccttcgaggtgttcgtgcaggccgacgccccccacggcgtggcctgggacagcaagaagcacaccggctacgtgggcctgaagaaccagggcgccacctgctacatgaacagcctgctgcagaccctgttcttcaccaaccagctgagaaaggccgtgtacatgatgcccaccgagggcgacgacagcagcaagagcgtgcccctggccctgcagagagtgttctacgagctgcagcacagcgacaagcccgtgggcaccaagaagctgaccaagagcttcggctgggagaccctggacagcttcatgcagcacgacgtgcaggagctgtgcagagtgctgctggacaacgtggagaacaagatgaagggcacctgcgtggagggcaccatccccaagctgttcagaggcaagatggtgagctacatccagtgcaaggaggtggactacagaagcgacagaagagaggactactacgacatccagctgagcatcaagggcaagaagaacatcttcgagagcttcgtggactacgtggccgtggagcagctggacggcgacaacaagtacgacgccggcgagcacggcctgcaggaggccgagaagggcgtgaagttcctgaccctgccccccgtgctgcacctgcagctgatgagattcatgtacgacccccagaccgaccagaacatcaagatcaacgacagattcgagttccccgagcagctgcccctggacgagttcctgcagaagaccgaccccaaggaccccgccaactacatcctgcacgccgtgctggtgcacagcggcgacaaccacggcggccactacgtggtgtacctgaaccccaagggcgacggcaagtggtgcaagttcgacgacgacgtggtgagcagatgcaccaaggaggaggccatcgagcacaactacggcggccacgacgacgacctgagcgtgagacactgcaccaacgcctacatgctggtgtacatcagagagagcaagctgagcgaggtgctgcaggccgtgaccgaccacgacatcccccagcagctggtggagagactgcaggaggagaagagaatcgaggcccagaagagaaaggagagacaggaggcccacctgtacatgcaggtgcagatcgtggccgaggaccagttctgcggccaccagggcaacgacatgtacgacgaggagaaggtgaagtacaccgtgttcaaggtgctgaagaacagcagcctggccgagttcgtgcagagcctgagccagaccatgggcttcccccaggaccagatcagactgtggcccatgcaggccagaagcaacggcaccaagagacccgccatgctggacaacgaggccgacggcaacaagaccatgatcgagctgagcgacaacgagaacccctggaccatcttcctggagaccgtggaccccgagctggccgccagcggcgccaccctgcccaagttcgacaaggaccacgacgtgatgctgttcctgaagatgtacgaccccaagaccagaagcctgaactactgcggccacatctacacccccatcagctgcaagatcagagacctgctgcccgtgatgtgcgacagagccggcttcatccaggacaccagcctgatcctgtacgaggaggtgaagcccaacctgaccgagagaatccaggactacgacgtgagcctggacaaggccctggacgagctgatggacggcgacatcatcgtgttccagaaggacgaccccgagaacgacaacagcgagctgcccaccgccaaggagtacttcagagacctgtaccacagagtggacgtgatcttctgcgacaagaccatccccaacgaccccggcttcgtggtgaccctgagcaacagaatgaactacttccaggtggccaagaccgtggcccagagactgaacaccgaccccatgctgctgcagttcttcaagagccagggctacagagacggccccggcaaccccctgagacacaactacgagggcaccctgagagacctgctgcagttcttcaagcccagacagcccaagaagctgtactaccagcagctgaagatgaagatcaccgacttcgagaacagaagaagcttcaagtgcatctggctgaacagccagttcagagaggaggagatcaccctgtaccccgacaagcacggctgcgtgagagacctgctggaggagtgcaagaaggccgtggagctgggcgagaaggccagcggcaagctgagactgctggagatcgtgagctacaagatcatcggcgtgcaccaggaggacgagctgctggagtgcctgagccccgccaccagcagaaccttcagaatcgaggagatccccctggaccaggtggacatcgacaaggagaacgagatgctggtgaccgtggcccacttccacaaggaggtgttcggcaccttcggcatccccttcctgctgagaatccaccagggcgagcacttcagagaggtgatgaagagaatccagagcctgctggacatccaggagaaggagttcgagaagttcaagttcgccatcgtgatgatgggcagacaccagtacatcaacgaggacgagtacgaggtgaacctgaaggacttcgagccccagcccggcaacatgagccaccccagaccctggctgggcctggaccacttcaacaaggcccccaagagaagcagatacacctacctggagaaggccatcaagatccacaactag

SEQ ID NO: 138517 - DNA, 1530 bp, Artificial Sequence
  derived and/or modified sequence
atggaggacgacaccagctggagaagcgaggccaccttccagttcaccgtggagagattcagcagactgagcgagagcgtgctgagccccccctgcttcgtgagaaacctgccctggaagatcatggtgatgcccagattctaccccgacagaccccaccagaagagcgtgggcttcttcctgcagtgcaacgccgagagcgacagcaccagctggagctgccacgcccaggccgtgctgaagatcatcaactacagagacgacgagaagagcttcagcagaagaatcagccacctgttcttccacaaggagaacgactggggcttcagcaacttcatggcctggagcgaggtgaccgaccccgagaagggcttcatcgacgacgacaaggtgaccttcgaggtgttcgtgcaggccgacgccccccacggcgtggcctgggacagcaagaagcacaccggctacgtgggcctgaagaaccagggcgccacctgctacatgaacagcctgctgcagaccctgttcttcaccaaccagctgagaaaggccgtgtacatgatgcccaccgagggcgacgacagcagcaagagcgtgcccctggccctgcagagagtgttctacgagctgcagcacagcgacaagcccgtgggcaccaagaagctgaccaagagcttcggctgggagaccctggacagcttcatgcagcacgacgtgcaggagctgtgcagagtgctgctggacaacgtggagaacaagatgaagggcacctgcgtggagggcaccatccccaagctgttcagaggcaagatggtgagctacatccagtgcaaggaggtggactacagaagcgacagaagagaggactactacgacatccagctgagcatcaagggcaagaagaacatcttcgagagcttcgtggactacgtggccgtggagcagctggacggcgacaacaagtacgacgccggcgagcacggcctgcaggaggccgagaagggcgtgaagttcctgaccctgccccccgtgctgcacctgcagctgatgagattcatgtacgacccccagaccgaccagaacatcaagatcaacgacagattcgagttccccgagcagctgcccctggacgagttcctgcagaagaccgaccccaaggaccccgccaactacatcctgcacgccgtgctggtgcacagcggcgacaaccacggcggccactacgtggtgtacctgaaccccaagggcgacggcaagtggtgcaagttcgacgacgacgtggtgagcagatgcaccaaggaggaggccatcgagcacaactacggcggccacgacgacgacctgagcgtgagacactgcaccaacgcctacatgctggtgtacatcagagagagcaagctgaccgtgggcggcgccatcaccagaagagagaaggacagaggcagcgaggccgagggcgccgccggcagccccagcctgtacgccagcgccgacagcagaagaggccccgtgctgtggccccccagagagtag

SEQ ID NO: 138518 - DNA, 3309 bp, Artificial Sequence
  derived and/or modified sequence
atgaatcaccagcagcagcaacaacagcagaaggcgggagagcagcagttgagcgagcccgaggacatggaaatggaggctggcgacactgacgatccccctcgcataacacagaatccagtgattaatggcaacgtggctctgtcagacggccacaatactgcagaggaggacatggaggatgatacttcttggaggagcgaagccacatttcagttcactgttgaacgcttctcccgcctatccgagagcgtcctgagccctccttgttttgttaggaatttaccttggaaaattatggtcatgcccaggttctaccctgaccgcccacatcagaaatccgttggtttttttcttcaatgtaacgctgaatctgacagcactagctggtcatgccatgcccaagccgtactcaagatcattaattatagggacgatgagaagtcgttttctcgcaggataagtcacctttttttccacaaggagaacgactggggcttcagtaatttcatggcctggtctgaggtgactgatcccgagaaagggtttattgatgacgataaggtgaccttcgaagtttttgttcaggccgatgccccgcatggggtcgcatgggattctaagaagcatacaggctacgtgggactgaaaaatcaaggcgccacctgttacatgaattccctcttacagactctattttttacaaatcagcttaggaaagctgtgtacatgatgccgaccgagggagacgactcctccaaaagtgtgccattggctctgcaaagggtgttttacgagcttcagcatagcgataagccagtggggactaagaaactgaccaagagctttgggtgggagacactcgattcctttatgcaacatgacgtccaggaactttgcagagtgcttctggacaacgtcgagaataagatgaaaggtacatgtgtggaaggcacgatccctaagttgtttcgcggcaaaatggtcagctatattcagtgtaaggaggtcgactataggagtgataggcgggaagactattatgatattcagctttcgatcaagggaaaaaaaaacatttttgaatccttcgtggactacgtggccgtagagcagctggacggtgataacaaatatgacgccggggaacatggcctccaggaagctgaaaaaggggtcaaattcctaactctgccacctgttctccatctgcagctgatgaggtttatgtatgatccacagaccgatcagaatattaagattaacgatcgattcgagtttcccgaacagctgcctctggatgagttcctgcagaaaacggacccaaaagatcccgccaattatattctccatgcagtgctcgtgcattctggggacaatcatggcgggcactatgtggtctacctgaatccaaagggagatggaaagtggtgcaaatttgatgacgatgtcgtctcacgctgcacgaaagaagaagccattgagcataactacggcggtcacgacgacgatcttagcgtccggcactgcacgaatgcatatatgttggtttacatcagagagtctaagctaagcgaggtattgcaagcagtgaccgatcacgacattccccaacagcttgtggagaggttgcaggaggaaaaacgcatcgaagcccagaagcgcaaggaaaggcaagaggcccacctttatatgcaggtacaaattgtggcggaggatcagttctgcgggcatcagggtaacgatatgtacgacgaggaaaaagttaagtacacagtcttcaaggtgctgaagaattcttcacttgctgagttcgtacaatccctttcgcagaccatgggcttcccacaggatcaaatcaggttgtggccaatgcaggcccgctccaacggcacaaaacgacccgctatgttggacaacgaagctgatgggaataaaacaatgatagaacttagcgataacgaaaacccatggaccatttttttggaaaccgtcgacccagaactggccgcatctggagccactctacccaaatttgacaaagaccatgatgttatgttatttctcaaaatgtatgacccaaaaacccgctctctgaattactgcgggcacatctacactcccatctcatgtaagataagggacctcttgcctgtcatgtgcgacagagctggcttcatccaggatacatccttaattctgtacgaagaggtgaagcctaatttgaccgagcgcatccaggattacgatgtgtcattggataaggcgctagacgaactgatggatggcgatatcatcgtcttccagaaagacgacccagaaaatgacaacagtgaacttccaaccgccaaggaatactttagagacctctaccaccgggtggatgtgattttttgcgacaaaaccatccctaatgatcctggttttgtggtgacactaagcaaccggatgaattacttccaggtcgctaagacagtggcccagcggctaaacactgacccgatgctgttgcagtttttcaagagccagggatatcgcgacgggcccggcaatccactgcggcacaactatgaggggacactccgagatttgttacagtttttcaagccgcgtcagcccaagaagctctactaccagcagctcaaaatgaaaattaccgactttgagaaccgacgctcctttaagtgtatctggttgaatagtcagtttagagaagaggagattacactatatcccgataagcacgggtgcgtgcgggacctgctggaagagtgtaaaaaagctgtagagttgggagagaaagcctccggaaagctacgtctgctggagatagtatcatacaagatcatcggcgtacaccaagaggacgaactcctggagtgcttgtcgccagccacgtcgcgcacatttagaattgaggagatcccactggaccaagtggacattgacaaggagaatgagatgttagtgaccgtagcccactttcacaaggaggtgttcggcacattcggcatcccatttctgctgcgcatccaccagggcgagcatttcagagaggtgatgaaaaggattcagtctctcctcgacattcaggaaaaagagttcgagaagttcaaattcgccatagtgatgatgggcaggcatcaatacatcaacgaggacgaatacgaggtaaatctgaaagacttcgagccacagccaggaaatatgagccatcctagaccgtggttagggcttgaccacttcaataaagcccccaaaagatcacggtatacgtacctcgagaaggctattaagattcacaattag

SEQ ID NO: 138519 - DNA, 3012 bp, Artificial Sequence
  derived and/or modified sequence
atggtgatgccaaggttttacccggataggcctcatcagaagagcgtagggtttttcctgcagtgcaacgccgagtccgacagtacctcctggagctgtcatgcccaggccgtactgaagattatcaactaccgcgacgacgagaaatctttctcccgaagaatctcgcaccttttctttcataaagagaatgactggggcttctccaatttcatggcttggtccgaggtgactgatcccgagaagggctttatcgatgacgacaaagtgacctttgaggttttcgttcaagccgacgccccccatggcgtggcttgggatagtaagaagcatactgggtatgtaggactgaagaatcagggtgcaacctgctacatgaactccctacttcagactctgtttttcacgaatcagctccgcaaagccgtatacatgatgccgacagagggcgatgacagttccaagtccgtaccgttggccctccagagggttttctacgagctgcaacacagcgataaacctgtgggaacaaagaagctcactaagagcttcgggtgggagaccctggacagcttcatgcagcacgacgtacaggagttgtgccgtgttctcctcgacaatgtggaaaacaaaatgaaggggacttgcgtcgaaggcactattcccaagctgttccgtggcaagatggttagttacatccagtgcaaagaagttgattatcggtctgatcgtagggaggactattacgatattcagctgtccattaaggggaagaagaacattttcgagagctttgtagattatgtagcagtcgagcagctggatggtgacaataagtatgatgccggcgaacatgggctacaagaggctgaaaaaggagtcaagttcctaacactgcccccggtgcttcacctccagcttatgaggttcatgtatgatcctcagactgatcaaaacattaagatcaacgacagatttgaatttccagaacagctgccattagacgaattcttgcagaagacggatccaaaagacccggcaaactatattctccatgctgtgttagtccattctggtgacaaccacgggggccactatgtagtctaccttaacccgaaaggtgatggcaaatggtgcaaattcgatgacgacgtagtgtctaggtgcacgaaagaagaggcaattgagcataactatggtgggcatgatgacgacctgtcagtgaggcactgcactaatgcctatatgctagtctacatcagggagtccaagttgagtgaggtcttgcaggctgttaccgatcacgatattcctcagcaattagtagaacgtctgcaggaggagaagaggattgaggcgcaaaagcgcaaggagcgtcaagaggctcatctgtacatgcaggttcagatcgttgctgaagaccaattttgcggacaccaaggtaacgacatgtatgacgaggagaaggtgaagtacaccgttttcaaggtgctgaaaaatagttctcttgccgaattcgtgcagagtttaagccaaacaatgggctttccccaggaccagatccgtctgtggccgatgcaggcacgatctaacggcaccaagcgtcccgcgatgctcgacaatgaggccgacggcaacaaaactatgattgagctgtctgacaacgagaatccctggacaatatttctcgagaccgtagacccagaattggcagccagtggggctacactccccaagtttgacaaggaccacgatgtgatgctcttccttaaaatgtatgacccgaaaacacggtctctgaactactgtgggcatatctacacaccaatatcgtgcaagattcgagacctccttccagtgatgtgtgacagagctggattcatacaggacacctctctgattctatacgaagaagtgaagcctaacttaacagaacgcatccaggactacgacgtctccctcgataaagccctggacgagctgatggatggcgacattatagtgtttcagaaggacgaccctgagaacgacaactctgagctgcccacagcaaaggaatattttagggacttataccatagagtagacgtcattttctgtgataaaaccattccgaatgaccctggattcgtcgtgaccctcagtaatcgcatgaactattttcaggtggccaagacagtggcacagaggctcaatactgatccgatgctgctgcagtttttcaagagtcagggctaccgcgatggccccggcaacccgttgcggcacaattacgagggcactctgcgggacctattgcaattctttaaaccaagacagcccaagaaattatactaccagcagttgaagatgaagattacggatttcgagaatcggcggtcatttaaatgcatttggttaaactctcaattcagagaggaggagataactttatatccagataagcatggctgcgtgcgagacctgttggaggaatgtaagaaagctgtcgagttgggcgaaaaagcctctggaaagcttcgcctgctcgaaattgtttcttacaagattatcggggtccatcaagaggatgagttattggaatgtctgagcccagcaacaagcagaacattccgcattgaggaaattcctttagaccaagtcgacattgataaggagaatgagatgctggttactgtggcacactttcataaggaggtgttcgggacctttggaataccctttttgctgaggatccaccaaggcgagcacttccgtgaagttatgaagcgtatccagtctttgctggacatccaggaaaaagaattcgagaaattcaagtttgctattgtaatgatgggccgacaccagtatatcaacgaagatgagtacgaagtcaatttaaaagacttcgaaccgcaaccgggcaacatgtctcatccgcggccctggttgggcctcgaccattttaataaggctcccaagagatctcggtatacttaccttgaaaaggccataaaaattcacaactag

SEQ ID NO: 138520 - DNA, 1530 bp, Artificial Sequence
  derived and/or modified sequence
atggaggacgacacttcctggaggtctgaagctacgttccagttcaccgttgaacgctttagcaggttgtcggagagcgtactatctccgccatgcttcgttagaaacctcccatggaagattatggtgatgcccaggttctatccagatagaccccaccagaagtccgtcgggttcttcttgcagtgtaacgccgaatcagattccaccagttggtcctgtcacgcccaggcagtcctcaagatcatcaactacagggatgatgaaaaaagtttttcccgccggatctctcatctgttttttcacaaggaaaacgactggggattcagcaattttatggcctggagcgaagttaccgatcctgaaaagggcttcattgacgacgacaaagttacctttgaggttttcgtgcaggccgacgccccacacggagtcgcatgggactccaagaagcatacaggctatgttgggctgaagaatcaaggagctacatgctacatgaattccctgctgcaaaccctgttttttacaaatcagttgcggaaagcagtttacatgatgcccacagagggagatgacagtagtaagtcggtccccttggctctgcaaagagtcttctatgagctacagcactctgacaagccagtgggaaccaaaaaacttacgaagtcgttcggttgggagactttagacagctttatgcaacacgatgtgcaggaattgtgccgcgtgcttctcgataatgtcgagaataagatgaaaggaacttgcgttgaaggtactatccctaagctcttcagaggaaaaatggtttcttacattcagtgcaaggaggttgactaccggagtgacagacgcgaagattattacgatatccagctgagtataaagggcaagaagaacatcttcgagtcatttgttgactacgtagcagtggagcagctggatggcgacaataagtacgatgctggcgaacatggacttcaggaggcggaaaaaggtgtgaaattcctcactctgccccctgtgctacatttgcaactcatgcggttcatgtatgacccccaaaccgatcagaatatcaaaatcaatgaccgcttcgagtttcctgagcagctccccctggatgaattcctgcagaagaccgatccaaaggatcccgccaattacatccttcacgcagtgcttgtccactcaggtgacaaccatggcgggcactatgtcgtgtacttgaaccccaaaggggatggaaagtggtgtaagtttgatgacgacgtggtgtcacgctgtactaaggaagaggcaattgagcataactacggcgggcacgacgatgacctgtccgttagacattgtaccaacgcatacatgctcgtgtacatcagggagagcaaactgaccgtcgggggggcaataacccgacgagagaaggaccgaggctctgaggccgaaggtgcggcgggatctccatccctctacgcttccgcagatagtagaaggggtccggtgctctggccaccgagggagtag

SEQ ID NO: 138521 - DNA, 3309 bp, Artificial Sequence
  derived and/or modified sequence
atgaaccaccagcagcagcagcagcagcagaaggccggggagcagcagctgtctgagcctgaggacatggagatggaggccggggacacagatgatcctccccgcatcacccagaaccctgtgatcaatggaaatgtggccctgagtgatggccacaacacagctgaggaggacatggaggatgacacctcctggaggtctgaggccaccttccagttcaccgtggagcgcttcagccggctgtctgagagcgtgctgagccccccctgctttgtgaggaacctgccctggaagatcatggtgatgccccgcttctacccagaccggccccaccagaagtctgtgggcttcttcctgcagtgcaatgctgagagtgacagcacctcctggagctgccacgcccaggccgtgctgaagatcatcaactacagagatgatgagaagagcttcagccgccgcatcagccacctgttcttccacaaggaaaatgactggggcttcagcaacttcatggcctggagcgaggtgacagatcctgagaagggcttcattgatgatgacaaggtgacctttgaggtgtttgtgcaggctgatgcccctcatggagtggcctgggacagcaagaagcacacaggctacgtgggcctgaagaaccagggcgccacctgctacatgaacagcctgctgcagaccctcttcttcaccaaccagctgaggaaggctgtgtacatgatgcccacagaaggagatgacagcagcaagtctgtgcccctggccctgcagagggtcttctatgagctgcagcacagcgacaagcctgtgggcaccaagaagctgaccaagagctttggctgggagaccctggacagcttcatgcagcatgatgtgcaggagctgtgccgggtgctgctggacaacgtggagaacaagatgaagggcacctgtgtggagggcaccatccccaagctgttccggggcaagatggtgtcctacatccagtgcaaggaggtggactacagaagtgacagaagagaggactactatgacatccagctgagcatcaagggcaagaagaacatctttgagagctttgtggactatgtggccgtggagcagctggatggagacaacaagtatgatgctggggagcacggcctgcaggaggccgagaagggcgtgaagttcctgaccctgccccctgtgctgcacctgcagctgatgaggttcatgtatgacccccagacagaccagaacatcaagatcaatgacagatttgagttccctgagcagctgcccctggatgagttcctgcagaagacagaccccaaggaccctgccaactacatcctgcatgctgtgctggtgcacagcggggacaaccacggcggccactacgtggtgtacctgaaccccaagggagatggcaagtggtgcaagtttgatgatgatgtggtgagccgctgcaccaaggaggaggccatcgagcacaactacggcggccatgatgatgacctgtctgtgcgccactgcaccaatgcctacatgctggtgtacatccgggagagcaagctgtctgaggtgctgcaggccgtgacagaccatgacatcccccagcagctggtggagcggctgcaggaggagaagagaattgaggcccagaagaggaaggagcggcaggaggcccacctgtacatgcaggtgcagatcgtggccgaggaccagttctgtggccaccagggcaatgacatgtatgatgaggagaaggtgaagtacaccgtcttcaaggtgctgaagaacagcagcctggccgagtttgtgcagagcctgagccagaccatgggcttcccccaggaccagatccggctgtggcccatgcaggcccggagcaatggcaccaagaggcctgccatgctggacaatgaagcagatggcaacaagaccatgattgagctgagtgacaatgaaaacccctggaccatcttcctggagaccgtggaccctgagctggccgccagcggggccaccctgcccaagtttgacaaggaccatgatgtgatgctgttcctgaagatgtatgaccccaagaccaggagcctgaactactgcggccacatctacacccccatcagctgcaagatccgggacctgctgcctgtgatgtgtgaccgggccggcttcatccaggacaccagcctcatcctgtatgaggaggtgaagcccaacctgacagagcgcatccaggactatgatgtgtccctggacaaggccctggatgagctgatggatggagacatcatcgtgttccagaaggatgatcctgaaaatgacaacagcgagctgcccacagccaaggagtacttccgggacctgtaccaccgggtggatgtgatcttctgtgacaagaccatccccaatgaccccggctttgtggtgaccctgagcaacaggatgaactacttccaggtggccaagacagtggcccagaggctgaacacagaccccatgctgctgcagttcttcaagagccagggctacagagatggccctggcaaccccctgcggcacaactatgagggcaccctgcgggacctgctgcagttcttcaagccccggcagcccaagaagctgtactaccagcagctgaagatgaagatcacagactttgaaaatagaagaagcttcaagtgcatctggctgaacagccagttccgggaggaggagatcaccctgtacccagacaagcacggctgtgtgcgggacctgctggaggagtgcaagaaggctgtggagctgggggagaaggccagcggcaagctgcggctgctggagatcgtgtcctacaagatcatcggcgtgcaccaggaggatgagctgctggagtgcctgagccctgccaccagcaggaccttccgcatcgaggagatccccctggaccaggtggacatcgacaaggaaaatgagatgctggtgacagtggcccacttccacaaggaggtgtttggcaccttcggcatccccttcctgctgcgcatccaccagggcgagcacttccgggaggtgatgaagaggatccagagcctgctggacatccaggagaaggagtttgagaagttcaagtttgccatcgtgatgatgggccgccaccagtacatcaatgaagatgaatatgaggtgaacctgaaggactttgagccccagcccggcaacatgagccacccccggccctggctgggcctggaccacttcaacaaggcccccaagaggagccgctacacctacctggagaaggccatcaagatccacaactag

SEQ ID NO: 138522 - DNA, 3012 bp, Artificial Sequence
  derived and/or modified sequence
atggtgatgccccgcttctacccagaccggccccaccagaagtctgtgggcttcttcctgcagtgcaatgctgagagtgacagcacctcctggagctgccacgcccaggccgtgctgaagatcatcaactacagagatgatgagaagagcttcagccgccgcatcagccacctgttcttccacaaggaaaatgactggggcttcagcaacttcatggcctggagcgaggtgacagatcctgagaagggcttcattgatgatgacaaggtgacctttgaggtgtttgtgcaggctgatgccccccacggcgtggcctgggacagcaagaagcacacaggctacgtgggcctgaagaaccagggcgccacctgctacatgaacagcctgctgcagaccctcttcttcaccaaccagctgaggaaggctgtgtacatgatgcccacagaaggagatgacagcagcaagtctgtgcccctggccctgcagagggtcttctatgagctgcagcacagcgacaagcctgtgggcaccaagaagctgaccaagagctttggctgggagaccctggacagcttcatgcagcatgatgtgcaggagctgtgccgggtgctgctggacaacgtggagaacaagatgaagggcacctgtgtggagggcaccatccccaagctgttccggggcaagatggtgtcctacatccagtgcaaggaggtggactacagaagtgaccggcgggaggactactatgacatccagctgagcatcaagggcaagaagaacatctttgagagctttgtggactatgtggccgtggagcagctggatggagacaacaagtatgatgctggggagcacggcctgcaggaggccgagaagggcgtgaagttcctgaccctgccccctgtgctgcacctgcagctgatgaggttcatgtatgacccccagacagaccagaacatcaagatcaatgacagatttgagttccctgagcagctgcccctggatgagttcctgcagaagacagaccccaaggaccctgccaactacatcctgcatgctgtgctggtgcacagcggggacaaccacggcggccactacgtggtgtacctgaaccccaagggagatggcaagtggtgcaagtttgatgatgatgtggtgagccgctgcaccaaggaggaggccatcgagcacaactatggaggccatgatgatgacctgtctgtgcgccactgcaccaatgcctacatgctggtgtacatccgggagagcaagctgtctgaggtgctgcaggccgtgacagaccatgacatcccccagcagctggtggagcggctgcaggaggagaagagaattgaggcccagaagaggaaggagcggcaggaggcccacctgtacatgcaggtgcagatcgtggccgaggaccagttctgtggccaccagggcaatgacatgtatgatgaggagaaggtgaagtacacagtgttcaaggtgctgaagaacagcagcctggccgagtttgtgcagagcctgagccagaccatgggcttcccccaggaccagatccggctgtggcccatgcaggcccggagcaatggcaccaagaggcctgccatgctggacaatgaagcagatggcaacaagaccatgattgagctgagtgacaatgaaaacccctggaccatcttcctggagaccgtggaccctgagctggccgccagcggggccaccctgcccaagtttgacaaggaccatgatgtgatgctgttcctgaagatgtatgaccccaagaccaggagcctgaactactgcggccacatctacacccccatcagctgcaagatccgggacctgctgcctgtgatgtgtgacagagctggcttcatccaggacaccagcctcatcctgtatgaggaggtgaagcccaacctgacagagcgcatccaggactatgatgtgtccctggacaaggccctggatgagctgatggatggagacatcatcgtgttccagaaggatgatcctgaaaatgacaacagcgagctgcccacagccaaggagtacttccgggacctgtaccaccgggtggatgtgatcttctgtgacaagaccatccccaatgaccccggctttgtggtgaccctgagcaacaggatgaactacttccaggtggccaagacagtggcccagaggctgaacacagaccccatgctgctgcagttcttcaagagccagggctacagagatggccctggcaaccccctgcggcacaactatgagggcaccctgcgggacctgctgcagttcttcaagccccggcagcccaagaagctgtactaccagcagctgaagatgaagatcacagactttgagaacagaagaagcttcaagtgcatctggctgaacagccagttccgggaggaggagatcaccctgtacccagacaagcacggctgtgtgcgggacctgctggaggagtgcaagaaggctgtggagctgggggagaaggccagcggcaagctgcggctgctggagatcgtgtcctacaagatcattggagtgcaccaggaggatgagctgctggagtgcctgagccctgccaccagcaggaccttcagaattgaggagatccccctggaccaggtggacatcgacaaggaaaatgagatgctggtgacagtggcccacttccacaaggaggtgtttggcaccttcggcatccccttcctgctgcgcatccaccagggcgagcacttccgggaggtgatgaagaggatccagagcctgctggacatccaggagaaggagtttgagaagttcaagtttgccatcgtgatgatgggccgccaccagtacatcaatgaagatgaatatgaggtgaacctgaaggactttgagccccagcccggcaacatgagccacccccggccctggctgggcctggaccacttcaacaaggcccccaagaggagccgctacacctacctggagaaggccatcaagatccacaactag

SEQ ID NO: 138523 - DNA, 1530 bp, Artificial Sequence
  derived and/or modified sequence
atggaggatgacacctcctggaggtctgaggccaccttccagttcaccgtggagcgcttcagccggctgtctgagagcgtgctgagccccccctgctttgtgaggaacctgccctggaagatcatggtgatgccccgcttctacccagaccggccccaccagaagtctgtgggcttcttcctgcagtgcaatgctgagagtgacagcacctcctggagctgccacgcccaggccgtgctgaagatcatcaactacagagatgatgagaagagcttcagccgccgcatcagccacctgttcttccacaaggaaaatgactggggcttcagcaacttcatggcctggagcgaggtgacagatcctgagaagggcttcattgatgatgacaaggtgacctttgaggtgtttgtgcaggctgatgcccctcatggagtggcctgggacagcaagaagcacacaggctacgtgggcctgaagaaccagggcgccacctgctacatgaacagcctgctgcagaccctcttcttcaccaaccagctgaggaaggctgtgtacatgatgcccacagaaggagatgacagcagcaagtctgtgcccctggccctgcagagggtcttctatgagctgcagcacagcgacaagcctgtgggcaccaagaagctgaccaagagctttggctgggagaccctggacagcttcatgcagcatgatgtgcaggagctgtgccgggtgctgctggacaacgtggagaacaagatgaagggcacctgtgtggagggcaccatccccaagctgttccggggcaagatggtgtcctacatccagtgcaaggaggtggactacagaagtgacagaagagaggactactatgacatccagctgagcatcaagggcaagaagaacatctttgagagctttgtggactatgtggccgtggagcagctggatggagacaacaagtatgatgctggggagcacggcctgcaggaggccgagaagggcgtgaagttcctgaccctgccccctgtgctgcacctgcagctgatgaggttcatgtatgacccccagacagaccagaacatcaagatcaatgacagatttgagttccctgagcagctgcccctggatgagttcctgcagaagacagaccccaaggaccctgccaactacatcctgcatgctgtgctggtgcacagcggggacaaccacggcggccactacgtggtgtacctgaaccccaagggagatggcaagtggtgcaagtttgatgatgatgtggtgagccgctgcaccaaggaggaggccatcgagcacaactacggcggccatgatgatgacctgtctgtgcgccactgcaccaatgcctacatgctggtgtacatccgggagagcaagctgactgtgggcggggccatcacccggcgggagaaggaccggggcagcgaggccgagggcgctgctggcagccccagcctgtatgccagcgctgacagcagaagaggccctgtgctgtggccaccccgggagtag

SEQ ID NO: 138524 - DNA, 3309 bp, Artificial Sequence
  derived and/or modified sequence
atgaaccaccagcagcagcagcagcagcagaaggccggcgagcagcagctgagtgagccagaagacatggagatggaggccggagatacagatgatccaccacggatcacccagaacccagtgataaatggcaatgttgccctgtccgacggacacaatactgctgaggaagacatggaagatgacacgtcctggcggtctgaggctacgttccagttcaccgtggaacgtttttcccggctcagcgaatccgtgttgtcgcccccctgctttgtaaggaatcttccatggaagatcatggtaatgccccgcttctaccctgatcgcccgcaccagaaatccgtaggattttttctgcagtgtaatgctgaaagtgacagcacctcttggagctgtcatgctcaggctgttcttaaaataattaattaccgcgacgacgagaagagcttctcgaggaggatctcacacctctttttccacaaggagaatgactgggggttttctaacttcatggcttggtccgaggttactgatcctgaaaaaggctttatcgatgatgacaaagtgacttttgaagtgtttgtccaagccgacgcaccacacggagtggcctgggactcgaagaaacataccgggtacgtaggcctcaagaatcagggagctacttgctacatgaatagcctactccagacacttttctttaccaaccagttgcgaaaggctgtgtacatgatgcctaccgaaggcgacgacagctcgaaatccgtgcctctggccctgcagagagtgttttacgaactacagcacagcgataaacctgtggggaccaagaagttgaccaaaagtttcggttgggagaccctcgattcctttatgcagcatgatgtgcaggagttgtgccgggtattattagacaacgttgagaataagatgaaaggaacatgcgtcgagggtaccattccaaaactgttcagaggcaaaatggtaagttacatccagtgcaaagaggtggactacagatcagaccggcgcgaagactattacgacatccaactttcaattaaggggaagaagaacatcttcgagtcctttgtggactacgtggcggttgaacagcttgacggagataacaaatacgacgctggagaacacggcctccaggaggccgagaaaggcgttaaatttctcactttacctcctgtgctacatctccagctgatgcgtttcatgtacgatccccagacagatcagaacattaagataaacgaccgcttcgagttccccgaacaactacccctagacgaattcctccaaaagaccgatcctaaagaccctgcaaactatatccttcatgccgttctagttcattctggggataaccacggcggccactatgttgtttaccttaacccaaagggggacgggaaatggtgtaagttcgatgacgatgtggtgtcccggtgtaccaaggaggaggccatcgaacataattacggtgggcatgacgatgatctcagtgttcggcactgtacaaatgcatacatgttggtgtacatccgggagagcaaattatcggaggtccttcaggctgtaacagaccacgatatcccacagcaactcgtcgagaggcttcaggaggagaagagaatcgaggctcagaaacggaaagagcgccaggaggctcatctgtacatgcaggtccagatcgttgccgaagaccagttctgtggacaccaggggaacgatatgtacgacgaggaaaaggtgaagtacactgtgtttaaagttctgaaaaattcgtccttggccgaatttgttcagtctctatctcagaccatggggtttcctcaggaccagattcggttgtggccaatgcaggcaagatcaaatgggactaagcggcctgctatgctggataacgaagcggatggcaataaaacgatgattgagctgtccgacaatgagaacccatggacaatattcttagagacagtagacccagagctcgctgcttccggcgcaacactgcctaaattcgataaggatcatgatgttatgctgttccttaaaatgtatgaccccaaaacacgcagcttaaactactgcgggcacatctatacacctatctcctgcaagataagggatctgcttcctgtaatgtgtgaccgagcgggcttcatacaggatacctcactgatcttgtacgaggaagtcaagcccaatctgacagagcgcatccaggactatgatgtttctctggataaagctttggatgagctgatggatggagacattatcgtctttcaaaaggacgatccagaaaatgataatagtgaactacccaccgcgaaggagtacttcagagacctgtaccaccgagtggacgtgattttttgcgacaagactattccaaatgaccctggttttgtggtgactctgagcaacagaatgaactacttccaggtcgccaagacggtggctcagagactgaacaccgatcccatgctgctgcagttcttcaagtcccaaggctatcgggatggcccagggaatccccttcggcacaattacgaggggaccctacgcgatctgctgcagttttttaagcctaggcagccgaagaaactctattaccaacagctcaagatgaagatcacagacttcgagaatcggaggtccttcaaatgtatatggctgaactcccagtttagagaggaagaaattaccttatacccggacaagcacgggtgcgtgagggatttgctcgaagaatgtaaaaaggccgttgagcttggcgaaaaagcctcaggcaaactgagactgctcgagattgtgagctacaagattatcggcgtccaccaggaggatgaactcctggagtgcctgagccctgcgacatcccgtactttcagaattgaagaaatccccctggaccaagttgacatagacaaggagaacgagatgctcgtgactgttgcccacttccataaggaagttttcggaacatttggaatacctttcttactgaggatacaccagggggagcatttccgggaggttatgaagaggatccaatcactgctagatatccaagaaaaagaattcgagaagtttaaatttgctatcgtaatgatgggaagacatcagtatatcaacgaggatgaatatgaagtgaacctgaaggacttcgagccacaacctggtaacatgagccacccccgcccgtggcttggcctggatcactttaataaggccccgaagaggagtcgatatacttacctggaaaaggctattaaaattcataactag

SEQ ID NO: 138525 - DNA, 3012 bp, Artificial Sequence
  derived and/or modified sequence
atggtgatgccccggttctaccccgaccggccccaccagaagagcgtgggattcttcctgcaatgtaacgccgaatccgattctacttcctggtcatgccatgctcaggcagtgctgaaaataattaactaccgggacgatgaaaaaagcttcagcaggagaatctcccacctctttttccacaaggagaacgactggggtttttctaactttatggcttggtcagaggtcaccgacccagagaaagggttcattgacgacgataaagtgacattcgaggtttttgtccaggctgacgcccctcacggggtcgcatgggatagcaaaaaacacacaggctacgtgggactaaaaaaccagggtgccacttgttacatgaactccttgctccagaccctatttttcaccaaccaattaaggaaggccgtgtatatgatgccaactgaaggcgacgactctagcaagtcggtgcctctggcattacagcgtgttttttacgagctgcagcactcggataaaccggtgggtacaaagaaactgacgaagagctttggctgggagaccctagattcctttatgcagcatgatgtgcaggaattgtgccgggttctgctggataacgtggaaaataaaatgaagggcacatgcgttgagggaaccattccaaagctctttcgcggtaagatggtttcttatatccaatgcaaagaggtggactataggagcgatcgcagggaagattactatgacattcagcttagtataaagggcaagaagaacatttttgagagcttcgttgattacgtcgctgtggaacagttagacggggacaataagtatgacgcgggtgagcatggcctccaagaagcagagaagggggtcaagtttctgactctgcccccggtcctccacttacaactcatgcgattcatgtacgatccccaaacagatcaaaacattaaaatcaacgataggttcgagtttcccgaacagctccctctggacgaatttctgcagaagaccgacccaaaagatccagctaactatatactgcatgctgtgctggtgcattctggggataatcacgggggccattatgtagtgtaccttaaccctaagggagatggtaaatggtgcaagtttgatgacgacgtggtgtcccgatgtactaaagaggaggctatcgagcacaactacggggggcacgatgacgacctgtccgtcagacactgtaccaacgcatacatgctggtgtacattagggaatccaagctctcggaagtcctacaggcagtcacagaccacgacatccctcagcagctagtggagagactgcaagaagaaaaaaggatcgaagcccaaaagcgcaaggaacggcaggaagcccatttgtacatgcaggtgcagatcgtggcggaggaccagttctgtgggcatcagggcaacgacatgtatgacgaggaaaaggtgaagtacacagtgttcaaggtgctaaaaaattcgagcctggcggagtttgttcagagcttaagccagaccatggggttcccgcaggaccagatcaggctttggccaatgcaggctagatctaatggcactaaacgacccgccatgctagacaacgaagccgacggtaacaaaaccatgatcgagctgagcgataatgaaaacccttggactattttcctagagactgttgaccccgagctggccgcgagcggtgccacacttcctaaattcgataaggatcatgatgtcatgttatttctcaagatgtatgatcccaaaactagatctttgaattactgcggtcatatctatacccctatttcctgcaagattagagatcttttgccagtcatgtgcgatcgcgccggattcatccaggatactagccttattctatatgaggaagtcaagccaaatctgactgagcggatccaagactatgacgtttcactggacaaagccctggatgagctgatggatggcgacatcatcgttttccagaaggatgaccctgaaaacgacaactctgagctgcctacggccaaggagtactttcgcgacttgtaccatagagtggatgtgattttttgcgacaaaacaattcccaatgaccccggctttgtagtgactctctctaatcgcatgaactactttcaagtcgccaagactgtggcacagcgcttaaacacagaccctatgctgctccagttttttaagtcacagggctaccgggacgggcctgggaatcctctccggcacaactacgagggcacccttcgcgacctgctgcagttcttcaaaccacggcagcccaaaaagttatactaccagcaattgaaaatgaaaatcaccgacttcgagaatcgccggagttttaaatgtatctggctcaattcacagttccgagaggaggagattaccctctaccctgacaaacacggctgtgtgcgtgatctgctggaggaatgtaaaaaagctgttgaactcggggagaaggccagtggcaagttgcgtcttctggaaatagttagttataagattatcggcgtccaccaagaagacgagctgctcgaatgcttgtctccagcgacttctcggacctttcggatcgaagagattcccctggaccaggtggatattgataaagagaatgaaatgttggtgactgtcgctcactttcacaaggaggtttttggaacctttggtatcccattcttactgagaatccatcagggggagcacttccgtgaggtcatgaaaaggatccaaagtctactcgatatccaggaaaaggaatttgaaaagtttaaattcgccatcgtgatgatggggcgccatcagtacattaacgaggatgagtacgaagtgaacctgaaggactttgagcctcagcccgggaacatgagtcacccgaggccttggctgggactggaccactttaataaggcccccaagcgtagccggtatacctacctcgaaaaagccatcaagattcacaactag

SEQ ID NO: 138526 - DNA, 1530 bp, Artificial Sequence
  derived and/or modified sequence
atggaggacgacaccagctggcggagcgaggccaccttccagttcactgtcgagcgctttagtagactcagtgagtctgttctgagtcccccctgttttgtccggaatctcccctggaaaatcatggtgatgccccggttctaccctgaccggccgcaccagaagtctgtaggctttttcctgcagtgtaatgccgaatcagacagcacatcgtggtcctgtcatgctcaggcagtgctcaaaattattaattatcgggatgatgagaaatctttctctagacgcataagtcatttatttttccacaaagagaatgactggggattctcaaatttcatggcttggtcggaggtgacggacccagagaaaggcttcatagatgacgacaaggtgaccttcgaggtctttgtccaagcagatgcgccacacggcgtggcctgggactcaaaaaaacacacaggctacgtgggtcttaagaaccagggagcaacatgctacatgaattccctgctacagactcttttttttactaatcagcttcgaaaggctgtctatatgatgccgaccgaaggagatgactcttccaagtctgttcctctggctcttcagcgggtgttctacgagctacagcacagcgataagccggtgggtacaaaaaagctaaccaagtcttttgggtgggaaacacttgactcctttatgcagcacgatgttcaggagctctgccgcgtcctgttggacaacgtggagaacaaaatgaaggggacctgtgtcgagggaactatcccaaaactgtttagggggaagatggtcagctacattcagtgcaaggaagtggattatcgcagtgatcggcgggaggactactatgatatacagctgagcatcaagggtaaaaaaaatatttttgagtccttcgtggactatgtggccgtggagcagttagatggagataacaagtacgacgccggcgagcacggcttacaggaagcagagaagggggtcaagtttctgacacttccgcctgtcttacatctgcagctgatgagatttatgtacgaccctcaaacagaccagaacatcaagattaacgaccgattcgaattccccgaacaattacctctggacgaatttctacagaaaaccgatccaaaggatcccgccaactacatcctgcacgcagtcttggtgcacagtggcgacaatcatgggggccactacgtggtgtacctgaacccaaagggtgatggaaagtggtgcaaattcgacgacgacgtcgtcagcagatgtacaaaggaagaggccatcgagcacaactatggaggccacgatgacgacctgtctgtgagacattgcactaacgcatatatgttggtgtatatccgggaaagcaagctgaccgtaggtggtgcaatcacccgcagggaaaaggatcggggctctgaggccgaaggcgcagcggggtccccaagtttgtacgcatcagcggatagtagacgcggccctgtgctttggccgcctcgtgaatag

SEQ ID NO: 138527 - DNA, 3309 bp, Artificial Sequence
  derived and/or modified sequence
atgaatcatcagcagcagcaacagcagcagaaggccggagaacagcagcttagcgagccagaagatatggaaatggaagccggagacacagatgacccccctaggatcacccaaaaccctgtgatcaacggcaatgtggcactgtcagacgggcataatacggccgaggaagatatggaggacgacacttcttggaggtcagaggcaacttttcagtttactgtggagaggttttctagactgtccgagtcagtgctgtctcccccatgttttgtccgcaaccttccatggaaaattatggtgatgcccagattttatcccgacaggccccaccaaaagtctgtgggcttctttttacagtgtaacgccgagagcgacagtactagctggtcttgccatgcgcaggcagtgttaaagatcataaactatagagacgatgagaagtctttttctaggagaatctctcaccttttttttcataaggagaacgattggggttttagcaactttatggcctggtccgaagttaccgatcccgagaaggggttcattgatgatgacaaggttacctttgaagtcttcgtgcaggccgatgcaccgcacggtgtggcttgggacagcaagaaacacactggctacgtgggactgaagaaccagggcgctacctgttacatgaacagtcttttgcagactctgttcttcacaaaccagttacgcaaggcagtctacatgatgcccacagaaggcgacgactcctccaaatctgtaccgctagctctgcagagagtgttctacgaacttcagcacagcgataaacctgtggggactaaaaaattgaccaaaagcttcggatgggaaaccctcgatagctttatgcagcacgacgttcaggagctgtgccgagtgttgttagacaacgttgaaaacaagatgaagggaacctgtgtggaggggacgatccctaagttattcagaggcaagatggtgtcatatatccagtgcaaggaggtggactataggagcgacaggagggaagattactatgacatccagctaagcataaaggggaagaaaaacatcttcgagtcgttcgtggattacgtcgctgtagaacagttagacggcgataacaaatatgacgcaggcgaacacggcctgcaggaggcagagaaaggtgtgaagttcctcacgcttcctcctgtcctgcaccttcagctgatgcgattcatgtacgacccgcagactgaccagaacattaaaatcaatgaccgcttcgagttccccgaacagctccctctcgatgagtttctgcagaaaacagatcctaaggaccctgccaactatatattgcacgctgttctagtccattccggagataatcatggcggacattatgtcgtgtacctgaacccaaaaggcgacggcaagtggtgcaagttcgacgatgatgtggtaagtaggtgtactaaggaggaagctatcgaacacaattacggcggtcacgacgacgacctgagcgtgcgacactgcacaaatgcatacatgctcgtctatattcgcgagtcaaagttatccgaggtgctgcaagccgtgacagatcatgacatcccacagcagctggttgaacggttgcaagaggaaaaaagaatagaggcccaaaagcgaaaggagaggcaagaagcacatctgtacatgcaggtccagatcgtggccgaggaccaattctgcggtcaccaaggcaacgacatgtatgatgaggagaaggtaaagtatactgtatttaaggtcctgaagaacagctcacttgctgaattcgttcaatcactctctcagacaatgggcttcccacaggaccagatccgtctatggccaatgcaggctaggtctaacggcacgaaacgaccagcgatgctggataacgaggctgatgggaacaagaccatgatcgaattgagcgacaacgagaacccatggactatctttctggaaacagtagatcccgagctggcggcatcgggcgcaacactccccaagtttgacaaggatcacgacgtgatgctgttcctaaaaatgtacgaccccaagacacgatccctcaattactgcggacatatctacacacctatctcctgcaagattcgggacctgctgcccgtcatgtgcgaccgcgcaggatttattcaggatacgagcctgatactctacgaggaggtaaagcccaacctcaccgaaaggatccaggactatgatgttagtctggataaggctcttgatgaactcatggacggtgatatcatcgtgttccagaaagacgatccagaaaacgataactccgaactgcctacagcgaaagaatattttagggacctgtaccatcgggtggatgtgatcttctgcgacaagaccatccctaacgacccaggctttgtcgtgactctgtccaatcgtatgaattactttcaagtcgctaaaacggtggctcagcgactgaacacggaccctatgctgctccagttcttcaaatctcaagggtatcgtgacggtccaggaaacccactgagacacaattacgaaggcaccctccgagacttgttgcagttctttaaacctaggcagccaaaaaaactgtactaccagcaactgaaaatgaaaatcactgactttgagaatcgaaggtcctttaagtgtatctggttgaactcccaattccgcgaagaggagataacgctgtacccggacaagcacggttgtgtgagggatttgcttgaagagtgtaagaaggccgttgaattgggggagaaagccagcggtaaactgagactactcgaaattgtgagctataagatcatcggagtacatcaggaggacgagcttctggagtgtctgagccctgcaaccagccggacatttcgaattgaagagatccccctggaccaggtcgatatcgacaaagagaatgagatgctggtcaccgtggcacacttccacaaggaggtgttcgggacattcggcatcccgtttctcctgaggatccatcagggcgagcactttagagaggtgatgaaaagaatacagagtttgctggatattcaagagaaagagtttgagaagtttaaatttgctatagtgatgatgggacggcatcagtacatcaacgaggatgaatatgaggttaatctgaaagactttgaaccccagcctggaaatatgagccacccgaggccctggctgggtctcgatcatttcaacaaagcgccaaagcggtctcgctacacctatttagaaaaagcaattaaaatacataattag

SEQ ID NO: 138528 - DNA, 3012 bp, Artificial Sequence
  derived and/or modified sequence
atggttatgcctagattttaccctgatagacctcatcagaaatctgttggcttcttccttcagtgtaatgccgagtctgactctaccagctggtcttgccatgctcaggccgtattgaaaattatcaattacagagacgatgagaaaagtttctccagacgtatctcgcacttgttctttcataaagaaaatgattggggcttctccaacttcatggcatggagcgaagtcacagatccagagaaaggtttcatagatgatgataaggtcacattcgaggtctttgtgcaggctgatgcgcctcatggcgtggcgtgggacagcaaaaagcataccgggtacgttggccttaaaaaccaaggagccacgtgctacatgaatagcctccttcagacactgttttttaccaatcagttaagaaaggcagtttatatgatgccgacagagggagacgatagtagcaaaagtgtccccttggccttgcagagggtcttttacgaactgcagcattctgataagccagtaggtacaaaaaaactaactaagagctttggctgggagacacttgattcatttatgcagcacgacgtacaagaattgtgccgcgtgcttttagataatgttgaaaataaaatgaaaggcacgtgtgtggaaggcacaatccctaagttgttcaggggaaagatggtgtcatatatccaatgcaaagaggtggactatcgaagcgacaggcgggaagattattacgacatacagttaagtattaaaggtaaaaaaaatattttcgagtctttcgtcgactacgttgcagtcgagcagctggatggggataacaaatacgatgcaggcgagcatggtttacaggaggcggaaaagggcgtgaaatttttgacgctcccccctgttcttcacctccagctgatgcgcttcatgtacgatccacagaccgaccagaatatcaagatcaacgataggttcgagttcccagaacaactgccacttgatgaatttctgcagaagacggatccaaaagacccggcaaactatattcttcatgcggtcctggttcattcaggcgacaaccatggaggtcattacgttgtgtacttgaatccaaagggagatggcaaatggtgtaagtttgacgatgatgtcgtgagcagatgcaccaaagaagaagcaatcgagcataattatggcggacacgatgatgaccttagcgtgcgtcattgtacaaatgcctacatgcttgtgtatattcgtgagagtaaactgtctgaggtcctccaggcggtcaccgatcacgatatcccgcagcagctggtggagcggttgcaggaagaaaaacggatcgaggctcagaaacggaaggagaggcaggaggcgcacctctacatgcaagtacagatcgtcgctgaagatcagttttgtggccaccaggggaatgacatgtatgacgaggaaaaagttaagtatacagttttcaaagtgttgaagaactcaagcctggcagaatttgtgcagtctttatcacagacaatgggttttccccaggaccagattcgtctctggccaatgcaagccagaagtaatggcacaaagaggcctgcaatgttagacaatgaagcagatggaaataaaacaatgatcgagttgtctgataatgagaacccttggacaatctttctggaaactgttgatcctgaactcgcagcgtctggtgcaaccctgcctaaatttgataaggaccacgatgtgatgctgttcctcaagatgtacgatcccaagacccggtctctcaactattgcgggcacatctatacccccatatcctgtaagataagggacttgctgcccgtgatgtgtgatagggcaggatttatccaggacacctccctgattctatatgaggaagttaaacccaatcttacagagcggattcaggattacgatgttagcctcgataaggctctcgacgagttgatggacggcgacatcatcgtttttcagaaagacgatcctgaaaacgacaatagcgagctgcccactgccaaggagtacttcagggacctgtaccacagagttgacgtaattttctgcgataagacgatcccgaacgaccccggttttgtggtcactctcagtaaccggatgaattacttccaggttgccaaaaccgtggcccaacggctgaataccgatcctatgctgctccagttcttcaagtcacaggggtatagagatggcccaggtaacccgctgcgtcacaactatgagggcacactgcgcgacttgctgcagttcttcaaacctcggcagccaaagaaactttattaccagcagttaaagatgaaaattactgactttgagaataggcggtctttcaagtgcatttggttgaattctcagtttcgcgaggaggagatcactctttatcccgataaacatggctgtgtgagggatctgctcgaggagtgcaagaaggctgtggaactaggcgaaaaagccagtggcaagctgaggttgctcgaaattgtcagctacaagatcattggcgttcatcaggaggatgaactcctcgaatgcctgagcccagctacttcacgcacctttcgcatcgaagagatccccctggatcaggtcgatatagacaaagagaacgaaatgcttgtaaccgtggcccactttcacaaagaggtgtttggcacatttggaatccctttcctcctgagaattcaccagggcgagcactttcgggaagtgatgaaaaggattcagagcctgctcgatatccaggagaaggaattcgaaaaattcaaatttgcgatcgtgatgatgggaagacaccagtacattaatgaggatgaatatgaagtgaacctgaaggatttcgagccgcagccaggcaacatgagccatccgagaccttggttaggccttgaccattttaataaggccccaaagcggtcccggtacacgtaccttgaaaaggcgatcaaaatccacaattag

SEQ ID NO: 138529 - DNA, 1530 bp, Artificial Sequence
  derived and/or modified sequence
atggaggacgacacttcttggcgcagtgaagccaccttccaattcactgtggagcggtttagccggctttccgagtcagtcctttcccctccttgcttcgtcagaaacttaccttggaaaatcatggtcatgccaaggttttaccctgacagacctcaccagaaaagtgtcggcttttttctgcagtgtaacgccgagagtgactccactagctggtcctgtcatgcgcaggccgtactgaaaatcattaactaccgtgacgatgaaaagtcattctcacggaggatatcccacctgttctttcacaaagaaaatgactgggggttctctaactttatggcctggagcgaagtgacagaccctgaaaaaggctttatagatgatgataaagtcactttcgaggtgtttgttcaggccgacgcccctcacggtgttgcgtgggatagtaagaaacatacgggttatgtcggcctgaaaaaccaaggcgctacatgttatatgaatagcctcctccaaacccttttttttacaaatcagttgaggaaggctgtctatatgatgccaacagaaggtgacgattcctccaagtctgtgcccctcgccttacagcgcgtcttctacgagctgcagcattctgacaaaccagttggtactaaaaagctcacaaagagcttcgggtgggaaaccctggattctttcatgcagcacgatgttcaggagctctgtcgggtgttacttgataacgtagaaaacaagatgaaaggcacctgtgttgaaggaacgatccccaagctgtttaggggtaagatggtgagctatatccagtgcaaagaagtggactataggagcgacaggcgggaagactactacgatatccagctatccattaaggggaagaagaacatcttcgagtcctttgtcgactacgtggccgttgaacaactggatggagataacaagtacgatgcaggcgagcacgggcttcaggaagccgagaaaggagtgaaatttctcacattgcccccagtgctacacctgcagctgatgagattcatgtatgacccacagacagaccagaacatcaagattaacgacagatttgaattccctgaacagctaccactggacgagttcctgcagaagaccgaccctaaagatcctgccaattacatcttgcatgcggtgctcgtacacagcggcgataatcacggagggcactacgtcgtgtatttgaatcctaaaggggacggtaagtggtgcaagtttgatgacgacgtcgtgtctcggtgtacaaaagaggaggcgattgagcataattatggcggtcatgacgatgacttgtctgttcgacattgcacaaacgcatatatgttggtctacatccgagagtcaaaactgaccgtggggggtgccattacccggagagagaaggacagagggtctgaagcagagggggctgcagggtcgcccagtctgtacgcctctgcagattctagacgtgggccagtcctctggcctccccgagagtag

SEQ ID NO: 138530 - DNA, 5412 bp, Artificial Sequence
  derived and/or modified sequence
gtacgtgcgcgtctccctgccgccgccgccgcccgccgcgggccgccccggggccgccgtcgccgacgacgcgcgggaggaggaggaggaggccgccccgccgccgccgccgccgccgccgccccggctcgccgccgcccgcccgccgggctcgcagccccggcccccggccgcaggcgaggcccaggccgcggccgacatgaaccaccagcagcagcagcagcagcagaaagcgggcgagcagcagttgagcgagcccgaggacatggagatggaagcgggagatacagatgacccaccaagaattactcagaaccctgtgatcaatgggaatgtggccctgagtgatggacacaacaccgcggaggaggacatggaggatgacaccagttggcgctccgaggcaacctttcagttcactgtggagcgcttcagcagactgagtgagtcggtccttagccctccgtgttttgtgcgaaatctgccatggaagattatggtgatgccacgcttttatccagacagaccacaccaaaaaagcgtaggattctttctccagtgcaatgctgaatctgattccacgtcatggtcttgccatgcacaagcagtgctgaagataataaattacagagatgatgaaaagtcgttcagtcgtcgtattagtcatttgttcttccataaagaaaatgattggggattttccaattttatggcctggagtgaagtgaccgatcctgagaaaggatttatagatgatgacaaagttacctttgaagtctttgtacaggcggatgctccccatggagttgcgtgggattcaaagaagcacacaggctacgtcggcttaaagaatcagggagcgacttgttacatgaacagcctgctacagacgttatttttcacgaatcagctacgaaaggctgtgtacatgatgccaaccgagggggatgattcgtctaaaagcgtccctttagcattacaaagagtgttctatgaattacagcatagtgataaacctgtaggaacaaaaaagttaacaaagtcatttgggtgggaaactttagatagcttcatgcaacatgatgttcaggagctttgtcgagtgttgctcgataatgtggaaaataagatgaaaggcacctgtgtagagggcaccatacccaaattattccgcggcaaaatggtgtcctatatccagtgtaaagaagtagactatcggtctgatagaagagaagattattatgatatccagctaagtatcaaaggaaagaaaaatatatttgaatcatttgtggattatgtggcagtagaacagctcgatggggacaataaatacgacgctggggaacatggcttacaggaagcagagaaaggtgtgaaattcctaacattgccaccagtgttacatctacaactgatgagatttatgtatgaccctcagacggaccaaaatatcaagatcaatgataggtttgaattcccagagcagttaccacttgatgaatttttgcaaaaaacagatcctaaggaccctgcaaattatattcttcatgcagtcctggttcatagtggagataatcatggtggacattatgtggtttatctaaaccccaaaggggatggcaaatggtgtaaatttgatgacgacgtggtgtcaaggtgtactaaagaggaagcaattgagcacaattatgggggtcacgatgacgacctgtctgttcgacactgcactaatgcttacatgttagtctacatcagggaatcaaaactgagtgaagttttacaggcggtcaccgaccatgatattcctcagcagttggtggagcgattacaagaagagaaaaggatcgaggctcagaagcggaaggagcggcaggaagcccatctctatatgcaagtgcagatagtcgcagaggaccagttttgtggccaccaagggaatgacatgtacgatgaagaaaaagtgaaatacactgtgttcaaagtattgaagaactcctcgcttgctgagtttgttcagagcctctctcagaccatgggatttccacaagatcaaattcgattgtggcccatgcaagcaaggagtaatggaacaaaacgaccagcaatgttagataatgaagccgacggcaataaaacaatgattgagctcagtgataatgaaaacccttggacaatattcctggaaacagttgatcccgagctggctgctagtggagcgaccttacccaagtttgataaagatcatgatgtaatgttatttttgaagatgtatgatcccaaaacgcggagcttgaattactgtgggcatatctacacaccaatatcctgtaaaatacgtgacttgctcccagttatgtgtgacagagcaggatttattcaagatactagccttatcctctatgaggaagttaaaccgaatttaacagagagaattcaggactatgacgtgtctcttgataaagcccttgatgaactaatggatggtgacatcatagtatttcagaaggatgaccctgaaaatgataacagtgaattacccaccgcaaaggagtatttccgagatctctaccaccgcgttgatgtcattttctgtgataaaacaatccctaatgatcctggatttgtggttacgttatcaaatagaatgaattattttcaggttgcaaagacagttgcacagaggctcaacacagatccaatgttgctgcagtttttcaagtctcaaggttatagggatggcccaggtaatcctcttagacataattatgaaggtactttaagagatcttctacagttcttcaagcctagacaacctaagaaactttactatcagcagcttaagatgaaaatcacagactttgagaacaggcgaagttttaaatgtatatggttaaacagccaatttagggaagaggaaataacactatatccagacaagcatgggtgtgtccgggacctgttagaagaatgtaaaaaggccgtggagcttggggagaaagcatcagggaaacttaggctgctagaaattgtaagctacaaaatcattggtgttcatcaagaagatgaactattagaatgtttatctcctgcaacgagccggacgtttcgaatagaggaaatccctttggaccaggtggacatagacaaagagaatgagatgcttgtcacagtggcgcatttccacaaagaggtcttcggaacgttcggaatcccgtttttgctgaggatacaccagggcgagcattttcgagaagtgatgaagcgaatccagagcctgctggacatccaggagaaggagtttgagaagtttaaatttgcaattgtaatgatgggccgacaccagtacataaatgaagacgagtatgaagtaaatttgaaagactttgagccacagcccggtaatatgtctcatcctcggccttggctagggctcgaccacttcaacaaagccccaaagaggagtcgctacacttaccttgaaaaggccattaaaatccataactgatttccaagctggtgtgttcaaggcgaggacggtgtgtgggtggccccttaacagcctagaactttggtgcacgtgccctctagccgaagtcttcagcaagaggattcgctgctggtgttaattttattttattgaggctgttcagtttggcttctctgtatctattgactgccctttttgagcaaaatgaagatgtttttataaagcttggatgccaatgagagttattttatggtaaccacagtgcaaggcaactgtcagcgcaatgggggagaagaggttagtggatcgggggtccctggctcaaggtctctgggctgtccctagtgggcacgagtggctcggctgccttcctggggtcccgtgcaccagccctgcagctagcaagtcttgtgtttaggctcgtctgacctatttccttcagttatactttcaatgaccttttgtgcatctgttaaggcaaaacagagaaactcacaacctaataaatagcgctcttcccttcattgtgtgcattgtcggcccttcctcgggttctcctcctccagctgcctgggggctttttaataaacttgtctcacctcgtcagccactactgtctgcagcccctttgcaaagtggatgcactgaatacagtccggacagacattgtgggggtctttttattaaatcaagaacattgttaaattcaattaaggtttactctgctgccttggcagacttacgatctcaacagttcatacgagcaggtgaaaggattataaatagaatttcgttaaagtggaacagacgacaagaaagccttttagcaagagggcatgctcactagtggttagtaagctgtcgactttgtaaaaaagttaaaaatgaaaaaaaaaggaaaaatgaattgtatatttaatgaatgaacatgtacaatttgccactgggaggaggttcctttttgttgggtgagtctgcaagtgaatttcactgatgttgatattcattgtgtgtagttttatttcggtcccagccccgtttccttttattttggagctaatgccagctgcgtgtctagttttgagtgcagtaaaatagaatcagcaaatcactcttatttttcatccttttccggtattttttgggttgtttctgtgggagcagtgtacaccaactcttcctgtatattgcctttttgctggaaaatgttgtatgttgaataaaattttctataaaaattataattcagtgagttacgtggaagtggaggaagatttctactctccctggaaacaggcctgggaaaccttggcatttgtaacaaggtttcactgagatgtacttttccttctaattccgttttgcgggggcagggtctcttgtttctttttttttttttttttttttttagcctctaactagtcacatttactcttaagaaatgaaaggttttccaggagagaactgtgtacaaataaggtgactggagatgtgacctgatgtgtcacgaggcccttcggggcggcaggcgctatcgtgggcgtggtccttgcaccgtcccatcggccttgccttccagctccgtggcacggtttcctggtctttgggccagtgtgtaccttggagtgacttcctttctcaacttccactgcagtgtgtgtgccttctgctctgagagctgccttgtgacccgtgtgatagaaagcagggagtgagggtccccgcggacctggcccttccctccttcctcccccagaaagaggagttagagcaggggtgcgagagccgttcgctgtgggtttgtctttgaacaaacattaaggtgtcttgtttttgttctgggctgggggttggctgtagtcttaggtaactgaaagttcctactctcccttaaggtattaaatgactctttttccaaagaa

SEQ ID NO: 138531 - DNA, 3554 bp, Artificial Sequence
  derived and/or modified sequence
gatgtgggtgagagaacctcccccatcccccagcagaggccactgcagagccatgcagagatggctgggaaccacaggcttgggctggaagcgggagatacagatgacccaccaagaattactcagaaccctgtgatcaatgggaatgtggccctgagtgatggacacaacaccgcggaggaggacatggaggatggggagtaacggggcagttgaaagaaaccatcagtcacgggctgcaccaccagaaggactgctgttcagacctcctgccaaaagttcagcctccatgagaaactgcagccgtagttgagagttctctcacagtgcggtttacccctggcagctggctgaggcaatatctgaggaagacaccagttggcgctccgaggcaacctttcagttcactgtggagcgcttcagcagactgagtgagtcggtccttagccctccgtgttttgtgcgaaatctgccatggaagattatggtgatgccacgcttttatccagacagaccacaccaaaaaagcgtaggattctttctccagtgcaatgctgaatctgattccacgtcatggtcttgccatgcacaagcagtgctgaagataataaattacagagatgatgaaaagtcgttcagtcgtcgtattagtcatttgttcttccataaagaaaatgattggggattttccaattttatggcctggagtgaagtgaccgatcctgagaaaggatttatagatgatgacaaagttacctttgaagtctttgtacaggcggatgctccccatggagttgcgtgggattcaaagaagcacacaggctacgtcggcttaaagaatcagggagcgacttgttacatgaacagcctgctacagacgttatttttcacgaatcagctacgaaaggctgtgtacatgatgccaaccgagggggatgattcgtctaaaagcgtccctttagcattacaaagagtgttctatgaattacagcatagtgataaacctgtaggaacaaaaaagttaacaaagtcatttgggtgggaaactttagatagcttcatgcaacatgatgttcaggagctttgtcgagtgttgctcgataatgtggaaaataagatgaaaggcacctgtgtagagggcaccatacccaaattattccgcggcaaaatggtgtcctatatccagtgtaaagaagtagactatcggtctgatagaagagaagattattatgatatccagctaagtatcaaaggaaagaaaaatatatttgaatcatttgtggattatgtggcagtagaacagctcgatggggacaataaatacgacgctggggaacatggcttacaggaagcagagaaaggtgtgaaattcctaacattgccaccagtgttacatctacaactgatgagatttatgtatgaccctcagacggaccaaaatatcaagatcaatgataggtttgaattcccagagcagttaccacttgatgaatttttgcaaaaaacagatcctaaggaccctgcaaattatattcttcatgcagtcctggttcatagtggagataatcatggtggacattatgtggtttatctaaaccccaaaggggatggcaaatggtgtaaatttgatgacgacgtggtgtcaaggtgtactaaagaggaagcaattgagcacaattatgggggtcacgatgacgacctgtctgttcgacactgcactaatgcttacatgttagtctacatcagggaatcaaaactgagtgaagttttacaggcggtcaccgaccatgatattcctcagcagttggtggagcgattacaagaagagaaaaggatcgaggctcagaagcggaaggagcggcaggaagcccatctctatatgcaagtgcagatagtcgcagaggaccagttttgtggccaccaagggaatgacatgtacgatgaagaaaaagtgaaatacactgtgttcaaagtattgaagaactcctcgcttgctgagtttgttcagagcctctctcagaccatgggatttccacaagatcaaattcgattgtggcccatgcaagcaaggagtaatggaacaaaacgaccagcaatgttagataatgaagccgacggcaataaaacaatgattgagctcagtgataatgaaaacccttggacaatattcctggaaacagttgatcccgagctggctgctagtggagcgaccttacccaagtttgataaagatcatgatgtaatgttatttttgaagatgtatgatcccaaaacgcggagcttgaattactgtgggcatatctacacaccaatatcctgtaaaatacgtgacttgctcccagttatgtgtgacagagcaggatttattcaagatactagccttatcctctatgaggaagttaaaccgaatttaacagagagaattcaggactatgacgtgtctcttgataaagcccttgatgaactaatggatggtgacatcatagtatttcagaaggatgaccctgaaaatgataacagtgaattacccaccgcaaaggagtatttccgagatctctaccaccgcgttgatgtcattttctgtgataaaacaatccctaatgatcctggatttgtggttacgttatcaaatagaatgaattattttcaggttgcaaagacagttgcacagaggctcaacacagatccaatgttgctgcagtttttcaagtctcaaggttatagggatggcccaggtaatcctcttagacataattatgaaggtactttaagagatcttctacagttcttcaagcctagacaacctaagaaactttactatcagcagcttaagatgaaaatcacagactttgagaacaggcgaagttttaaatgtatatggttaaacagccaatttagggaagaggaaataacactatatccagacaagcatgggtgtgtccgggacctgttagaagaatgtaaaaaggccgtggagcttggggagaaagcatcagggaaacttaggctgctagaaattgtaagctacaaaatcattggtgttcatcaagaagatgaactattagaatgtttatctcctgcaacgagccggacgtttcgaatagaggaaatccctttggaccaggtggacatagacaaagagaatgagatgcttgtcacagtggcgcatttccacaaagaggtcttcggaacgttcggaatcccgtttttgctgaggatacaccagggcgagcattttcgagaagtgatgaagcgaatccagagcctgctggacatccaggagaaggagtttgagaagtttaaatttgcaattgtaatgatgggccgacaccagtacataaatgaagacgagtatgaagtaaatttgaaagactttgagccacagcccggtaatatgtctcatcctcggccttggctagggctcgaccacttcaacaaagccccaaagaggagtcgctacacttaccttgaaaaggccattaaaatccataactgatttccaagctggtgtgttcaaggcgaggacggtgtgtgggtggccccttaacagccta

SEQ ID NO: 138532 - DNA, 1966 bp, Artificial Sequence
  derived and/or modified sequence
aagaacaagattgcactctgagagaaggaaggcatggtgaagaggtggtgttgtggtgggccttaaagtaggcttaggacttgagctcggggatttggagcgggagatacagatgacccaccaagaattactcagaaccctgtgatcaatgggaatgtggccctgagtgatggacacaacaccgcggaggaggacatggaggatgacaccagttggcgctccgaggcaacctttcagttcactgtggagcgcttcagcagactgagtgagtcggtccttagccctccgtgttttgtgcgaaatctgccatggaagattatggtgatgccacgcttttatccagacagaccacaccaaaaaagcgtaggattctttctccagtgcaatgctgaatctgattccacgtcatggtcttgccatgcacaagcagtgctgaagataataaattacagagatgatgaaaagtcgttcagtcgtcgtattagtcatttgttcttccataaagaaaatgattggggattttccaattttatggcctggagtgaagtgaccgatcctgagaaaggatttatagatgatgacaaagttacctttgaagtctttgtacaggcggatgctccccatggagttgcgtgggattcaaagaagcacacaggctacgtcggcttaaagaatcagggagcgacttgttacatgaacagcctgctacagacgttatttttcacgaatcagctacgaaaggctgtgtacatgatgccaaccgagggggatgattcgtctaaaagcgtccctttagcattacaaagagtgttctatgaattacagcatagtgataaacctgtaggaacaaaaaagttaacaaagtcatttgggtgggaaactttagatagcttcatgcaacatgatgttcaggagctttgtcgagtgttgctcgataatgtggaaaataagatgaaaggcacctgtgtagagggcaccatacccaaattattccgcggcaaaatggtgtcctatatccagtgtaaagaagtagactatcggtctgatagaagagaagattattatgatatccagctaagtatcaaaggaaagaaaaatatatttgaatcatttgtggattatgtggcagtagaacagctcgatggggacaataaatacgacgctggggaacatggcttacaggaagcagagaaaggtgtgaaattcctaacattgccaccagtgttacatctacaactgatgagatttatgtatgaccctcagacggaccaaaatatcaagatcaatgataggtttgaattcccagagcagttaccacttgatgaatttttgcaaaaaacagatcctaaggaccctgcaaattatattcttcatgcagtcctggttcatagtggagataatcatggtggacattatgtggtttatctaaaccccaaaggggatggcaaatggtgtaaatttgatgacgacgtggtgtcaaggtgtactaaagaggaagcaattgagcacaattatgggggtcacgatgacgacctgtctgttcgacactgcactaatgcttacatgttagtctacatcagggaatcaaaactgacagttggtggagcgattacaagaagagaaaaggatcgaggctcagaagcggaaggagcggcaggaagcccatctctatatgcaagtgcagatagtcgcagaggaccagttttgtggccaccaagggaatgacatgtacgatgaagaaaaagtgaaatacactgtgttcaaagtattgaagaactcctcgcttgctgagtttgttcagagcctctctcagaccatgggatttccacaagatcaaattcgattgtggcccatgcaagcaaggagtaatggaacaaaacgaccagcaatgttagataatgaagccgacggcaataaaacaatgattgagctcagtgataatgaaaacccttggacaatattcctg

SEQ ID NO: 138533 - protein, 408 aa, Artificial Sequence
  derived and/or modified sequence
MHLYKPACADIPSPKLGLPKSSESALKCRWHLAVTKTQPQAACKPVRPSGAAEQKYVEKFLRVHGISLQETTRAETGMAYRNLGKSGLRVSCLGLGTWVTFGGQISDEVAERLMTIAYESGVNLFDTAEVYAAGKAEVILGSIIKKKGWRRSSLVITTKLYWGGKAETERGLSRKHIIEGLKGSLQRLQLEYVDVVFANRPDSNTPMEEIVRAMTHVINQGMAMYWGTSRWSAMEIMEAYSVARQFNMIPPVCEQAEYHLFQREKVEVQLPELYHKIGVGAMTWSPLACGIISGKYGNGVPESSRASLKCYQWLKERIVSEEGRKQQNKLKDLSPIAERLGCTLPQLAVAWCLRNEGVSSVLLGSSTPEQLIENLGAIQVLPKMTSHVVNEIDNILRNKPYSKKDYRS

SEQ ID NO: 138534 - DNA, 1227 bp, Artificial Sequence
  derived and/or modified sequence
atgcatctgtacaagcctgcttgcgcagacatcccaagtccgaagctgggcctgcctaagtcttcggagtcggcactgaagtgtagatggcacctcgcagtgacaaagacccagccgcaggccgcatgtaaacctgttagaccctctggtgctgcagagcagaaatacgtggagaagtttcttagggtccacggcattagcctccaggaaacaaccagggcagaaaccggaatggcgtacagaaacctggggaagagcggcctgcgcgtgagctgcctgggcctcggcacgtgggtcacatttggaggccagatttccgatgaggttgctgaaagacttatgaccattgcctacgaatcaggtgtcaacctatttgatactgccgaggtgtatgccgccgggaaggctgaggtaatcctgggttcaatcattaagaaaaaaggatggcgccgttctagcctcgtcatcaccaccaaactgtactggggtggtaaagctgagacagaacggggcttgtcccgaaagcatattatcgaagggcttaaggggagcctccagagactgcagctggaatacgtcgacgtcgtgtttgcaaatcgtcccgacagcaacacccctatggaggagatcgtccgggccatgacccacgtcattaaccagggtatggccatgtactggggcacttctagatggtctgcgatggaaatcatggaagcatacagcgtggcaaggcagttcaacatgattccgcctgtgtgcgagcaggctgagtaccacctgttccaacgcgagaaagtggaggttcagctccccgagctttatcataagattggcgtgggggccatgacctggtcgccactggcttgtggtatcatttcaggtaagtacggcaacggtgtgcctgagtctagtagggcaagcctgaaatgttaccagtggcttaaggagcggatcgtaagtgaggagggcaggaagcagcagaacaaactcaaggatctgagtcctatagcagaacgcctgggttgtactctgccccagcttgccgtggcctggtgcttacggaatgagggtgtgtccagtgtcctgcttggttcgtcaacgccagagcagctcatcgaaaacctgggggccatacaggtgttgcctaagatgacaagtcatgtggtcaatgaaatcgacaatatcttgaggaacaaaccttactctaaaaaggattataggtcctag

SEQ ID NO: 138535 - DNA, 1227 bp, Artificial Sequence
  derived and/or modified sequence
atgcacctgtacaagccagcctgtgccgacatccccagccccaagctgggcctgcccaagagcagcgagagcgccctgaagtgccgctggcacctggccgtgaccaagacccagccccaggccgcctgcaagcctgtgcggcccagcggggctgctgagcagaagtatgtggagaagttcctgcgggtgcacggcatcagcctgcaggagaccaccagggctgagaccggcatggcctacagaaacctgggcaagagcggcctgcgggtgtcctgcctgggcctgggcacctgggtgacctttggaggccagatcagtgatgaggtggccgagcggctgatgaccatcgcctatgagagcggcgtgaacctgtttgacacagctgaggtgtatgctgctgggaaggccgaggtgatcctgggcagcatcatcaagaagaagggctggaggaggagcagcctggtgatcaccaccaagctgtactggggcggcaaggccgagacagagcggggcctgagcaggaagcacatcatcgagggcctgaagggcagcctgcagaggctgcagctggagtatgtggatgtggtgtttgccaacagaccagacagcaacacccccatggaggagatcgtgcgggccatgacccacgtgatcaaccagggcatggccatgtactggggcaccagccgctggagcgccatggagatcatggaggcctacagcgtggcccggcagttcaacatgatcccccctgtgtgtgagcaggccgagtaccacctgttccagcgggagaaggtggaggtgcagctgcctgagctgtaccacaagattggagtgggcgccatgacctggagccccctggcctgtggcatcatcagcggcaagtatggaaatggagtgcctgagagcagccgggccagcctgaagtgctaccagtggctgaaggagcgcatcgtgtctgaggagggcaggaagcagcagaacaagctgaaggacctgagccccatcgccgagcggctgggctgcaccctgccccagctggccgtggcctggtgcctgagaaatgaaggagtgtcctctgtgctgctgggcagcagcaccccagagcagctgattgagaacctgggcgccatccaggtgctgcccaagatgaccagccacgtggtgaatgaaattgacaacatcctgaggaacaagccctacagcaagaaggactaccgctcctag

SEQ ID NO: 138536 - DNA, 1227 bp, Artificial Sequence
  derived and/or modified sequence
atgcacctgtacaagcccgcctgcgccgacatccccagccccaagctgggactcccgaagtcctctgaaagcgcattaaagtgtagatggcatctcgcagtgaccaaaacacaaccacaggccgcctgcaagcccgtgaggccctccggagccgccgagcagaaatatgtggaaaagtttctccgcgtgcatggtatatctctgcaggagacgacaagagccgaaacaggcatggcctatagaaaccttggaaaatcgggtttgagggtctcctgcctgggtttaggcacatgggtcactttcggaggccagatttcggatgaggtggcagaacggttgatgactattgcctacgagtccggggttaatctctttgacacggcggaggtatatgcagcaggaaaggccgaagtgattttgggatctataattaagaaaaagggctggcggcgctcttccctcgtcatcaccacaaaactgtactgggggggcaaggcggagaccgagcggggcctgtcccggaagcatatcatcgaggggctgaaagggtcattacagagactgcagctagagtacgttgatgtcgtgtttgcaaaccgtcctgattcgaatacaccaatggaggaaatagtgcgcgccatgacacacgtaatcaaccagggaatggcgatgtactggggcacatcccggtggtcagccatggagatcatggaggcttattctgtcgcacgccagtttaacatgataccacccgtatgcgagcaggcggaataccacctattccagagagaaaaggttgaggttcagcttcctgagctttatcacaagataggtgttggggcgatgacatggagtcccctagcttgcggcatcatctctgggaaatacggcaacggggtgcccgagagctctcgcgcaagccttaagtgttaccaatggctgaaggagcgcattgtgtcagaagagggcagaaagcagcaaaacaaactgaaggacctaagccccatagcagaacgcctgggctgcaccctcccccaactcgcagttgcttggtgcttacgcaatgagggcgtatctagcgtactgctggggtccagcacaccagagcagctgatagaaaatctgggcgccatacaggtcttgccaaagatgacatcgcacgtggtgaacgaaatcgataacatcctgcgcaacaagccctattccaagaaagactatcgcagctag

SEQ ID NO: 138537 - DNA, 3301 bp, Artificial Sequence
  derived and/or modified sequence
atgcacaggcctgggcagggacacacaaccaacagctctgtcgggaacttaggagcctgctcgcctacaaaaatgataagagagatctaaagaaaacaagctaaaccttttgagggacatactgaagccagataacccaaggtattcacagcaagatacagtgagtcttaaagttaagcaccgtgcaattagctttgcttccttgggtttttgaaacatgcatctgtataaacctgcctgtgcagacatcccgagccccaagctgggtctgccaaaatccagtgaatcggctctaaaatgtagatggcacctagcagtgaccaagactcagcctcaggcggcctgcaaacctgtgaggcccagtggagcagccgaacagaaatatgtggaaaagtttctacgtgttcatggaatttcgttgcaggaaaccaccagagcagagacgggcatggcatacaggaatcttggaaaatcaggactcagagtttcttgcttgggtcttggaacatgggtgacatttggaggtcaaatttcagatgaggttgctgaacggctgatgaccatcgcctatgaaagtggtgttaacctctttgatactgccgaagtctatgctgctggaaaggctgaagtgattctggggagcatcatcaagaagaaaggctggaggaggtccagtctggtcataacaaccaaactctactggggtggaaaagctgaaacagaaagagggctgtcaagaaagcatattattgaaggattgaagggctccctccagaggctgcagctcgagtatgtggatgtggtctttgcaaatcgaccggacagtaacactcccatggaagaaattgtccgagccatgacacatgtgataaaccaaggcatggcgatgtactggggcacctcgagatggagtgctatggagatcatggaagcctattctgtagcaagacagttcaatatgatcccaccggtctgtgaacaagctgagtaccatcttttccagagagagaaagtggaggtccagctgccagagctctaccacaaaataggtgttggcgcaatgacatggtctccacttgcctgtggaatcatctcaggaaaatacggaaacggggtgcctgaaagttccagggcttcactgaagtgctaccagtggttgaaagaaagaattgtaagtgaagaagggagaaaacagcaaaacaagctaaaagacctttccccaattgcggagcgtctgggatgcacactacctcagctagctgttgcgtggtgcctgagaaatgaaggtgtgagttctgtgctcctgggatcatccactcctgaacaactcattgaaaaccttggtgccattcaggttctcccaaagatgacatcacatgtggtaaatgagattgataacatactgcgcaacaagccctacagcaagaaggactatagatcataaggcaatgcatgaaccacagaagctgcatggttaaaatagcggcctgtgcccagtacagaaaggtgttactaaccagtcttttgaatcacttagcagcttgctgctcaacctctagtgtccctccctggattctttgaggtgtctgctgtcgctaccactgtgcacatctgaaaactcacaaccaagaaaatccattctattttcttatcttggactggagtcacctattcttgcattgctgtatacacctcatgcttatgcaatgggaagaatatgggggccagggggtgtggtactaccttcaggcatttggtaactcaaagaaggctgtacagatatattttttcaaaagaacaaaatccacagatgcaatgtgagttgcgtaagaaacagagtagatagactaaattcagtgaaggaaaggaattgagagatttttcttagtaaatagattattgttaagtaaatagttattaaaaatatatctcactgcaaaaaaaaaaaagcagtatcttcactcaaaagtcttgcttggaagaataagcagaaataattttatatattttttttctattttcacattcatactaacaagttttgttccatttgttattcaataaaacaaaaatttctaggtatttgctttattacctttcaaatatttactgttgcttggccccaagaatggccttgtacaacttatccagaatgtctattaggattctaatgttatgtccacttacaagtagagacagtaaaaggatgaatacccaatctttagtgacaatgcagctgatttatgaaagagagggctacactgctatggaaacttagcttcaaagaaaatgcaatgtatctgcaattaggtgttcattttttactacattttattaaaacctgctttatactttcaactgcttgtaggcacaacttctgcaagtttaaatatttgagctttacaaataaacatacacatgctcagttttttaagtaaacctgtaaaatacccaggaaggcaaatgttcattgtttaattagcactgggattttataatataatgtttggtatttttgaggcattgttaacatgaaagtcaaccactggctttgtgaaaaatgctatgtcactattcagaatatgctgggtaaattgacttgcctagtgaaaagcaaaatgttaaagaaagaacttctggttctataatcatattatatgcactaaactatatgcatgaaagttctttgcatggattaatggggcttacccttgttgcactcgaaatctgaggtgtatctagccctgccactattggctacttaccctcattaatatcccacttgagaaaaattgtgagactatactgtgtcaatatctgtaaaaagagagaaaacatgttttgtttttttttgaagggggtggtgtgggagtggccctttaactctatttggctatctgaggatgtacaaaattctcatttaattttctggtcagcaagttccccacacagaaatcactctgaggtttacagaagaactgtaatattattttaaaatgcgatttttctgtcattagttctagatatgtacttcatggttaaattctaaatctgaaaatgctagtgggagatatcaagaaattttctttttgattactagtacctgtattctaacagagagtttgaattttttgcccgtgttatcagaatgatggaaattgatcattttcagttgttcattgtgtattcaatccagcgaactgctgtatgtatagaggagctgaggtgctgtctaatgggaaatgtgatttgattgatttatttgcttagagtaataaaagcattttgtgcattcaatctt

SEQ ID NO: 138538 - DNA, 1227 bp, Artificial Sequence
  derived and/or modified sequence
atgcacttgtacaagccggcatgtgcagacatccctagccctaagctggggctgcctaaatccagtgagtctgctctgaaatgccggtggcacctcgccgtcaccaagactcagcctcaggccgcttgtaaaccagtccggcctagcggagcagccgagcaaaaatacgttgagaagtttttacgtgtacacggcattagccttcaggagaccactcgggctgagaccgggatggcctaccgaaatcttgggaaaagcggactgcgggtttcatgtctgggactggggacatgggttacattcgggggtcagatcagcgacgaggtggcagagcgcctgatgaccatcgcttatgagtccggggtgaacctcttcgacaccgccgaggtatatgccgcagggaaagccgaagtgattctcggatccattatcaaaaaaaagggatggcggagaagctccctggtcattaccacaaaattatactggggaggtaaggctgaaacagaaaggggcctgtcacggaaacacatcatagagggactaaagggaagccttcagcgcttacagcttgagtatgtggatgtagtctttgcaaaccgccctgatagtaatacaccaatggaggagatcgtaagggctatgacacacgtcataaatcagggcatggccatgtactgggggacgtccagatggtccgcaatggaaattatggaggcttattcagttgctcgccagtttaacatgatccccccagtgtgcgaacaagcagagtaccatctgtttcagagagagaaagttgaggtccagctccctgaactgtaccacaaaattggcgtcggcgctatgacatggagcccattggcttgcgggattatcagcggtaaatacgggaacggagtccccgaaagctctcgagcatccctgaagtgctaccagtggttgaaggagcggatcgtcagcgaggaaggaaggaagcagcagaacaagctgaaggatctctctccaatagccgagcgtctaggctgcaccctaccccagctcgccgtggcttggtgtctgagaaacgaaggcgtgagtagcgtgctgctgggctcctctacacctgagcagctgatcgagaaccttggcgcaatccaagtgttgcctaaaatgacaagccatgtggttaacgaaattgacaacatccttcgaaataagccttactctaagaaagactataggtcttag

SEQ ID NO: 138539 - DNA, 1227 bp, Artificial Sequence
  derived and/or modified sequence
atgcacctgtacaagcccgcctgcgccgacatccccagccccaagctgggcctgcccaagagcagcgagagcgccctgaagtgcagatggcacctggccgtgaccaagacccagccccaggccgcctgcaagcccgtgagacccagcggcgccgccgagcagaagtacgtggagaagttcctgagagtgcacggcatcagcctgcaggagaccaccagagccgagaccggcatggcctacagaaacctgggcaagagcggcctgagagtgagctgcctgggcctgggcacctgggtgaccttcggcggccagatcagcgacgaggtggccgagagactgatgaccatcgcctacgagagcggcgtgaacctgttcgacaccgccgaggtgtacgccgccggcaaggccgaggtgatcctgggcagcatcatcaagaagaagggctggagaagaagcagcctggtgatcaccaccaagctgtactggggcggcaaggccgagaccgagagaggcctgagcagaaagcacatcatcgagggcctgaagggcagcctgcagagactgcagctggagtacgtggacgtggtgttcgccaacagacccgacagcaacacccccatggaggagatcgtgagagccatgacccacgtgatcaaccagggcatggccatgtactggggcaccagcagatggagcgccatggagatcatggaggcctacagcgtggccagacagttcaacatgatcccccccgtgtgcgagcaggccgagtaccacctgttccagagagagaaggtggaggtgcagctgcccgagctgtaccacaagatcggcgtgggcgccatgacctggagccccctggcctgcggcatcatcagcggcaagtacggcaacggcgtgcccgagagcagcagagccagcctgaagtgctaccagtggctgaaggagagaatcgtgagcgaggagggcagaaagcagcagaacaagctgaaggacctgagccccatcgccgagagactgggctgcaccctgccccagctggccgtggcctggtgcctgagaaacgagggcgtgagcagcgtgctgctgggcagcagcacccccgagcagctgatcgagaacctgggcgccatccaggtgctgcccaagatgaccagccacgtggtgaacgagatcgacaacatcctgagaaacaagccctacagcaagaaggactacagaagctag

SEQ ID NO: 138540 - protein, 375 aa, Artificial Sequence
  derived and/or modified sequence
MSASAPAAEGEGTPTQPASEKEPEMPGPREESEEEEDEDDEEEEEEEKEKSLIVEGKREKKKVERLTMQVSSLQREPFTIAQGKGQKLCEIERIHFFLSKKKTDELRNLHKLLYNRPGTVSSLKKNVGQFSGFPFEKGSVQYKKKEEMLKKFRNAMLKSICEVLDLERSGVNSELVKRILNFLMHPKPSGKPLPKSKKTCSKGSKKERNSSGMARKAKRTKCPEILSDESSSDEDEKKNKEESSDDEDKESEEEPPKKTAKREKPKQKATSKSKKSVKSANVKKADSSTTKKNQNSSKKESESEDSSDDEPLIKKLKKPPTDEELKETIKKLLASANLEEVTMKQICKKVYENYPTYDLTERKDFIKTTVKELIS

SEQ ID NO: 138541 - DNA, 1128 bp, Artificial Sequence
  derived and/or modified sequence
atgagcgcttctgcccccgcagccgagggcgaggggacacctacccagcctgcttcagagaaggagcccgagatgcccgggcctagggaagaaagtgaggaggaagaagatgaggacgatgaagaagaggaggaggaggagaaagaaaagagtctgatcgtggagggcaagcgggaaaagaaaaaggtggagcgtttaactatgcaggtatcctctctgcaaagagagccctttactatcgcacagggaaaggggcaaaagttgtgtgagattgagaggatccacttcttcctttcgaaaaagaaaacagacgaactgagaaacctccacaagctgctgtacaatcgtcccggcactgttagttcactaaaaaagaacgtgggacaatttagtgggtttccctttgaaaagggctctgtccaatataaaaaaaaggaagagatgctaaaaaagttccgaaacgcaatgttgaagtcaatttgtgaggttttggacctggagaggagcggggtcaacagcgaactcgttaagcgaatcctgaacttcctgatgcacccaaagccatccggaaagccactgcccaagtcaaagaagacctgtagcaagggcagtaaaaaagagcggaatagcagcgggatggctcggaaagctaagcgaactaagtgtcccgagatcctgtcagacgagtcatcatccgacgaggatgagaagaagaataaggaggaaagtagcgacgatgaagacaaggaaagtgaggaggagccccctaaaaaaacggccaagcgcgaaaaaccaaaacagaaagccacctccaaatctaagaagagcgtgaagagcgccaacgttaagaaggccgattcctccaccacaaagaagaaccaaaacagttctaaaaaggagagcgagtccgaggattctagcgacgatgaacccctgataaagaaactcaagaagcctcccacagacgaggaactgaaagagacaattaagaaactgctggcttcagcgaacctcgaggaagtgacgatgaaacagatctgcaagaaagtgtacgagaattacccaacatacgacctaaccgagcggaaggactttataaagacaacagtcaaggaactgatctcttag

SEQ ID NO: 138542 - DNA, 1128 bp, Artificial Sequence
  derived and/or modified sequence
atgtctgccagcgccccagctgctgagggggagggcacccccacccagcctgccagcgagaaggagcctgagatgcctggcccccgggaggagagcgaggaggaggaggatgaagatgatgaggaggaggaggaggaggagaaggagaagagcctgattgtggagggcaagcgggagaagaagaaggtggagcggctgaccatgcaggtgagcagcctgcagcgggagcccttcaccatcgcccagggcaagggccagaagctgtgtgaaattgagcgcatccacttcttcctgagcaagaagaagacagatgagctgaggaacctgcacaagctgctgtacaacagacctggcaccgtgagcagcctgaagaagaatgtgggccagttcagcggcttcccctttgagaagggctctgtgcagtacaagaagaaggaggagatgctgaagaagttcagaaatgccatgctgaagagcatctgtgaggtgctggacctggagaggtctggagtgaacagcgagctggtgaagaggatcctgaacttcctgatgcaccccaagcccagcggcaagcccctgcccaagagcaagaagacctgcagcaagggcagcaagaaggagaggaacagcagcggcatggccaggaaggccaagaggaccaagtgcccagagatcctgagtgatgagagcagcagtgatgaagatgagaagaagaacaaggaggagagcagtgatgatgaggacaaggagagcgaggaggagccccccaagaagacagccaagcgggagaagcccaagcagaaggccaccagcaagagcaagaagtctgtgaagagcgccaacgtgaagaaggctgacagcagcaccaccaagaagaaccagaacagcagcaagaaggagagcgagagcgaggacagcagtgatgatgagcccctcatcaagaagctgaagaagcccccaacagatgaggagctgaaggagaccatcaagaagctgctggccagcgccaacctggaggaggtgaccatgaagcagatctgcaagaaggtgtatgagaactaccccacctatgacctgacagagaggaaggacttcatcaagaccaccgtgaaggagctgatctcctag

SEQ ID NO: 138543 - DNA, 1128 bp, Artificial Sequence
  derived and/or modified sequence
atgagcgccagcgcccccgccgccgagggcgagggcacccccacccaaccggcctcagaaaaagagcccgagatgccagggccccgggaagagtcagaggaggaagaggacgaggatgacgaagaggaggaggaagaggagaaagaaaaaagcctgatagtggaaggcaagcgggaaaaaaagaaagttgaacgccttacgatgcaggttagtagtcttcagagggagccgtttactatcgcacagggcaaaggacagaaattgtgcgagattgaaagaatacacttctttttgtccaaaaaaaagactgacgagctaagaaatctgcacaaactattgtacaatcggccaggcacagtgagctcactgaagaagaatgtaggccagtttagtggctttccgtttgagaaaggctcggtgcagtataagaaaaaagaggagatgctaaagaagttccgcaatgccatgctcaaaagcatctgcgaggttctggacctggagagatcaggcgtgaactccgaactggtaaaaagaattttaaactttctgatgcacccaaaaccatctggcaagccactcccgaaatcaaagaagacctgctccaaggggtccaagaaagagagaaattcaagcggaatggccaggaaggccaagcgcactaagtgtccagagattttgagcgatgaaagcagcagcgacgaggacgaaaagaagaataaggaagaaagctccgatgacgaggataaggagtccgaggaggaaccacccaagaaaacagctaaaagggagaagccgaaacagaaagccacttccaaaagcaagaagtcagtgaagtctgcgaacgtgaagaaggctgatagctccactactaagaagaaccaaaatagcagtaagaaggagtccgagagtgaagacagttccgacgatgaacccttaatcaagaagcttaagaagcccccaacggatgaggaattaaaggagacaatcaagaaattgttggcctctgcaaacttagaagaagtcacaatgaaacagatctgcaaaaaggtgtacgagaattacccaacatacgacctcaccgaacgcaaggactttataaaaaccacggttaaagagcttatctcatag

SEQ ID NO: 138544 - DNA, 1128 bp, Artificial Sequence
  derived and/or modified sequence
atgagcgcttccgcgccagccgcagagggcgagggcacacccacacagcccgcatctgagaaggagcccgagatgccaggcccaagagaagagagcgaggaagaggaggatgaggatgatgaagaggaagaggaggaagaaaaagaaaaatcactcatcgtggagggcaagcgagagaagaagaaggtggagaggctaaccatgcaagtttctagtctacagcgggaaccctttaccattgctcagggaaagggccagaagttgtgcgagattgagagaatccattttttcctgagtaagaaaaaaacagacgagctgaggaacctgcataagctcctgtacaaccgtcctgggacagttagctcgttaaaaaagaacgttggccagttctccggctttcctttcgagaaagggagcgtgcagtataaaaagaaagaagaaatgcttaaaaaatttcggaatgctatgcttaaatccatttgtgaagtgttagatctcgaacgatcaggcgtgaactcagagctggtcaaaagaatcctgaatttcttgatgcacccaaaaccctcaggaaaacccctgcccaaaagcaaaaagacctgctccaaagggagcaaaaaagagcgcaattcttctggtatggcacgaaaggcaaagcggacaaaatgtcctgaaattttgtcggacgaaagttcatcagacgaagacgaaaagaagaacaaggaagagtcttcagacgatgaagataaggagagtgaggaggagccccctaagaaaactgccaagcgtgagaagcccaagcaaaaggctacttctaagagcaagaaatctgtgaaatccgctaatgtgaagaaggctgactccagtacaaccaaaaagaaccagaattcctccaaaaaggagtccgaatccgaggactcttcagatgacgagcccctgataaagaaattaaaaaagccccctacagacgaggagttgaaagagactatcaaaaagctgttggcttctgccaatctagaagaggtgacgatgaagcagatctgtaaaaaggtatacgaaaattaccccacttatgaccttacagaacggaaggatttcattaaaactacagtcaaggagcttatttcctag

SEQ ID NO: 138545 - DNA, 1128 bp, Artificial Sequence
  derived and/or modified sequence
atgagcgccagcgcccccgccgccgagggcgagggcacccccacccagcccgccagcgagaaggagcccgagatgcccggccccagagaggagagcgaggaggaggaggacgaggacgacgaggaggaggaggaggaggagaaggagaagagcctgatcgtggagggcaagagagagaagaagaaggtggagagactgaccatgcaggtgagcagcctgcagagagagcccttcaccatcgcccagggcaagggccagaagctgtgcgagatcgagagaatccacttcttcctgagcaagaagaagaccgacgagctgagaaacctgcacaagctgctgtacaacagacccggcaccgtgagcagcctgaagaagaacgtgggccagttcagcggcttccccttcgagaagggcagcgtgcagtacaagaagaaggaggagatgctgaagaagttcagaaacgccatgctgaagagcatctgcgaggtgctggacctggagagaagcggcgtgaacagcgagctggtgaagagaatcctgaacttcctgatgcaccccaagcccagcggcaagcccctgcccaagagcaagaagacctgcagcaagggcagcaagaaggagagaaacagcagcggcatggccagaaaggccaagagaaccaagtgccccgagatcctgagcgacgagagcagcagcgacgaggacgagaagaagaacaaggaggagagcagcgacgacgaggacaaggagagcgaggaggagccccccaagaagaccgccaagagagagaagcccaagcagaaggccaccagcaagagcaagaagagcgtgaagagcgccaacgtgaagaaggccgacagcagcaccaccaagaagaaccagaacagcagcaagaaggagagcgagagcgaggacagcagcgacgacgagcccctgatcaagaagctgaagaagccccccaccgacgaggagctgaaggagaccatcaagaagctgctggccagcgccaacctggaggaggtgaccatgaagcagatctgcaagaaggtgtacgagaactaccccacctacgacctgaccgagagaaaggacttcatcaagaccaccgtgaaggagctgatcagctag

SEQ ID NO: 138546 - DNA, 3427 bp, Artificial Sequence
  derived and/or modified sequence
tccgcgctgccaggccgcctcgcctcccgctcccgcccgccccgcgggacacagcccgcccgcactccggggcccgagcgccgaccacactccaggcgcagccggggagagccccgcgcgcgcatccctccgcccgcggccgaggcgacccctcgcggtcccgcccgcccgagcttcccgcggaggcacccggccgccccgcctcccccgccccgcgcccgccaactcccagctcgcggccctgattggtcgccgcattcccgctctccttcccgaaccgccattttgaaaatcttgttgattctggggagccgagcgcgcggcgcgagcgtcacgccagacagcggcccgcgcgccttctcctcggcgtcggccgccgccgcctcccagaacctcctcgtgccctcgcgtgccaggcccgcggcggccgaaatccgcggttcacagcatgtccgcctcggcccctgctgcggagggggagggaacccccacccagcccgcgtccgagaaagaacccgaaatgcccggtcccagagaggagagcgaggaggaagaggacgaggacgacgaggaggaggaggaggaggaaaaagaaaagagtctcatcgtggaaggcaagagggaaaagaaaaaagtagagaggttgacaatgcaagtctcttccttacagagagagccatttacaattgcacaaggaaaggggcagaaactttgtgaaattgagaggatacatttttttctaagtaagaagaaaaccgatgaacttagaaatctacacaaactgctttacaacaggccaggcactgtgtcctcattaaagaagaatgtgggtcagttcagtggctttccatttgaaaaaggaagtgtccaatataaaaagaaggaagaaatgttgaaaaaatttagaaatgccatgttaaagagcatctgtgaggttcttgatttggagagatcaggtgtaaatagtgaactagtgaagaggatcttgaatttcttaatgcatccaaagccttctggcaaaccattgccgaaatctaaaaaaacttgtagcaaaggcagtaaaaaggaacggaacagttctggaatggcaaggaaggctaagcgaaccaaatgtcctgaaattctgtcagatgaatctagtagtgatgaagatgaaaagaaaaacaaggaagagtcttcagatgatgaagataaagaaagtgaagaggagccaccaaaaaagacagccaaaagagaaaaacctaaacagaaagctacttctaaaagtaaaaaatctgtgaaaagtgccaatgttaagaaagcagatagcagcaccaccaagaagaatcaaaacagttccaaaaaagaaagtgagtctgaggatagttcagatgatgaacctttaattaaaaagttgaagaaaccccctacagatgaagagttaaaggaaacaataaagaaattactggccagtgctaacttggaagaagtcacaatgaaacagatttgcaaaaaggtctatgaaaattatcctacttatgatttaactgaaagaaaagatttcataaaaacaactgtaaaagagctaatttcttgagatagaggacagagaagatgactcgttcccatagatttgaagatctgatttataccattataccagcaaagagaatgtatttccttttctaaatccttgttaagcaacgttagtagaacttactgctgacctttttatcttgagtgttatgtgaatttgagtttgctgttttaaattgcatttctatgccatttttagtttaaaatcttgcatggcattaattgttccttgcttttatagttgtattttgtacattttggatttctttatataaggtcatagattcttgagctgttgtggtttttagtgcacttaatattagcttgcttaaggcatacttttaatcaagtagaacaaaaactattatcaccaggatttatacatacagagattgtagtatttagtatatgaaatattttgaatacacatctctgtcagtgtgaaaattcagcggcagtgtgtccatcatattaaaaatatacaagctacagttgtccagatcactgaattggaacttttctcctgcatgtgtatatatgtcaaattgtcagcatgacaaaagtgacagatgttatttttgtatttttaaaaaacaattggttgtatataaagtttttttatttcttttgtgcagatcactttttaaactcacataggtaggtatctttatagttgtagactatggaatgtcagtgttcagccaaacagtatgatggaacagtgaaagtcaattcagtgatggcaacactgaaggaacagttaccctgctttgcctcgaaagtgtcatcaatttgtaattttagtattaactctgtaaaagtgtctgtaggtacgttttatattatataaggacagaccaaaaatcaacctatcaaagcttcaaaaactttgggaaagggtgggattaagtacaagcacatttggcttacagtaaatgaactgatttttattaactgcttttgcccatataaaatgctgatatttactggaaacctagccagcttcacgattatgactaaagtaccagattataatgccagaatataatgtgcaggcaatcgtggatgtctctgacaaagtgtgtctcaaaaataatatacttttacattaaagaaatttaatgtttctctggagttggggctcttggctttcagagtttggttaatcagtgttgattctagatgatcaacataatggaccactcctgaatgagacttaattttgtctttcaaatttactgtcttaaatcagtttattaaatctgaattttaaaacatgctgtttatgacacaatgacacatttgttgcaccaattaagtgttgaaaaatatctttgcatcatagaacagaaatatataaaaatatatgttgaatgttaacaggtattttcacaggtttgtttcttgatagttactcagacactagggaaaggtaaatacaagtgaacaaaataagcaactaaatgagacctaataattggccttcgattttaaatatttgttcttataaaccttgtcaataaaaataaatctaaatcactggtgttttaagtcacttgcatttgatatcttataggtgtatatagcatttccttatggggaataattctgaaaagggatttttaaattgattcagccctataacctatacaatttggaatactcttttgtggtaatggaccattttcttggagtgacttcacaaaactgaataattaaggttaattttatgaccatttgctataaagaaggtaagtagtcatgcatagagtatttggaagtgaggaaatggagttgttctgtatgaaagttcttgatgagtacgcacacttattaaatggatgtatcacca

SEQ ID NO: 138547 - protein, 540 aa, Artificial Sequence
  derived and/or modified sequence
MPLFATNPFDQDVEKATSEMNTAEDWGLILDICDKVGQSRTGPKDCLRSIMRRVNHKDPHVAMQALTLLGACVSNCGKIFHLEVCSRDFASEVSNVLNKGHPKVCEKLKALMVEWTDEFKNDPQLSLISAMIKNLKEQGVTFPAIGSQAAEQAKASPALVAKDPGTVANKKEEEDLAKAIELSLKEQRQQSTTLSTLYPSTSSLLTNHQHEGRKVRAIYDFEAAEDNELTFKAGEIITVLDDSDPNWWKGETHQGIGLFPSNFVTADLTAEPEMIKTEKKTVQFSDDVQVETIEPEPEPAFIDEDKMDQLLQMLQSTDPSDDQPDLPELLHLEAMCHQMGPLIDEKLEDIDRKHSELSELNVKVMEALSLYTKLMNEDPMYSMYAKLQNQPYYMQSSGVSGSQVYAGPPPSGAYLVAGNAQMSHLQSYSLPPEQLSSLSQAVVPPSANPALPSQQTQAAYPNTMVSSVQGNTYPSQAPVYSPPPAATAAAATADVTLYQNAGPNMPQVPNYNLTSSTLPQPGGSQQPPQPQQPYSQKALL

SEQ ID NO: 138548 - DNA, 1623 bp, Artificial Sequence
  derived and/or modified sequence
atgcctctcttcgctactaaccccttcgatcaggatgtagaaaaagccaccagcgagatgaacaccgcagaggactggggtctgattctcgacatttgtgacaaggtcgggcagagcaggacaggccccaaggactgtctgcgctccataatgcggcgagtaaaccataaggatccccatgtcgcaatgcaagccctgaccctgctgggcgcgtgtgtctccaattgtggaaagatctttcacttggaagtctgctcaagggacttcgctagcgaagtgtccaacgtgctcaataagggacaccctaaagtgtgcgaaaagttgaaagctctaatggtggagtggacagatgaattcaaaaatgacccccagctgtcattaatctcggccatgataaaaaacctgaaggagcaaggagtcacattccctgcaatcggaagccaagccgccgaacaagctaaggcgagccccgcactggttgctaaagatccaggaaccgtcgctaataagaaggaggaggaagatctcgccaaagcgatagaactgagcctgaaggaacaaaggcagcaatccacaaccttaagcactctgtatccgagtaccagttccttgctgactaaccatcagcatgagggaagaaaagtcagggcaatctacgatttcgaagcagctgaggacaatgagttaacgttcaaagccggcgagataatcaccgtgctggacgattcggaccccaattggtggaaaggcgaaacacaccaggggataggcctgttccccagcaactttgtgaccgccgacctgacggcagaacctgaaatgattaagacagaaaagaagaccgtgcaattctcagatgacgttcaagtggagaccatcgaacctgagccagaaccagcattcatagatgaggacaagatggaccaattgctgcagatgctccagagcacggatccctcagatgatcagcctgacctgcctgagcttctgcaccttgaagccatgtgccaccagatgggccctctgattgatgagaaacttgaagacatcgataggaaacattctgagctctcggagctaaatgtgaaggtaatggaggcgctttctctgtatactaaacttatgaacgaggatcctatgtacagtatgtacgccaagctccagaaccaaccatactacatgcagtcatccggcgtttccggctcccaagtgtacgctggaccacccccgagtggggcttacctggtggccggcaacgctcagatgtcccacctgcagtcctacagcctacccccagaacaactgtcgagcttgagccaggcagttgttccgccttccgctaaccccgcactgccgagccaacagactcaagccgcctatcctaataccatggtgagctccgtgcagggaaatacataccccagccaggctcccgtctactccccaccgccagccgccacagctgcggcggccaccgcagacgtgacactgtatcagaatgccggtcctaacatgccccaagtgccgaattacaatttgacgagctccactttaccccaacctggagggtcccagcagcctccacagcctcagcagccctatagtcagaaggcactactctag

SEQ ID NO: 138549 - DNA, 1623 bp, Artificial Sequence
  derived and/or modified sequence
atgcccctgtttgccaccaacccctttgaccaggatgtggagaaggccaccagcgagatgaacacagctgaggactggggcctcatcctggacatctgtgacaaggtgggccagagcaggacaggccccaaggactgcctgcggagcatcatgagaagagtgaaccacaaggacccccacgtggccatgcaggccctgaccctgctgggcgcctgtgtgagcaactgtgggaagatcttccacctggaggtgtgcagccgggactttgccagcgaggtgtccaatgtgctgaacaagggccaccccaaggtgtgtgagaagctgaaggccctgatggtggagtggacagatgagttcaagaatgacccccagctgagcctcatcagcgccatgatcaagaacctgaaggagcagggcgtgaccttccctgccatcggcagccaggccgctgagcaggccaaggccagccctgccctggtggccaaggaccccggcaccgtggccaacaagaaggaggaggaggacctggccaaggccatcgagctgagcctgaaggagcagaggcagcagagcaccaccctgagcaccctgtaccccagcaccagcagcctgctgaccaaccaccagcacgagggcaggaaggtgcgggccatctatgactttgaagctgctgaagataatgagctgaccttcaaggccggggagatcatcaccgtgctggatgacagcgaccccaactggtggaagggggagacccaccagggcatcggcctcttccccagcaactttgtgacagctgacctgacagctgagcctgagatgatcaagacagagaagaagacagtgcagttcagtgatgatgtgcaggtggagaccatcgagcctgagcctgagcccgccttcattgatgaggacaagatggaccagctgctgcagatgctgcagagcacagaccccagtgatgaccagcctgacctgcctgagctgctgcacctggaggccatgtgccaccagatgggccccctgattgatgagaagctggaggacatcgacaggaagcacagcgagctgtctgagctgaatgtgaaggtgatggaggccctgagcctgtacaccaagctgatgaatgaagaccccatgtacagcatgtatgccaagctgcagaaccagccctactacatgcagagcagtggagtgtctggcagccaggtgtatgccggccccccaccttctggggcctacctggtggccggaaatgcccagatgagccacctgcagagctacagcctgcccccagagcagctgagcagcctgagccaggccgtggtgccccccagcgccaacccagccctgcccagccagcagacccaggccgcctaccccaacaccatggtgtcctctgtgcagggcaacacctaccccagccaggcccctgtgtacagccccccacctgctgccacagctgctgctgccacagcagatgtgaccctgtaccagaatgccggccccaacatgccccaggtgcccaactacaacctgaccagcagcaccctgccccagcccggcggcagccagcagcccccccagccccagcagccctacagccagaaggccctgctgtag

SEQ ID NO: 138550 - DNA, 1623 bp, Artificial Sequence
  derived and/or modified sequence
atgcccctgttcgccaccaaccccttcgaccaggacgtggagaaggctacctccgagatgaacaccgctgaggattggggattaatccttgatatatgcgacaaggtgggacaatccaggacaggaccaaaggattgtctgcgatccatcatgcggcgcgtgaaccataaggaccctcacgtggcaatgcaagctcttacccttctcggcgcctgcgtaagcaattgcgggaaaatttttcacctggaggtgtgctcaagggatttcgcgtcagaggtgtcaaatgtcctcaataaaggtcacccaaaagtgtgtgagaagcttaaggctctgatggtggagtggaccgacgagttcaagaatgacccacagctcagccttatctcagccatgattaaaaacttaaaggagcagggtgtaacttttccagcaattggctctcaagccgctgaacaggcaaaagcatccccagctctcgtagcaaaagaccctgggaccgtggccaataagaaggaagaggaagatctcgccaaagccattgagctgagcctcaaggagcagcggcagcagagcaccactcttagtacgctataccccagtacatcttcattgcttactaatcaccagcatgagggccggaaggtgcgtgccatttatgacttcgaagccgcagaggataatgagttgacatttaaagccggtgaaattatcactgtgcttgacgattccgacccaaactggtggaagggagagactcaccagggcattggcctgttcccttcgaactttgtgaccgccgatctcactgccgagcccgaaatgatcaagacagaaaagaagacagttcagttctcggacgacgttcaggtggagactatagagccagaacctgagcccgcgttcatcgacgaggacaaaatggatcagctgctccaaatgcttcagagcaccgacccttccgatgaccagcccgacctgccagagctccttcatctagaggcgatgtgtcatcaaatggggccattgatcgacgaaaaacttgaggatattgataggaaacattctgagttgtcggaactgaatgtgaaagtgatggaggcgctttctctctacaccaagttgatgaacgaggatccgatgtattccatgtacgcaaaacttcagaatcaaccctattatatgcagtcaagcggcgtgagcgggtcccaggtctatgctggcccgccgcccagtggcgcatacctggtcgctgggaatgctcagatgtcccatttacaaagctattctctgccccctgaacagctgtctagcctgagtcaggctgtggtccccccctccgctaaccctgcgttgccttctcagcagacccaggccgcctatcctaatactatggtgtcttctgttcaaggaaacacctatccctcccaagctccggtgtactctccacctccagccgctacagcagccgctgctacagctgatgtgaccctgtaccagaatgctggccctaacatgcctcaggttcctaattataatcttacttcttctacattgccccagcccggtggatctcagcagccacctcagccgcagcagccatatagccaaaaggccctactgtag

SEQ ID NO: 138551 - DNA, 1623 bp, Artificial Sequence
  derived and/or modified sequence
atgcctctcttcgctactaacccgttcgatcaggacgtggaaaaagccacctccgagatgaatactgcagaggattgggggctgatcctcgacatctgcgataaagtcggacagagccgaactgggcctaaggattgcctgcgttcaattatgcggagagtgaatcacaaagatccccatgtggccatgcaggccttgacgttactcggggcatgtgtgagcaactgtggtaaaatcttccatcttgaggtttgttctagagattttgcttccgaggtgtctaacgtgctgaataagggacacccaaaagtgtgcgagaagctgaaagccctgatggtggaatggacggacgagttcaagaacgatccccagctctcactgattagtgcaatgatcaagaacctgaaggaacagggcgtgactttccctgctatcggcagtcaggcagcagaacaagccaaggcaagcccagcgctcgtggctaaggacccagggactgtagccaacaagaaggaggaggaagacctggcgaaagcaattgagttaagcctcaaagaacagcgccagcagtccaccacactaagcacgttgtacccctcaacaagcagccttctgaccaaccatcaacacgaagggagaaaggtgcgcgctatctatgactttgaggctgctgaggataatgagctaacattcaaggcaggagaaattatcactgtgctggatgactctgacccaaactggtggaagggcgagacccaccaggggattggtttattcccatcgaatttcgtgaccgcggacctgaccgcagaacccgagatgattaagacagaaaagaagactgtgcagttcagcgatgatgtccaggttgaaacaatagaacctgagccggaaccagcatttatcgacgaggacaagatggaccaattactacagatgctgcaaagcacagatccaagcgacgaccagcccgacctgccggagctgcttcacctagaagctatgtgccaccagatgggacctctaattgatgaaaagctggaggatatcgatcgtaagcattcagagctatcagagctaaacgttaaagtcatggaagccctcagcctctacactaaactgatgaatgaggatccgatgtactctatgtacgctaagctgcagaaccaaccatactacatgcagtcatctggagtctccggaagtcaggtctatgcagggccaccaccgtccggagcttacctggtcgcaggcaatgctcagatgtcacacctccagagctactcacttccacccgaacaactcagctccctgtcgcaggctgtggtccccccttccgccaaccccgcactgccatctcaacaaacccaggcagcctacccgaatacaatggtttctagcgtgcaagggaacacgtatcctagtcaggcgccagtttactcgccgccaccagctgccacagccgcagccgctacagcagacgtgactctgtaccagaatgccggtcccaacatgccacaggtacctaactataacctaaccagctctactctcccgcagccaggcggttcacagcagccacctcaaccacagcagccatattcccagaaagccctcctgtag

SEQ ID NO: 138552 - DNA, 2972 bp, Artificial Sequence
  derived and/or modified sequence
agctccgcgcgggggcttcctcggctccttgctgttgccgccgccgcagctgctgccgcggttggtggggttgggtgagaggaggagctgtcgcggaccctgtagagtcggtctctgttgctctttttgcctgaggagtcttccatcctacgtcgagctctgactcccgtgctgtcgagagggagtccccggggacacctcggcacgcagcggagatgcctctttttgccaccaatcccttcgatcaggatgttgagaaagcaaccagcgagatgaatactgctgaggactggggcctcattttggatatctgtgataaagttggtcagtctcgcactggacctaaggattgtcttcggtctattatgagaagagtgaaccacaaagatcctcacgttgctatgcaggctttgactcttctaggagcatgtgtatcaaactgtggcaaaatttttcatttagaagtatgttcaagagattttgctagtgaagtaagcaacgtattaaataagggtcatcctaaagtatgtgaaaaattaaaggctcttatggttgaatggacagatgaatttaagaatgatccacagcttagtctaatatcagcaatgattaagaaccttaaggaacaaggagttacgttcccagctattggctctcaggctgcagaacaagcaaaagcaagcccagctcttgtagccaaggatcctggtactgtggctaacaaaaaagaagaagaagatttagcaaaagccattgagttgtctctcaaggaacaaaggcagcagtcaaccaccctttccactttgtatccaagcacatccagtctcttaactaaccaccaacatgaaggccgaaaagttcgtgctatatatgactttgaagctgctgaagacaatgaacttacttttaaagctggagaaattattacagttcttgatgacagtgatcctaactggtggaaaggtgaaacccatcaaggcatagggttatttccttctaattttgtgactgcagatctcactgctgaaccagaaatgattaaaacagagaagaagacggtacaatttagtgatgatgttcaggtagagacaatagaaccagagccggaaccagcctttattgatgaagataaaatggaccagttgctacagatgctgcaaagtacagaccccagtgatgatcagccagacctaccagagctgcttcatcttgaagcaatgtgtcaccagatgggacctctcattgatgaaaagctggaagatattgatagaaaacattcagaactctcagaacttaatgtgaaagtgatggaggccctttccttatataccaagttaatgaacgaagatccgatgtattccatgtatgcaaagttacagaatcagccatattatatgcagtcatctggtgtttctggttctcaggtgtatgcagggcctcctccaagtggtgcctacctggttgcagggaacgcgcagatgagccacctccagagctacagtcttcccccggagcagctgtcttctctcagccaggcagtggtcccaccatccgcaaacccagcccttcctagtcagcagactcaggccgcttacccaaatacaatggtcagttccgttcaaggaaacacatatcccagccaggcgccagtatatagtcctcctcctgccgctactgctgctgctgcaactgccgatgtcactctgtaccagaatgcaggacctaatatgccccaggtgccaaactataacttaacatcatcaactctgcctcagcccggaggcagccaacagccacctcagccacagcaaccatattctcagaaggctctgctataggacccggtgttcctcttggtggcagatacctgctaaatgccactgacaatgttatgagattcattactatcttaagatgtgtttatcctcagcttataggaatctctccaggtcaacaggttcaaatattcaagaaggtagaactctcctcaatttacactgactttttagaggttcttccccccccgcccctgcagaggaatgaaactacttacaacatttaattcctttcataatatgaaagaattgatacaaggctatttgtctcgtaaacctggtctgcagaaagtcaaacttacaaaaactgttgtgacaaatgttatgtacatatattgatatgtaactgcattagtggccattttgaatcacagtggtgatcgtgtgaatatatttaacactgtgttaaattaatttacgttgctattttattttaatcataaacaactaccatgtttcttaatgttttgtgtaaatttaaggtaattatactatccttttaaacttcaagaaaacaaagttgttagcgtatttacatgaaggcgcattatgttgtcgtgtgtttcagtttcacattaaactgaaccttttactaattgtgagctaaagagatatatatatatatgtgtgtgtatatatatatatctacatgtctttctgtagcctctgcatactactggctgtcatcacaccagcgtacagtagctaaatttttggtgcaattatagcaaatgataatgttcccttttgaacttttacattttggcatgacatttcagagtattgtgggaccatgagacaaaattaagtacgatcacattctttatttctcattttaaagaaatgatgttggtttaccttttcctagttgaagatagtaattaggtttctaagctgtatactgtgtttattggtggcagtgacaccaaagatagaggcaatggatagaaatttttaaactggaaagaaaacctgaattacactacattttcgaagtctcttgtaattatttgggatatcaacaaaatttgattcgtctgtctaatcccttgctagtattttaaatatgtctttaacacattgtatcctttaattcttcattaaaatggaaataagtagatgtttcaaagtaatcta

SEQ ID NO: 138553 - DNA, 740 bp, Artificial Sequence
  derived and/or modified sequence
ggagctgtcgcggaccctgtagagtcggtctctgttgctctttttgcctgaggagtcttccatcctacgtcgagctctgactcccgtgctgtcgagagggagtccccggggacacctcggcacgcagcggagatgcctctttttgccaccaatcccttcgatcaggatgttgagaaagcaaccagcgagatgaatactgctgaggactggggcctcattttggatatctgtgataaagttggtcagtctcgcactggataaggaaaagagaggatgtgtcttacaaaaagttttaaaataccaaaatggggttttaagaagctttttgagagagatgaggatttgcccaccctttaaacagacctaaggattgtcttcggtctattatgagaagagtgaaccacaaagatcctcacgttgctatgcaggctttgactcttctaggagcatgtgtatcaaactgtggcaaaatttttcatttagaagtatgttcaagagattttgctagtgaagtaagcaacgtattaaataagggtcatcctaaagtatgtgaaaaattaaaggctcttatggttgaatggacagatgaatttaagaatgatccacagcttagtctaatatcagcaatgattaagaaccttaaggaacaaggagttacgttcccagctattggctctcaggctgcagaacaagcaaaagcaagcccagctcttgtagccaaggatcctggtactgtggct

SEQ ID NO: 138554 - DNA, 1623 bp, Artificial Sequence
  derived and/or modified sequence
atgcccctgttcgccaccaaccccttcgaccaggacgtggagaaggccaccagcgagatgaacaccgccgaggactggggcctgatcctggacatctgcgacaaggtgggccagagcagaaccggccccaaggactgcctgagaagcatcatgagaagagtgaaccacaaggacccccacgtggccatgcaggccctgaccctgctgggcgcctgcgtgagcaactgcggcaagatcttccacctggaggtgtgcagcagagacttcgccagcgaggtgagcaacgtgctgaacaagggccaccccaaggtgtgcgagaagctgaaggccctgatggtggagtggaccgacgagttcaagaacgacccccagctgagcctgatcagcgccatgatcaagaacctgaaggagcagggcgtgaccttccccgccatcggcagccaggccgccgagcaggccaaggccagccccgccctggtggccaaggaccccggcaccgtggccaacaagaaggaggaggaggacctggccaaggccatcgagctgagcctgaaggagcagagacagcagagcaccaccctgagcaccctgtaccccagcaccagcagcctgctgaccaaccaccagcacgagggcagaaaggtgagagccatctacgacttcgaggccgccgaggacaacgagctgaccttcaaggccggcgagatcatcaccgtgctggacgacagcgaccccaactggtggaagggcgagacccaccagggcatcggcctgttccccagcaacttcgtgaccgccgacctgaccgccgagcccgagatgatcaagaccgagaagaagaccgtgcagttcagcgacgacgtgcaggtggagaccatcgagcccgagcccgagcccgccttcatcgacgaggacaagatggaccagctgctgcagatgctgcagagcaccgaccccagcgacgaccagcccgacctgcccgagctgctgcacctggaggccatgtgccaccagatgggccccctgatcgacgagaagctggaggacatcgacagaaagcacagcgagctgagcgagctgaacgtgaaggtgatggaggccctgagcctgtacaccaagctgatgaacgaggaccccatgtacagcatgtacgccaagctgcagaaccagccctactacatgcagagcagcggcgtgagcggcagccaggtgtacgccggccccccccccagcggcgcctacctggtggccggcaacgcccagatgagccacctgcagagctacagcctgccccccgagcagctgagcagcctgagccaggccgtggtgccccccagcgccaaccccgccctgcccagccagcagacccaggccgcctaccccaacaccatggtgagcagcgtgcagggcaacacctaccccagccaggcccccgtgtacagccccccccccgccgccaccgccgccgccgccaccgccgacgtgaccctgtaccagaacgccggccccaacatgccccaggtgcccaactacaacctgaccagcagcaccctgccccagcccggcggcagccagcagcccccccagccccagcagccctacagccagaaggccctgctgtag

SEQ ID NO: 138555 - protein, 909 aa, Artificial Sequence
  derived and/or modified sequence
MAARPLPVSPARALLLALAGALLAPCEARGVSLWNQGRADEVVSASVGSGDLWIPVKSFDSKNHPEVLNIRLQRESKELIINLERNEGLIASSFTETHYLQDGTDVSLARNYTVILGHCYYHGHVRGYSDSAVSLSTCSGLRGLIVFENESYVLEPMKSATNRYKLFPAKKLKSVRGSCGSHHNTPNLAAKNVFPPPSQTWARRHKRETLKATKYVELVIVADNREFQRQGKDLEKVKQRLIEIANHVDKFYRPLNIRIVLVGVEVWNDMDKCSVSQDPFTSLHEFLDWRKMKLLPRKSHDNAQLVSGVYFQGTTIGMAPIMSMCTADQSGGIVMDHSDNPLGAAVTLAHELGHNFGMNHDTLDRGCSCQMAVEKGGCIMNASTGYPFPMVFSSCSRKDLETSLEKGMGVCLFNLPEVRESFGGQKCGNRFVEEGEECDCGEPEECMNRCCNATTCTLKPDAVCAHGLCCEDCQLKPAGTACRDSSNSCDLPEFCTGASPHCPANVYLHDGHSCQDVDGYCYNGICQTHEQQCVTLWGPGAKPAPGICFERVNSAGDPYGNCGKVSKSSFAKCEMRDAKCGKIQCQGGASRPVIGTNAVSIETNIPLQQGGRILCRGTHVYLGDDMPDPGLVLAGTKCADGKICLNRQCQNISVFGVHECAMQCHGRGVCNNRKNCHCEAHWAPPFCDKFGFGGSTDSGPIRQADNQGLTIGILVTILCLLAAGFVVYLKRKTLIRLLFTNKKTTIEKLRCVRPSRPPRGFQPCQAHLGHLGKGLMRKPPDSYPPKDNPRRLLQCQNVDISRPLNGLNVPQPQSTQRVLPPLHRAPRAPSVPARPLPAKPALRQAQGTCKPNPPQKPLPADPLARTTRLTHALARTPGQWETGLRLAPLRPAPQYPHQVPRSTHTAYIK

SEQ ID NO: 138556 - DNA, 2730 bp, Artificial Sequence
  derived and/or modified sequence
atggctgcgagacctctgccagtgagccccgcccgtgctctgcttcttgctctcgctggggcacttctggctccttgcgaggccagaggagtatccctttggaatcagggaagagcagatgaggttgtaagcgccagcgttggtagcggggacctctggattcccgtgaaaagcttcgacagcaagaaccacccggaagtattaaacattcgcctgcagagggagtctaaagaactgataatcaatctcgagcggaacgaaggcttgattgcgtcatcctttactgaaacacactacctgcaggatgggactgatgtgtcacttgctcggaattatactgtcatcctgggtcactgctattatcacggacatgtccggggctactcagactccgccgtttccctaagtacctgctctggcctgcgaggtctcattgtgtttgagaacgaaagctacgttttagaacctatgaagtctgcaacaaatcggtacaaattattcccagctaagaaactcaagtctgtgagaggaagttgtggtagtcatcacaacactcctaacctcgccgctaaaaacgtgttccccccccccagtcaaacatgggctcggcgtcacaagagggagacgttgaaggccactaagtacgtagagctagtcattgtcgccgacaatcgcgaattccaacgtcaggggaaggacttggaaaaggtaaagcagcggcttatcgaaatcgcaaaccacgtggataagttttaccgccctttgaacattcgcatcgtgctcgtgggagtggaagtgtggaatgatatggacaagtgttccgtctcacaggatcctttcacctccctgcatgagtttctggattggaggaagatgaagctcctgccccgcaaatcacatgacaacgcgcaactagtaagcggcgtttactttcagggtacaactatcggtatggccccaataatgtccatgtgtaccgccgaccagagcggcgggattgtgatggatcatagcgataatccgttgggggcggcagtgacattagcacatgaactgggtcacaacttcggcatgaatcacgacaccctggaccgagggtgctcttgtcaaatggccgtggagaagggagggtgcataatgaacgcctccacaggctacccattccctatggtcttctcctcgtgctcacgcaaagatctcgagacttccctggaaaagggcatgggcgtatgccttttcaaccttccggaagtgagggagtctttcggcggccagaaatgcggtaacagattcgtggaggaaggggaagaatgtgactgcggcgagcctgaggagtgtatgaataggtgctgtaacgccacaacttgcaccttaaaacctgatgcagtgtgcgcgcatgggctttgttgcgaagattgtcagttgaagccagctgggactgcatgccgcgactccagtaactcctgcgatctgcccgagttttgtacgggtgccagcccccactgtcccgccaacgtgtaccttcatgacggtcatagttgccaggacgtagatggatactgctataacggtatttgccagacacatgagcaacagtgtgtcaccctgtggggtccgggtgccaaaccagcccccggaatctgtttcgagcgcgtcaattcggccggcgatccctacggtaactgcggcaaggtgtcaaagagttccttcgctaagtgcgaaatgagagatgctaagtgtggaaaaatccagtgccaggggggagcgagcaggccggtgataggcaccaacgcggtatccattgaaactaatatcccgcttcagcagggtggcagaatcttatgtagggggacacacgtatacctgggggatgacatgcctgatcctggtcttgtcttggcggggaccaagtgtgccgatggcaaaatttgtctgaatcgacagtgccagaatatctctgtctttggagtccatgaatgtgctatgcagtgccatggacgcggtgtatgcaataaccggaagaactgccactgtgaggcgcattgggcacctcctttctgtgataagtttggctttgggggaagtactgacagcggcccgatcagacaagccgataatcaggggttgaccataggcattctcgtcaccattctgtgcctgctggctgcaggcttcgtggtctatctaaagcggaagactcttatccggctactctttactaacaagaaaacaacaatagaaaagctcaggtgcgtgaggccaagtaggcccccacgcgggtttcagccatgtcaggcacacctgggccacctcggcaagggcctcatgaggaaaccaccagacagctaccctcccaaagacaatcctcgcagattgttgcagtgtcaaaacgtcgatatatccagaccacttaacgggctcaacgttccacaaccccaatccacgcagcgtgtgctcccacccctgcatcgagcaccccgcgcgccaagtgtcccagcccggcccctgccagctaagcccgctcttcgccaggcacaggggacgtgcaaaccgaatcctccgcagaaacccttaccggccgatcccctcgcccgcacaacaagactcacgcacgccctagcccgtaccccaggtcaatgggagacagggcttcgactcgctcctctgaggcctgctcctcagtacccacatcaggttcctcggagcacccatacagcatacattaaatag

SEQ ID NO: 138557 - DNA, 2730 bp, Artificial Sequence
  derived and/or modified sequence
atggccgcccggcccctgcctgtgtccccagcccgggccctgctgctggccctggccggggccctgctggccccctgtgaggcccggggcgtgtccctgtggaaccagggccgggcagatgaggtggtgtctgcctctgtgggcagcggggacctgtggatccctgtgaagagctttgacagcaagaaccaccctgaggtgctgaacatccggctgcagcgggagagcaaggagctgatcatcaacctggagagaaatgaaggcctcatcgccagcagcttcacagagacccactacctgcaggacggcacagatgtgtccctggccaggaactacaccgtcatcctgggccactgctactaccacggccacgtgcggggctacagcgacagcgctgtgtccctgagcacctgcagcggcctgcggggcctgattgtgtttgaaaatgaaagctatgtgctggagcccatgaagagcgccaccaaccgctacaagctgtttcctgccaagaagctgaagtctgtgcggggcagctgtggcagccaccacaacacccccaacctggccgccaagaatgtgtttcctccacccagccagacctgggcccggcggcacaagcgggagaccctgaaggccaccaagtatgtggagctggtgattgtggccgacaaccgggagttccagaggcagggcaaggacctggagaaggtgaagcagaggctcatcgagatcgccaaccacgtggacaagttctaccggcccctgaacatcagaattgtgctggtgggcgtggaggtgtggaatgacatggacaagtgcagcgtgtcccaggaccccttcaccagcctgcacgagttcctggactggaggaagatgaagctgctgcccaggaagagccatgacaatgcccagctggtgtctggagtgtacttccagggcaccaccatcggcatggcccccatcatgtccatgtgcacagctgaccagagcggcggcatcgtgatggaccacagcgacaaccccctgggcgctgctgtgaccctggcccacgagctgggccacaactttggcatgaaccacgacaccctggaccggggctgcagctgccagatggctgtggagaagggcggctgcatcatgaatgccagcacaggctaccccttccccatggtgttcagcagctgcagcaggaaggacctggagaccagcctggagaagggcatgggcgtgtgcctcttcaacctgcctgaggtgcgggagagctttggaggccagaagtgtggcaacagatttgtggaggagggggaggagtgtgactgtggggagcctgaggagtgcatgaaccgctgctgcaatgccaccacctgcaccctgaagccagatgctgtgtgtgcccacggcctgtgctgtgaggactgccagctgaagccagctggaacagcctgccgggacagcagcaacagctgtgacctgcctgagttctgcaccggggccagcccccactgcccagccaacgtgtacctgcatgatggccacagctgccaggatgtggatggctactgctacaacggcatctgccagacccatgagcagcagtgtgtgaccctgtggggccctggggccaagccagcccctggcatctgctttgagcgggtgaacagcgctggggacccctacggcaactgtgggaaggtgtccaagagcagctttgccaagtgtgagatgagagatgccaagtgtgggaagatccagtgccagggcggggccagcaggcctgtgattggcaccaatgctgtgtccattgagaccaacatccccctgcagcagggcggccgcatcctgtgccggggcacccacgtgtacctgggagatgacatgccagaccccggcctggtgctggccggcaccaagtgtgctgatggcaagatctgcctgaaccggcagtgccagaacatctctgtgtttggagtgcatgaatgtgccatgcagtgccacggccggggcgtgtgcaacaacaggaagaactgccactgtgaggcccactgggccccacccttctgtgacaagtttggatttggaggcagcacagacagcggccccatccggcaggccgacaaccagggcctgaccatcggcatcctggtgaccatcctgtgcctgctggccgccggctttgtggtgtacctgaagaggaagaccctcatccggctgctcttcaccaacaagaagaccaccatcgagaagctgcgctgtgtgcggcccagcaggcctccccggggcttccagccctgccaggcccacctgggccacctgggcaagggcctgatgaggaagcccccagacagctacccacccaaggacaacccccggcggctgctgcagtgccagaatgtggacatcagccggcccctgaatggcctgaatgtgccccagccccagagcacccagagggtgctgccccccctgcaccgggccccccgggcccccagcgtgcctgcccggcccctgcctgccaagccagccctgcggcaggcccagggcacctgcaagcccaaccccccccagaagcccctgcctgctgaccccctggcccggaccacccggctgacccacgccctggcccggaccccaggccagtgggagaccggcctgcggctggcccccctgcggcctgccccccagtacccccaccaggtgcccaggagcacccacacagcctacatcaagtag

SEQ ID NO: 138558 - DNA, 2730 bp, Artificial Sequence
  derived and/or modified sequence
atggccgcccggcccctgcccgtgagccccgcccgggccctgctgcttgcactggctggagccttgctggctccctgcgaagctcggggcgtgtcgctctggaatcagggacgggcggacgaggtcgtgagcgcttccgtgggaagtggagatctctggatcccagtgaagagttttgactcaaaaaaccatcccgaagtgctgaatattaggctgcaacgcgaatctaaggagctaatcattaatctggaaagaaatgagggtcttatcgcctcaagtttcacagagactcactacctgcaagatggcacggacgtgtctctggcacgaaattacaccgtcattctcggtcattgttattaccacggacacgtgcgggggtattctgattctgccgtgtctctgagtacctgctcaggcctgcgaggcctgattgtgttcgagaatgaaagctatgtgctggagccaatgaaatccgcgaccaaccgatacaaactgttccccgctaagaaactgaagagcgtgaggggcagctgcggctctcaccataatacaccaaacttagccgcaaaaaacgtgttcccccctcccagtcagacttgggctagacggcataaacgggagaccctcaaggctaccaagtacgtggagctagtgatagtcgccgacaaccgtgagtttcaacggcaaggtaaagacctggaaaaagttaagcagagactgattgaaattgccaatcacgttgataaattctacagaccactgaatattcgtattgtcttggtgggtgtcgaagtgtggaatgatatggacaagtgtagtgtgtctcaggatccctttacttccttgcatgagtttcttgactggcggaaaatgaagctgctgccgcgcaagtctcatgacaatgcccaacttgtgagcggcgtttacttccaaggcactactatcggcatggcaccaatcatgtctatgtgtactgccgatcagtctgggggtattgtaatggatcacagcgacaaccctttgggcgcagccgtgaccttggcgcacgaattggggcacaactttggtatgaatcacgatacccttgaccgcggctgctcttgtcagatggccgtagagaagggaggctgcattatgaatgcttccacagggtaccccttccccatggtgttctctagctgtagcagaaaagacctcgagacttccctcgaaaaggggatgggcgtctgcctgttcaatctccctgaagtgagagagtcattcggcggacagaaatgcgggaatagatttgtggaagagggcgaagagtgtgattgtggcgaacccgaggagtgcatgaatcgttgctgcaatgcaacgacctgtacattgaaacctgatgctgtgtgtgcccacggattatgctgcgaggactgccagctcaagccagcagggaccgcatgccgggatagctccaacagctgtgatctccctgagttttgcactggggcctcaccccactgccctgcaaatgtttatctccacgacggacattcctgccaggacgtggatggctactgttataacggtatttgccagacgcacgaacagcagtgtgtcacactctggggaccgggggccaaacccgcccccgggatttgctttgagagggtgaattccgcaggagatccttatgggaactgtggtaaagtatcaaagtcctctttcgccaagtgtgaaatgcgtgacgcaaagtgcggaaaaattcagtgccaaggcggtgctagcaggccggtgatcgggacaaacgcagtgagcatcgaaaccaatattccactgcaacaaggtggccgcatcctttgtcgggggacccacgtgtatctgggcgatgatatgcctgaccccggcttggttctggccgggactaaatgtgccgacgggaagatttgcctgaacagacagtgccagaacatttccgtgttcggcgtgcatgagtgcgctatgcagtgtcacgggaggggggtttgcaataataggaaaaattgccattgcgaggcccattgggctcctcctttctgtgataagttcggttttggaggatcgactgactccggtcctatccgacaggctgataatcaggggctgactattggtattctggttactattctgtgcctgttggctgcaggcttcgtggtgtatctcaagcgaaaaactctgattagactgctgttcactaacaagaaaactacaattgagaaattacgctgtgtgcgcccaagtaggcctcccaggggcttccagccctgccaggcccatttgggacacctcggtaaaggtcttatgcgaaagccacctgacagctatccccctaaggataacccacgcagattattgcagtgccaaaatgttgacatttccaggcctttgaacgggctaaatgtcccccagcctcaaagcacacagcgtgtcctgcccccattacaccgggcccccagagcacccagtgtgccggcccgacctttgcccgcaaaaccggcattacggcaggcccaaggtacctgcaagccaaatcccccacaaaaaccgttgccggcagaccctcttgcgcgcaccacccgattgacacatgccctggcccggacccccggacagtgggagactggtctgcggctagccccgctgcgacccgcaccacaatacccccaccaagttcctcgctccacccacacagcctatatcaagtag

SEQ ID NO: 138559 - DNA, 2730 bp, Artificial Sequence
  derived and/or modified sequence
atggcagcacgacccctaccggtttccccggcaagggcgctgctgctggctctggcaggcgctctcctggctccatgcgaagccagaggagtctctctttggaaccagggcagggctgatgaggttgtgtcagcctctgtgggttctggggacctctggatcccagttaagagcttcgattccaagaaccatccggaagtgcttaatatacgtctgcagagggaatctaaggaactgattatcaacctagaacgaaacgagggactgatagcatcatcgttcactgaaactcactatctacaagacggtactgacgtgagtctcgcccgaaattataccgtcattttgggacactgttactaccacggccacgtgcggggatattctgactccgctgtgagcctgtcaacttgctcaggattgcggggactgatcgtttttgaaaacgagtcctatgtgctagaaccaatgaaatcagccaccaacaggtataagttattcccagcaaagaaactgaagtccgtccggggaagctgcgggagccaccataacacacccaacctggcggcaaaaaatgtctttccaccaccgtctcagacatgggctcggaggcacaaacgagagacacttaaagctaccaaatacgttgaactggtgatagtggccgacaaccgcgaattccaaaggcaggggaaggacctggaaaaggtcaaacagcgacttatcgaaatagcaaaccacgtggataagttttataggcccttgaacatccgcatcgtacttgtaggcgtagaggtgtggaacgatatggacaaatgttcagtgagccaggatccatttacgagcctgcatgagttccttgactggcgaaagatgaagcttctgccacgcaaaagccatgacaacgcccagcttgttagcggtgtttatttccaaggaacaacaatcgggatggcccctatcatgtccatgtgtaccgcagatcagagtggtggcattgtgatggaccacagtgacaacccattgggagcagccgtcacactggcacacgagctgggccacaacttcgggatgaaccacgacacattggataggggatgcagctgccaaatggccgttgagaaaggcggatgcataatgaacgcgtcgactgggtaccctttccccatggtgttttctagctgctccagaaaggaccttgagacaagcctagaaaaggggatgggggtctgtctattcaatctgccagaagtccgcgaatcttttggcggacagaagtgcggcaaccggttcgttgaggagggagaggagtgcgactgcggggaaccggaagagtgtatgaatcggtgctgtaatgccacaacctgtactctgaaaccggatgcagtgtgcgcacatggactgtgctgcgaggattgccagctgaagcccgctggaactgcctgccgtgattcgagcaattcctgcgacctcccggagttttgtactggtgcaagcccccactgtcccgctaatgtgtaccttcacgacggtcacagctgtcaggacgtcgacggctactgctacaacgggatctgccaaacacatgagcagcaatgcgtaacactctggggccctggagctaagccagcacctggcatttgcttcgagagagtgaatagcgcaggagacccctacggaaactgtgggaaggtctccaagtcatcattcgcaaagtgcgagatgagggacgccaagtgcggaaagatccagtgccaagggggtgcctctagacctgtgatcggcacaaacgccgtatctatcgaaacaaatattccacttcagcaaggtggtaggatcctgtgtcggggtactcacgtgtacttgggggacgacatgccagatcccggactggtgctggccggtacaaaatgcgccgatggcaagatctgcctgaacagacaatgtcagaacatatccgtgtttggggtgcatgagtgcgccatgcagtgccacgggaggggcgtctgtaacaaccgcaaaaattgccactgtgaagcccactgggcccctcccttttgcgataaatttggctttggtggctccactgactccggacctatacgacaagccgataaccagggactcaccatcggcattttggtgacgattctttgtttgctcgcagccggattcgtggtatatcttaagcgtaagactttgattagattactgttcaccaataagaaaacgacgatcgagaagttaaggtgcgtaagaccctccaggccccctaggggatttcagccatgtcaggcccaccttggacacctgggaaaaggcctcatgcggaagcccccagactcttatccccctaaggacaaccccaggagactgttgcaatgccagaacgtcgacattagcagacctctcaatggactcaatgtaccacagcctcagtccacacaacgagtacttccccctttgcaccgtgcgccacgggctcctagcgtgccagcaaggccactgcctgctaagccggcactccggcaggctcaaggcacttgcaaacctaacccaccacagaagcctctgcccgctgacccgttggctcggactacgagactgacacatgcactggcacggacacccggacagtgggagactggccttcgcctggccccactgaggccagccccacaatacccccaccaggtcccacggagtacacacaccgcctatataaagtag

SEQ ID NO: 138560 - DNA, 2730 bp, Artificial Sequence
  derived and/or modified sequence
atggccgccagacccctgcccgtgagccccgccagagccctgctgctggccctggccggcgccctgctggccccctgcgaggccagaggcgtgagcctgtggaaccagggcagagccgacgaggtggtgagcgccagcgtgggcagcggcgacctgtggatccccgtgaagagcttcgacagcaagaaccaccccgaggtgctgaacatcagactgcagagagagagcaaggagctgatcatcaacctggagagaaacgagggcctgatcgccagcagcttcaccgagacccactacctgcaggacggcaccgacgtgagcctggccagaaactacaccgtgatcctgggccactgctactaccacggccacgtgagaggctacagcgacagcgccgtgagcctgagcacctgcagcggcctgagaggcctgatcgtgttcgagaacgagagctacgtgctggagcccatgaagagcgccaccaacagatacaagctgttccccgccaagaagctgaagagcgtgagaggcagctgcggcagccaccacaacacccccaacctggccgccaagaacgtgttccccccccccagccagacctgggccagaagacacaagagagagaccctgaaggccaccaagtacgtggagctggtgatcgtggccgacaacagagagttccagagacagggcaaggacctggagaaggtgaagcagagactgatcgagatcgccaaccacgtggacaagttctacagacccctgaacatcagaatcgtgctggtgggcgtggaggtgtggaacgacatggacaagtgcagcgtgagccaggaccccttcaccagcctgcacgagttcctggactggagaaagatgaagctgctgcccagaaagagccacgacaacgcccagctggtgagcggcgtgtacttccagggcaccaccatcggcatggcccccatcatgagcatgtgcaccgccgaccagagcggcggcatcgtgatggaccacagcgacaaccccctgggcgccgccgtgaccctggcccacgagctgggccacaacttcggcatgaaccacgacaccctggacagaggctgcagctgccagatggccgtggagaagggcggctgcatcatgaacgccagcaccggctaccccttccccatggtgttcagcagctgcagcagaaaggacctggagaccagcctggagaagggcatgggcgtgtgcctgttcaacctgcccgaggtgagagagagcttcggcggccagaagtgcggcaacagattcgtggaggagggcgaggagtgcgactgcggcgagcccgaggagtgcatgaacagatgctgcaacgccaccacctgcaccctgaagcccgacgccgtgtgcgcccacggcctgtgctgcgaggactgccagctgaagcccgccggcaccgcctgcagagacagcagcaacagctgcgacctgcccgagttctgcaccggcgccagcccccactgccccgccaacgtgtacctgcacgacggccacagctgccaggacgtggacggctactgctacaacggcatctgccagacccacgagcagcagtgcgtgaccctgtggggccccggcgccaagcccgcccccggcatctgcttcgagagagtgaacagcgccggcgacccctacggcaactgcggcaaggtgagcaagagcagcttcgccaagtgcgagatgagagacgccaagtgcggcaagatccagtgccagggcggcgccagcagacccgtgatcggcaccaacgccgtgagcatcgagaccaacatccccctgcagcagggcggcagaatcctgtgcagaggcacccacgtgtacctgggcgacgacatgcccgaccccggcctggtgctggccggcaccaagtgcgccgacggcaagatctgcctgaacagacagtgccagaacatcagcgtgttcggcgtgcacgagtgcgccatgcagtgccacggcagaggcgtgtgcaacaacagaaagaactgccactgcgaggcccactgggccccccccttctgcgacaagttcggcttcggcggcagcaccgacagcggccccatcagacaggccgacaaccagggcctgaccatcggcatcctggtgaccatcctgtgcctgctggccgccggcttcgtggtgtacctgaagagaaagaccctgatcagactgctgttcaccaacaagaagaccaccatcgagaagctgagatgcgtgagacccagcagaccccccagaggcttccagccctgccaggcccacctgggccacctgggcaagggcctgatgagaaagccccccgacagctacccccccaaggacaaccccagaagactgctgcagtgccagaacgtggacatcagcagacccctgaacggcctgaacgtgccccagccccagagcacccagagagtgctgccccccctgcacagagcccccagagcccccagcgtgcccgccagacccctgcccgccaagcccgccctgagacaggcccagggcacctgcaagcccaaccccccccagaagcccctgcccgccgaccccctggccagaaccaccagactgacccacgccctggccagaacccccggccagtgggagaccggcctgagactggcccccctgagacccgccccccagtacccccaccaggtgcccagaagcacccacaccgcctacatcaagtag

SEQ ID NO: 138561 - DNA, 7938 bp, Artificial Sequence
  derived and/or modified sequence
cactaacgctcttcctagtccccgggccaactcggacagtttgctcatttattgcaacggtcaaggctggcttgtgccagaacggcgcgcgcgcgcgcacgcacgcacacacacggggggaaacttttttaaaaatgaaaggctagaagagctcagcggcggcgcgggcgctgcgcgagggctccggagctgactcgccgaggcaggaaatccctccggtcgcgacgcccggccccggctcggcgcccgcgtgggatggtgcagcgctcgccgccgggcccgagagctgctgcactgaaggccggcgacgatggcagcgcgcccgctgcccgtgtcccccgcccgcgccctcctgctcgccctggccggtgctctgctcgcgccctgcgaggcccgaggggtgagcttatggaaccaaggaagagctgatgaagttgtcagtgcctctgttgggagtggggacctctggatcccagtgaagagcttcgactccaagaatcatccagaagtgctgaatattcgactacaacgggaaagcaaagaactgatcataaatctggaaagaaatgaaggtctcattgccagcagtttcacggaaacccactatctgcaagacggtactgatgtctccctcgctcgaaattacacggtaattctgggtcactgttactaccatggacatgtacggggatattctgattcagcagtcagtctcagcacgtgttctggtctcaggggacttattgtgtttgaaaatgaaagctatgtcttagaaccaatgaaaagtgcaaccaacagatacaaactcttcccagcgaagaagctgaaaagcgtccggggatcatgtggatcacatcacaacacaccaaacctcgctgcaaagaatgtgtttccaccaccctctcagacatgggcaagaaggcataaaagagagaccctcaaggcaactaagtatgtggagctggtgatcgtggcagacaaccgagagtttcagaggcaaggaaaagatctggaaaaagttaagcagcgattaatagagattgctaatcacgttgacaagttttacagaccactgaacattcggatcgtgttggtaggcgtggaagtgtggaatgacatggacaaatgctctgtaagtcaggacccattcaccagcctccatgaatttctggactggaggaagatgaagcttctacctcgcaaatcccatgacaatgcgcagcttgtcagtggggtttatttccaagggaccaccatcggcatggccccaatcatgagcatgtgcacggcagaccagtctgggggaattgtcatggaccattcagacaatccccttggtgcagccgtgaccctggcacatgagctgggccacaatttcgggatgaatcatgacacactggacaggggctgtagctgtcaaatggcggttgagaaaggaggctgcatcatgaacgcttccaccgggtacccatttcccatggtgttcagcagttgcagcaggaaggacttggagaccagcctggagaaaggaatgggggtgtgcctgtttaacctgccggaagtcagggagtctttcgggggccagaagtgtgggaacagatttgtggaagaaggagaggagtgtgactgtggggagccagaggaatgtatgaatcgctgctgcaatgccaccacctgtaccctgaagccggacgctgtgtgcgcacatgggctgtgctgtgaagactgccagctgaagcctgcaggaacagcgtgcagggactccagcaactcctgtgacctcccagagttctgcacaggggccagccctcactgcccagccaacgtgtacctgcacgatgggcactcatgtcaggatgtggacggctactgctacaatggcatctgccagactcacgagcagcagtgtgtcacgctctggggaccaggtgctaaacctgcccctgggatctgctttgagagagtcaattctgcaggtgatccttatggcaactgtggcaaagtctcgaagagttcctttgccaaatgcgagatgagagatgctaaatgtggaaaaatccagtgtcaaggaggtgccagccggccagtcattggtaccaatgccgtttccatagaaacaaacatccccctgcagcaaggaggccggattctgtgccgggggacccacgtgtacttgggcgatgacatgccggacccagggcttgtgcttgcaggcacaaagtgtgcagatggaaaaatctgcctgaatcgtcaatgtcaaaatattagtgtctttggggttcacgagtgtgcaatgcagtgccacggcagaggggtgtgcaacaacaggaagaactgccactgcgaggcccactgggcacctcccttctgtgacaagtttggctttggaggaagcacagacagcggccccatccggcaagcagataaccaaggtttaaccataggaattctggtgaccatcctgtgtcttcttgctgccggatttgtggtttatctcaaaaggaagaccttgatacgactgctgtttacaaataagaagaccaccattgaaaaactaaggtgtgtgcgcccttcccggccaccccgtggcttccaaccctgtcaggctcacctcggccaccttggaaaaggcctgatgaggaagccgccagattcctacccaccgaaggacaatcccaggagattgctgcagtgtcagaatgttgacatcagcagacccctcaacggcctgaatgtccctcagccccagtcaactcagcgagtgcttcctcccctccaccgggctccacgtgcacctagcgtccctgccagacccctgccagccaagcctgcacttaggcaggcccaggggacctgtaagccaaacccccctcagaagcctctgcctgcagatcctctggccagaacaactcggctcactcatgccttggccaggaccccaggacaatgggagactgggctccgcctggcacccctcagacctgctccacaatatccacaccaagtgcccagatccacccacaccgcctatattaagtgagaagccgacaccttttttcaacagtgaagacagaagtttgcactatctttcagctccagttggagttttttgtaccaacttttaggattttttttaatgtttaaaacatcattactataagaactttgagctactgccgtcagtgctgtgctgtgctatggtgctctgtctacttgctcaggtacttgtaaattattaatttatgcagaatgttgattacagtgcagtgcgctgtagtaggcatttttaccatcactgagttttccatggcaggaaggcttgttgtgcttttagtattttagtgaacttgaaatatcctgcttgatgggattctggacaggatgtgtttgctttctgatcaaggccttattggaaagcagtcccccaactacccccagctgtgcttatggtaccagatgcagctcaagagatcccaagtagaatctcagttgattttctggattccccatctcaggccagagccaaggggcttcaggtccaggctgtgtttggctttcagggaggccctgtgccccttgacaactggcaggcaggctcccagggacacctgggagaaatctggcttctggccaggaagctttggtgagaacctgggttgcagacaggaatcttaaggtgtagccacaccaggatagagactggaacactagacaagccagaacttgaccctgagctgaccagccgtgagcatgtttggaaggggtctgtagtgtcactcaaggcggtgcttgatagaaatgccaagcacttctttttctcgctgtcctttctagagcactgccaccagtaggttatttagcttgggaaaggtggtgtttctgtaagaaacctactgcccaggcactgcaaaccgccacctccctatactgcttggagctgagcaaatcaccacaaactgtaatacaatgatcctgtattcagacagatgaggctttccatgggaccacaactattttcagatgtgaaccattaaccagatctagtcaatcaagtctgtttactgcaaggttcaacttattaacaattaggcagactctttatgcttgcaaaaactacaaccaatggaatgtgatgttcatgggtatagttcatgtctgctatcattattcgtagatattggacaaagaaccttctctatggggcatcctctttttccaacttggctgcaggaatctttaaaagatgcttttaacagagtctgaacctatttcttaaacacttgcaacctacctgttgagcatcacagaatgtgataaggaaatcaacttgcttatcaacttcctaaatattatgagatgctggcttgggcagcatccccttgaactcttcactcttcaaatgcctgactagggagccatgtttcacaaggtctttaaagtgactaatggcatgagaaatacaaaaatactcagataaggtaaaatgccatgatgcctctgtcttctggactggttttcacattagaagacaattgacaacagttacataattcactctgagtgttttatgagaaagccttcttttgggggtcaacagttttcctatgctttgaaacagaaaaatatgtaccaagaatcttggtttgccttccagaaaacaaaactgcatttcactttcccggtgttccccactgtatctaggcaacatagtattcatgactatggataaactaaacacgtgacacaaacacacacaaaagggaacccagctctaatacattccaactcgtatagcatgcatctgtttattctatagttattaagttctttaaaatgtaaagccatgctggaaaataatactgctgagatacatacagaattactgtaactgattacacttggtaattgtactaaagccaaacatatatatactattaaaaaggtttacagaattttatggtgcattacgtgggcattgtctttttagatgcccaaatccttagatctggcatgttagcccttcctccaattataagaggatatgaactgagtttttcttttgttgtttgttcttagctgtaattcctatgcttctatttcagagagccaggagagtttgatattaaaggaggttaaaactgtgatcttatgccatgtcatcaatggccacttaggggccatggctgatgacacattcttatctctacagtactaatgtgttattatagagccatgcattttatttctgaataagaacatatttaaactaatattcccttacaatatggacagtattaatccttccaagatgcagtatttatcaagtgaagcatatttagcagcaaattccattttaacataacttaggaaccaataaccagggtgttttgtggttgggggaggcacggggtggagtattcttttttatatcctcaaaacaaaaaaaatcaatacttatatttcaatggcaatctagtatttttttaaaagactgtataggcatgaataatagaggtggtttgagttttgtagggccatcacctggaaagtcaatgtgactagacacaaagtagcccagaggctacttttcttcctacagcttattatagttgtaggttctatgacctcacttcatgggttccaggcaattccgctgaaaggtttgtctcctgaaattttttaagtttgttttcctgacacatgtaatcagatgtgtagcaaccgagggaaacgaagcctaacattctccattgtggaaatacacacaggaggttacatttcacagcgtggatttttccagcttacacatgtgggatgacatcacagaaaccacaaaagcagcaaattaaactgtaggagagtcaatactcctgacgagtctcggggggggggcatttttatgccttcttaactttatgagaattctcaggctgaactataggccattgttcccaggcaaatcaatacatcaatgcatcctcaaaaaaaaaaaaaaaaaaaaaaaaccggctaaaactgtgtcaaaatgttcttaaggagcctatggtctccacggtgctaaaaagagcctggtgctgggccgactggcagggctgagcatcctcctgccccctcgccactgatgtttactaagcactctgagccaatgagacccccagcagcagaaagggcacaaggtggcgccagggcagcagggccagatctttctcatgcacctcgacctcttgcagactttcttcgtgagatgtactactcatttcaaaactgctttgcagggctcccctatgtattcggggggcccacggcacactcaggctggagatccttcctcactgcgctcaagatggcctcagccagacaccagttacccagctgaaagtcacaatccctcccagaagtctcccaacactagtgctgaccagaggtggggctctcaggctaggagtttcacacacaatgacaggctgctgggggacattgcaggaccccttttcctctcctctccatgctagaagccagccctaggcagctgcagttactccctgtgactcagcagcaggctgattcaacacagctgcccacacaaagccagtggctaatacatctgtttacctttccctatcacccagacacaagcccctttcccaggtcaaaccacaggccgatgcatctccagtttgacagtcaaatcactacttccattgctactttagatcagccaaagtggtgactgctgcagtgtgtggctatccctacaaggcccacccaagggatgcccaaagcccaaccttctccagggctgcagcccagagcaaccccaccagcctaagtccagcagaggacctcccacccaatgtcttgttctaattagaaggggaagttagccacagaaaatcaacttatctataattacaaaattctcttgactcaccttaaagttcctattgacatctactgcttttaaacctatttgaaaactctgatactaaaacaaatgacactctaagaaagtttgggagccccatgctgagaaccatttctgtgcagtgaggatgtttccagaagctacttacctacatgtgaatgtgccattttctttccttttgtagagaaaatcccctttactttttggaacagtaatggcagcttctagtacagccattacagtttcatatgagaaaaattaagaataactataaaattgttaaaatatccaataatggataatgatggccagaagatttaacatacaaagtaattctcaatgtaaagctattcagctcttccaggttgaatgccctgtaacccaccctgaccttccacatcatcttcaaaaagcagtttctctgttccccatgattctcctataaggtaactctttagtcctccatttagcacattttaaatcctccaaagaataagtatcatgtgattattttagctttacaaaaaaaaagttgaatggcgttttattttcatggcctataagcaggtaccttagtagggcagatataggaaaaacaaattagagcaaaacaaatcctctacaaatccaaggcaggaaaagtggtggcagagtgactcattctcctgtccctcccatcaggtcaaatcaggaggctgcagtgaatgcctgttctttgaatgtgtagcagttgttcctgtaactctttaaaacttggctataggctgtttagcacagtacagattaaagatacagttacgtaaacagcaaagtaattttatagtgcttcatccatttatcatgctttggtttgctaattttttcacatacctttttctatcacagtctgttgcttttgtacacatttctcatattggggttcgacaggtaaacacaaactgctatttcagtagaaaaagttattgttatgaatattaaacccaataaattgtataaaggtaaatatcaatgtg

SEQ ID NO: 138562 - protein, 373 aa, Artificial Sequence
  derived and/or modified sequence
MLLGLAAMELKVWVDGIQRVVCGVSEQTTCQEVVIALAQAIGQTGRFVLVQRLREKERQLLPQECPVGAQATCGQFASDVQFVLRRTGPSLAGRPSSDSCPPPERCLIRASLPVKPRAALGCEPRKTLTPEPAPSLSRPGPAAPVTPTPGCCTDLRGLELRVQRNAEELGHEAFWEQELRREQAREREGQARLQALSAATAEHAARLQALDAQARALEAELQLAAEAPGPPSPMASATERLHQDLAVQERQSAEVQGSLALVSRALEAAERALQAQAQELEELNRELRQCNLQQFIQQTGAALPPPPRPDRGPPGTQGPLPPAREESLLGAPSESHAGAQPRPRGGPHDAELLEVAAAPAPEWCPLAAQPQAL

SEQ ID NO: 138563 - DNA, 1122 bp, Artificial Sequence
  derived and/or modified sequence
atgctcctcggcttggcagcgatggagttgaaggtttgggtggacggcatccagcgggtggtctgcggcgtttccgagcagaccacgtgtcaggaagttgtgatcgccctggcccaggccatcggacagactggacgatttgtgctggtccagagactgagggaaaaagaacgccagttattgccccaggaatgtcctgtaggcgcacaagctacgtgtggacagttcgcgtcagatgtgcagttcgtattgaggagaaccggacctagcctggctgggaggccgtccagtgactcttgcccccccccagaaagatgtctcattagggcctcactgcccgtgaagcccagagcggcactcgggtgcgagccacggaagactctaactccagagccagctccttcattgtctcgccccgggcccgctgcgcccgtgactcccactcccgggtgttgtactgacctccgtggcctcgaactccgggttcaacgaaatgccgaggagctcggtcacgaggcattctgggaacaagagctgcgccgcgagcaagcgcgagagcgggaggggcaggctcgtctgcaggccctgtccgctgctaccgccgagcatgcagcccgtctccaggccctcgatgcacaagcacgtgctttagaagccgaactgcagcttgcagcggaggcgcctggccccccttctcccatggccagtgccacagagcgcctgcaccaggacctggccgtgcaagagagacaaagtgcagaggtccagggaagcctcgcgctggtctcccgcgctttggaggctgctgaacgggctctgcaggctcaggcgcaagagttggaggaactgaatcgggagttgcggcagtgtaacctgcaacaattcattcagcagacgggggccgccctacccccaccgcccaggcccgatcggggcccccctggcactcaggggccgctgccaccagctagggaggagtctctactcggcgccccgagtgaatcccacgctggagcacagcccaggccaagggggggtccacacgatgctgagctgctcgaggttgctgctgctccagcaccggagtggtgtcccttagccgctcaacctcaggctctctag

SEQ ID NO: 138564 - DNA, 1122 bp, Artificial Sequence
  derived and/or modified sequence
atgctgttgggcctggctgccatggaactgaaagtctgggtcgacggcattcagcgcgtggtgtgcggcgttagcgagcagactacatgtcaagaggtcgtgattgcgctagctcaggctattggccagaccggcagattcgtactggtgcagcggctccgtgagaaggaacggcaactcctcccacaggagtgtccggtcggagcccaggcaacctgcggccagttcgcctcggatgtccagtttgtgctcagacgcactggacctagtctggcagggagaccctcatccgatagctgtccccctcccgagcggtgcctcatcagagcgtctctacctgtgaagcctcgtgctgccttggggtgtgaaccaagaaaaacactaacgccagagcctgcccctagcttaagtcgcccagggcccgctgctcccgtcaccccgacacctggatgttgcactgacttgcgcggcctcgagcttcgagtgcagagaaacgctgaggaactcggccacgaggccttctgggaacaggaactcagaagggagcaggccagggagcgtgagggccaggccagactgcaagccctgagcgcagccactgcagagcacgccgcaaggctgcaggcactggatgcccaggcaagagcactcgaagctgagttgcagctcgctgcggaagccccaggacctccttcaccgatggcatctgccacagaacgcctgcatcaggatctggcagtgcaggaacggcagagcgccgaggtgcagggaagcctcgcactggtttctagagctctggaggctgctgaacgggctctgcaggcacaggcacaggagctggaggaacttaacagagagcttcgccagtgtaatctgcagcaattcatccagcagaccggggccgctctcccacctccaccaaggcccgaccgcggccctcccggcactcagggacctcttcctcctgcacgagaagagtccttactgggtgcccccagtgaatcacacgccggtgcccaaccaaggccccgcggggggccacacgatgcagagcttttggaagtggctgcagcccctgctcctgagtggtgtcctttagccgctcagcctcaggccttatag

SEQ ID NO: 138565 - DNA, 1122 bp, Artificial Sequence
  derived and/or modified sequence
atgctgctgggcctggccgccatggagctgaaggtgtgggtggatggcatccagagggtggtgtgtggggtgtctgagcagaccacctgccaggaggtggtgattgccctggcccaggccatcggccagacaggccgctttgtgctggtgcagaggctgcgggagaaggagcggcagctgctgccccaggagtgccctgtgggcgcccaggccacctgtggccagtttgccagtgatgtgcagtttgtgctgcggaggacaggccccagcctggccggccggcccagcagtgacagctgccccccacctgagcgctgcctgatccgggccagcctgcctgtgaagccccgggccgccctgggctgtgagcccaggaagaccctgaccccagagcccgcccccagcctgagcaggcctggccctgctgcccctgtgacccccaccccaggctgctgcacagacctgcggggcctggagctgcgggtgcagagaaatgctgaggagctgggccacgaggccttctgggagcaggagctgcggcgggagcaggcccgggagcgggagggccaggcccggctgcaggccctgtctgctgccacagctgagcacgccgcccggctgcaggccctggatgcccaggcccgggccctggaggccgagctgcagctggccgctgaggcccctggcccccccagccccatggccagcgccacagagcggctgcaccaggacctggccgtgcaggagcggcagagcgctgaggtgcagggcagcctggccctggtgtcccgggccctggaggccgctgagcgggccctgcaggcccaggcccaggagctggaggagctgaaccgggagctgcggcagtgcaacctgcagcagttcatccagcagacaggagctgccctgcccccaccacccaggccagaccggggccccccaggcacccagggccccctgcccccagcccgggaggagagcctgctgggcgcccccagcgagagccatgctggggcccagccccggccccggggcggcccccatgatgctgagctgctggaggtggccgccgccccagcccctgagtggtgccccctggccgcccagccccaggccctgtag

SEQ ID NO: 138566 - DNA, 1122 bp, Artificial Sequence
  derived and/or modified sequence
atgctgctgggcctggccgccatggagctgaaggtgtgggtggacggcattcaacgagtggtgtgcggggtatctgaacaaacaacttgccaggaggtcgtcatcgctctggctcaagcgatcggccagacaggccggttcgtgcttgtccagaggctcagggagaaagagcgccaactcctgccacaggagtgtccagttggagcccaggctacctgcgggcagtttgcgagtgacgtgcaattcgtcctgcgacgcacaggaccaagcctcgccgggcggccctcctcggattcctgccctcctccagagaggtgcttaatcagagcctctcttccagtgaaacccagggctgccctaggctgcgaacccagaaaaaccttgaccccagaacccgcccctagcttgtcccgtcctggtcccgccgccccagtgacacccacccccggatgttgtaccgatttgcggggtttggagcttagggtgcaacggaacgcagaagaactgggccacgaggccttttgggagcaggagttgagacgcgaacaggcgcgggagagagaaggccaggctcggctgcaggcattgtcggccgccacagctgaacacgccgcgcgtttgcaggcgctcgatgctcaagccagggccttggaagctgagctccagctggcggccgaagcgccaggaccccccagtccgatggcaagtgccacagaaagacttcaccaggatcttgccgtgcaggaacgccaaagcgccgaggtgcagggctctttagctctggtgtctagggccctggaagctgctgagcgcgccctgcaggcccaagctcaggagcttgaggaactcaacagagaactgcggcagtgcaatctccagcagttcatacagcaaacgggtgccgctctcccaccaccgcctagacccgacagagggccacctggaactcaagggcctttaccccctgcccgagaagagagcttactaggggccccctccgagagccatgcgggggcccaaccccggcccagaggaggtcctcacgatgccgaactgcttgaggttgccgcggcgccagcccccgagtggtgcccgcttgcagctcagccacaggcactgtag

SEQ ID NO: 138567 - DNA, 1122 bp, Artificial Sequence
  derived and/or modified sequence
atgctgctgggcctggccgccatggagctgaaggtgtgggtggacggcattcagagagtcgtctgcggcgtctcggaacagaccacatgccaggaggtggtcatcgccctggctcaagctatcggccagactggtaggttcgtgctcgtccagagactgagagaaaaagagaggcagctgctaccacaggagtgtccggtgggtgcacaagcaacctgcggtcagtttgcatccgacgtgcagttcgtgttgaggaggactggcccctctctggcggggcgcccctcttctgacagctgccccccgcctgaaaggtgtcttatacgagcttcgctgccagttaagcctagagcggccctgggatgcgagccccgtaaaaccctcactcctgaacccgccccttctttaagcaggcctggcccagccgctccagtgacccccacaccgggctgttgtacagatctacgtggcctggaactccgggtgcagcggaacgccgaggagctgggtcacgaggccttctgggagcaggaactgagacgggagcaggcccgggaacgggagggtcaggcacgcctccaggccctcagcgcagctacagctgagcacgccgccagactgcaggccctggatgcacaggcccgggcactcgaggccgaattgcaactcgccgccgaagcgcctggccctccctcacctatggcatccgccacggagcgcttacatcaggaccttgctgtccaggagaggcagtccgccgaggtccagggcagtttggcactcgtgagcagagcactcgaagctgctgaacgcgcattgcaagcgcaggctcaggagctcgaggagctcaatagggaattaagacaatgtaacttacagcagttcatacagcagaccggcgctgcgctgccacccccgcctagaccagaccgaggaccacctgggacccaaggccctctgccaccagccagggaggaatctctcttgggggcaccatcagaaagtcacgcaggcgctcagcccaggccccggggtggccctcacgacgcagagctgttggaagttgcagccgcacctgccccagaatggtgcccgttggccgcacaaccccaagcgctgtag

SEQ ID NO: 138568 - DNA, 1122 bp, Artificial Sequence
  derived and/or modified sequence
atgctgttggggcttgctgccatggaacttaaggtatgggtggacggcattcagagggtggtttgcggtgtgtctgagcaaacaacttgtcaagaagtggtcatcgcactggcccaagctattgggcagactggacgattcgtgctggtgcagcggctgagagagaaagagcgtcaactcttgcctcaagagtgccccgtgggtgcacaagctacttgcggccagtttgcctcagatgtgcagttcgtcttaagacggactgggccttcactggccggaagaccatcttctgatagctgccctcctcctgagcgatgtttgatcagagcatccttgccggtgaaacccagggccgcattggggtgcgaaccacgcaaaacattaaccccagaacccgctcccagtctttcccgcccaggtccggctgccccagtaacgccaacacctgggtgctgcaccgacttaagggggcttgagctgcgcgtccagagaaacgctgaagaactgggtcacgaggccttctgggagcaggagttgcggagggaacaggccagagagcgcgaggggcaggcacggcttcaggccctctccgctgcaacagcagagcacgccgcaagactgcaggcactggatgcacaggctcgagccctcgaggccgagctccagctggctgctgaagctcccggacccccttcaccaatggcgtccgctaccgaaagactgcaccaggacctggccgtccaggaacgtcaaagcgctgaagtgcagggttcgctggcacttgtgagccgggctcttgaagccgctgaaagggccttgcaggcgcaggcacaggagctcgaagaactgaaccgcgaattgcggcagtgtaatttacaacagtttattcaacagaccggcgcagctctgccgcctccacctagacccgataggggacctcccggaacccaggggccactcccacctgccagggaggagagtcttttgggagctcctagcgagtcccacgctggagcccagcccaggcccagggggggtccgcacgatgctgagttactggaggtcgccgctgccccagcccctgaatggtgtccactggctgcccagccccaggctctatag

SEQ ID NO: 138569 - DNA, 1122 bp, Artificial Sequence
  derived and/or modified sequence
atgctgctaggacttgccgctatggagctgaaggtatgggtggacggaatccagcgcgtagtctgcggcgtttctgagcagaccacatgccaggaagtggtcatcgcgttggctcaggctattggccagactggacgtttcgtgcttgtgcagaggctcagagaaaaggaacgccaattgctgccccaggagtgccccgtcggagctcaagctacatgcgggcagtttgcaagcgacgtgcagttcgtgttgagaaggaccggtccctcgctggctggcagaccaagcagcgactcatgccctccgcctgagcgctgtctgattcgggcaagcctcccagttaagcctcgcgctgccctgggatgtgagcccaggaaaacactgactcccgagccggctccctccctctcccgacctggccctgccgctccagtcacccctacaccgggttgctgcactgacctgaggggcctggaactgagagtgcagaggaacgcagaggagctgggacatgaagctttctgggaacaggaacttagaagggagcaagcccgagaaagggagggacaggccagactgcaggccctgtcagctgccacagcagagcacgctgccaggctccaagctttggatgcccaagccagggctctcgaggcggagttgcagctggccgctgaggcccctgggccacctagccctatggcctccgcaaccgaacggctgcaccaggatctagcagtccaggaacgacaatctgcggaagtccagggatccctggcattggtatcccgcgctttggaagcggctgaacgggctctccaggcccaggctcaggagttggaggaactaaatagggaactaagacagtgtaatctgcagcagttcattcagcaaaccggcgcagctcttccgccaccgccacggcctgaccgtggcccacccggtacgcagggtcccctgccccctgcaagggaggaaagtctgctcggcgcaccgtcagaatcccatgccggagcacagccacgacccagggggggtccccatgatgctgagttgctagaggtagccgcagctcccgctccagagtggtgccctcttgccgcacagccgcaggctctctag

SEQ ID NO: 138570 - DNA, 1122 bp, Artificial Sequence
  derived and/or modified sequence
atgctgctgggcctggccgccatggagctgaaggtgtgggtggacggcatccagagagtggtgtgcggcgtgagcgagcagaccacctgccaggaggtggtgatcgccctggcccaggccatcggccagaccggcagattcgtgctggtgcagagactgagagagaaggagagacagctgctgccccaggagtgccccgtgggcgcccaggccacctgcggccagttcgccagcgacgtgcagttcgtgctgagaagaaccggccccagcctggccggcagacccagcagcgacagctgccccccccccgagagatgcctgatcagagccagcctgcccgtgaagcccagagccgccctgggctgcgagcccagaaagaccctgacccccgagcccgcccccagcctgagcagacccggccccgccgcccccgtgacccccacccccggctgctgcaccgacctgagaggcctggagctgagagtgcagagaaacgccgaggagctgggccacgaggccttctgggagcaggagctgagaagagagcaggccagagagagagagggccaggccagactgcaggccctgagcgccgccaccgccgagcacgccgccagactgcaggccctggacgcccaggccagagccctggaggccgagctgcagctggccgccgaggcccccggcccccccagccccatggccagcgccaccgagagactgcaccaggacctggccgtgcaggagagacagagcgccgaggtgcagggcagcctggccctggtgagcagagccctggaggccgccgagagagccctgcaggcccaggcccaggagctggaggagctgaacagagagctgagacagtgcaacctgcagcagttcatccagcagaccggcgccgccctgccccccccccccagacccgacagaggcccccccggcacccagggccccctgccccccgccagagaggagagcctgctgggcgcccccagcgagagccacgccggcgcccagcccagacccagaggcggcccccacgacgccgagctgctggaggtggccgccgcccccgcccccgagtggtgccccctggccgcccagccccaggccctgtag

SEQ ID NO: 138571 - protein, 194 aa, Artificial Sequence
  derived and/or modified sequence
MPNWGGGAKCGACEKTVYHAEEIQCNGRSFHKTCFHCMACRKALDSTTVAAHESEIYCKVCYGRRYGPKGIGYGQGAGCLSTDTGEHLGLQFQQSPKPARSVTTSNPSKFTAKFGESEKCPRCGKSVYAAEKVMGGGKPWHKTCFRCAICGKSLESTNVTDKDGELYCKVCYAKNFGPTGIGFGGLTQQVEKKE

SEQ ID NO: 138572 - DNA, 1341 bp, Artificial Sequence
  derived and/or modified sequence
caggccaaggctggtgacagccttcatatatttaaagaggacaagagcccctcagactcagttgagctgaacggagtccacacaggcagacttgaccttgaccagatagtcttcaagatgccaaactggggcggaggcgcaaaatgtggagcctgtgaaaagaccgtctaccatgcagaagaaatccagtgcaatggaaggagtttccacaagacgtgtttccactgcatggcctgcaggaaggctcttgacagcacgacagtcgcggctcatgagtcggagatctactgcaaggtgtgctatgggcgcagatatggccccaaagggatcgggtatggacaaggcgctggctgtctcagcacagacacgggcgagcatctcggcctgcagttccaacagtccccaaagccggcacgctcagttaccaccagcaacccttccaaattcactgcgaagtttggagagtccgagaagtgccctcgatgtggcaagtcagtctatgctgctgagaaggttatgggaggtggcaagccttggcacaagacctgtttccgctgtgccatctgtgggaagagtctggagtccacaaatgtcactgacaaagatggggaactttattgcaaagtttgctatgccaaaaattttggccccacgggtattgggtttggaggccttacacaacaagtggaaaagaaagaatgaagaggtgcgccgtttctcagattttttgcgagcctaaaacacttgccaagtaatcctgcacagatcgatacctttccccaaatagcctctcctttgtagtcgtacattatgtgtttctcctcagaagtgatcaggtctttactgaatgttagaagaggcctttggaagaaaattatgtaaagtttaatctataacaaatgctttattatttataatgcttggaatgggagaggcaataaataaatgttttagtgctatcttgtatggctctagatcttttctttgagatagaaattttcaaaaacataaagctagttcaaaaaacgagttgcagagcatataataaatttggatgtcaactgagaaaggagtgagaaggaagaaacaatgcgcaaaggaaagcagtctttcagaatctgtcagccaagtgtctttctagttactgctaatggagaagaaaacagggggtctgggagaaaatagagaacatgatagcaaaatctaaaaggaaaatcaaaactaataaaattgctgaagagttgatccctttgtcctatcgtggggctttgtaatgttacacatctcgtgaaaactcagaaatgacaataaagcgtggcatttgcctctgtattataaatg

SEQ ID NO: 138573 - DNA, 585 bp, Artificial Sequence
  derived and/or modified sequence
atgccgaattggggtggtggagctaaatgcggcgcttgcgaaaagaccgtgtaccatgctgaagaaattcagtgtaacgggaggtcgtttcacaagacctgtttccattgtatggcttgtagaaaagccttggatagtaccacagtggccgctcatgaatcagagatttactgtaaagtctgttatggccggcggtacggacccaaggggatcgggtatggccaaggcgctgggtgcttatctactgacaccggagagcacctgggtttgcagttccagcaatctcctaagccggctcggtcagtaacaacatccaaccccagcaaatttacagccaagtttggcgaaagcgaaaagtgcccgcgatgcgggaagagtgtgtatgccgcggagaaggtgatgggtggaggaaaaccatggcataagacctgtttcagatgtgctatctgtggcaaatcactggaatccaccaacgtaactgacaaggatggagaactatattgcaaggtgtgctacgcgaaaaatttcggcccgacaggcatcgggtttggcgggcttacacagcaggtggaaaaaaaagagtag

SEQ ID NO: 138574 - DNA, 585 bp, Artificial Sequence
  derived and/or modified sequence
atgccaaactggggcggtggcgcaaaatgtggtgcctgtgagaaaacagtttatcatgccgaagagatccaatgcaacggtaggagcttccataagacctgtttccactgcatggcttgccgaaaagcactcgactcaacgacggtggccgcgcacgaatctgaaatttactgcaaggtttgttatggcagacgctacggccctaagggcatcggctatggtcagggggccggctgtctcagcaccgatacaggagaacatttgggactgcagtttcagcaatcaccgaagcctgcacgctcagtgaccacctctaacccatctaagtttacagctaaatttggggagtcagaaaagtgtccacgctgcggcaagagcgtgtacgcagccgaaaaggtcatggggggagggaagccctggcacaagacttgctttcgctgtgctatctgtggtaaatccctggaaagtaccaacgtcaccgacaaggatggtgagctgtactgcaaagtctgttatgctaagaatttcggacctacaggcatcgggtttggcgggttaactcagcaggttgagaaaaaggagtag

SEQ ID NO: 138575 - DNA, 585 bp, Artificial Sequence
  derived and/or modified sequence
atgcccaactggggcggcggggccaagtgtggggcctgtgagaagacagtgtaccacgccgaggagatccagtgcaatggccgctccttccacaagacctgcttccactgcatggcctgcaggaaggccctggacagcaccaccgtggccgcccacgagagcgagatctactgcaaggtgtgctacggccgccgctatggccccaagggcatcggctacggccagggcgccggctgcctgagcacagacaccggggagcacctgggcctgcagttccagcagagccccaagccagcccggtctgtgaccaccagcaaccccagcaagttcaccgccaagtttggagagagcgagaagtgcccccgctgtgggaagtctgtgtatgctgctgagaaggtgatgggcggcggcaagccctggcacaagacctgcttccgctgtgccatctgtgggaagagcctggagagcaccaacgtgacagacaaggatggagagctgtactgcaaggtgtgctacgccaagaactttggccccactggaattggatttggaggcctgacccagcaggtggagaagaaggagtag

SEQ ID NO: 138576 - DNA, 585 bp, Artificial Sequence
  derived and/or modified sequence
atgcccaactggggcggcggcgccaagtgcggcgcctgcgagaagacggtttaccacgccgaagagatacagtgtaatgggaggagcttccataagacttgctttcactgtatggcctgccgaaaggcactggacagcacaaccgtggctgcacacgaatcagagatctattgcaaggtgtgttacggtcgcaggtacggtccgaaaggcatcggctatggccagggagccggttgtctttcaacggatacaggtgaacacctgggtcttcagtttcagcagagtccaaaacccgcgagaagcgtgactacctctaatcctagcaagtttaccgcgaagtttggcgaatcggagaaatgccctagatgcggcaaaagcgtgtacgcagcggagaaggtaatgggggggggaaagccttggcacaaaacctgcttccgctgtgctatttgtggcaaaagtcttgagtctactaatgttacagataaggacggagaattatactgtaaagtgtgttatgccaaaaatttcggaccgactggcatcggatttggtggtttaactcagcaggtggagaaaaaagagtag

SEQ ID NO: 138577 - DNA, 585 bp, Artificial Sequence
  derived and/or modified sequence
atgcccaactggggcggcggcgccaagtgcggcgcctgcgagaagaccgtgtaccacgcggaggagatccaatgcaacgggagaagtttccacaaaacttgtttccactgcatggcctgccgaaaggccttggatagtaccactgtggctgctcatgaatctgagatctactgtaaggtatgctacgggagacgttacggaccaaagggtatcggctacggacagggagccggctgtttatccactgacaccggggagcatctgggactgcagtttcagcagtcaccgaaacctgcccgctctgtaacaacctctaatccaagtaagtttaccgccaagttcggcgagagcgaaaagtgccccaggtgcggaaagtctgtgtatgcggctgagaaggtaatggggggtggaaagccatggcataaaacttgtttcaggtgtgcaatttgtgggaagagtttggaaagcacaaatgttaccgacaaagacggcgagctctactgcaaagtgtgctacgctaagaatttcggtcctaccgggataggcttcggaggactgacccaacaagtggagaagaaagagtag

SEQ ID NO: 138578 - DNA, 585 bp, Artificial Sequence
  derived and/or modified sequence
atgcccaattggggcggtggagcaaagtgtggagcatgtgagaagactgtttaccatgctgaggagattcagtgcaacgggaggtcttttcacaaaacatgttttcattgtatggcttgtcggaaagccctcgacagcacaactgtggcggcacatgaatctgaaatatattgcaaggtttgttatgggcgtcgatacggcccaaaaggtatcggatacgggcagggggcagggtgtttaagcaccgacacgggggagcacctggggcttcagttccagcagtcccctaagccagccagaagcgtgactacctccaacccttcgaaattcaccgcaaaattcggggagtcggaaaaatgtccacgctgcggcaagtccgtgtatgctgcagagaaagtgatgggcggaggcaaaccttggcataaaacatgttttcggtgtgctatttgcgggaaaagtctggaaagcaccaatgtgactgacaaagacggcgaactatattgcaaggtgtgctacgcaaagaactttggcccaaccgggatcggttttggtggactgacccaacaggtagaaaaaaaggaatag

SEQ ID NO: 138579 - DNA, 585 bp, Artificial Sequence
  derived and/or modified sequence
atgccaaattgggggggaggggcaaaatgtggggcatgtgaaaaaaccgtctatcacgccgaggaaattcagtgtaacggacggagtttccataaaacatgctttcactgcatggcgtgccggaaagccctcgattcgacaaccgtcgctgcacacgagtctgagatttattgcaaggtgtgttatggccgtcgctacggtcctaagggcatcgggtacggtcagggcgctggctgcctgtcaaccgacacaggagaacacttgggcttgcagtttcagcagtctccaaagcctgccagatccgtgactacatctaacccatcaaaatttacagccaagttcggcgagtcagagaagtgtccgcgatgtggtaagtctgtgtatgctgcggagaaagtcatgggtggtgggaagccctggcacaaaacctgcttccgctgtgcgatctgcggcaaatccttagagtccaccaacgtgacagataaggacggcgaactatactgtaaagtctgttacgctaaaaatttcggccctactggaatcggctttggtggtttaactcagcaggtagaaaagaaggagtag

SEQ ID NO: 138580 - DNA, 1456 bp, Artificial Sequence
  derived and/or modified sequence
gcagtgagccgagatcgcgccactacactccagactgggcgacagagccagactccgtctcaaaaaaaaaaaaaaaaaaagagagagagcaccttaggaatcatctgcctcacacgaatattctcaggccaaggctggtgacagccttcatatatttaaagaggacaagagcccctcagactcagttgagctgaacggagtccacacaggcagacttgaccttgaccagatagtcttcaagatgccaaactggggcggaggcgcaaaatgtggagcctgtgaaaagaccgtctaccatgcagaagaaatccagtgcaatggaaggagtttccacaagacgtgtttccactgcatggcctgcaggaaggctcttgacagcacgacagtcgcggctcatgagtcggagatctactgcaaggtgtgctatgggcgcagatatggccccaaagggatcgggtatggacaaggcgctggctgtctcagcacagacacgggcgagcatctcggcctgcagttccaacagtccccaaagccggcacgctcagttaccaccagcaacccttccaaattcactgcgaagtttggagagtccgagaagtgccctcgatgtggcaagtcagtctatgctgctgagaaggttatgggaggtggcaagccttggcacaagacctgtttccgctgtgccatctgtgggaagagtctggagtccacaaatgtcactgacaaagatggggaactttattgcaaagtttgctatgccaaaaattttggccccacgggtattgggtttggaggccttacacaacaagtggaaaagaaagaatgaagaggtgcgccgtttctcagattttttgcgagcctaaaacacttgccaagtaatcctgcacagatcgatacctttccccaaatagcctctcctttgtagtcgtacattatgtgtttctcctcagaagtgatcaggtctttactgaatgttagaagaggcctttggaagaaaattatgtaaagtttaatctataacaaatgctttattatttataatgcttggaatgggagaggcaataaataaatgttttagtgctatcttgtatggctctagatcttttctttgagatagaaattttcaaaaacataaagctagttcaaaaaacgagttgcagagcatataataaatttggatgtcaactgagaaaggagtgagaaggaagaaacaatgcgcaaaggaaagcagtctttcagaatctgtcagccaagtgtctttctagttactgctaatggagaagaaaacagggggtctgggagaaaatagagaacatgatagcaaaatctaaaaggaaaatcaaaactaataaaattgctgaagagttgatccctttgtcctatcgtggggctttgtaatgttacacatctcgtgaaaactcagaaatgacaataaagcgtggcatttgcctctgta

SEQ ID NO: 138581 - DNA, 585 bp, Artificial Sequence
  derived and/or modified sequence
atgcccaactggggcggcggcgccaagtgcggcgcctgcgagaagaccgtgtaccacgccgaggagatccagtgcaacggcagaagcttccacaagacctgcttccactgcatggcctgcagaaaggccctggacagcaccaccgtggccgcccacgagagcgagatctactgcaaggtgtgctacggcagaagatacggccccaagggcatcggctacggccagggcgccggctgcctgagcaccgacaccggcgagcacctgggcctgcagttccagcagagccccaagcccgccagaagcgtgaccaccagcaaccccagcaagttcaccgccaagttcggcgagagcgagaagtgccccagatgcggcaagagcgtgtacgccgccgagaaggtgatgggcggcggcaagccctggcacaagacctgcttcagatgcgccatctgcggcaagagcctggagagcaccaacgtgaccgacaaggacggcgagctgtactgcaaggtgtgctacgccaagaacttcggccccaccggcatcggcttcggcggcctgacccagcaggtggagaagaaggagtag

SEQ ID NO: 138582 - protein, 501 aa, Artificial Sequence
  derived and/or modified sequence
MAASWRLGCDPRLLRYLVGFPGRRSVGLVKGALGWSVSRGANWRWFHSTQWLRGDPIKILMPSLSPTMEEGNIVKWLKKEGEAVSAGDALCEIETDKAVVTLDASDDGILAKIVVEEGSKNIRLGSLIGLIVEEGEDWKHVEIPKDVGPPPPVSKPSEPRPSPEPQISIPVKKEHIPGTLRFRLSPAARNILEKHSLDASQGTATGPRGIFTKEDALKLVQLKQTGKITESRPTPAPTATPTAPSPLQATAGPSYPRPVIPPVSTPGQPNAVGTFTEIPASNIRRVIAKRLTESKSTVPHAYATADCDLGAVLKVRQDLVKDDIKVSVNDFIIKAAAVTLKQMPDVNVSWDGEGPKQLPFIDISVAVATDKGLLTPIIKDAAAKGIQEIADSVKALSKKARDGKLLPEEYQGGSFSISNLGMFGIDEFTAVINPPQACILAVGRFRPVLKLTEDEEGNAKLQQRQLITVTMSSDSRVVDDELATRFLKSFKANLENPIRLA

SEQ ID NO: 138583 - DNA, 1506 bp, Artificial Sequence
  derived and/or modified sequence
atggccgccagctggagactgggctgcgaccccagactgctgagatacctggtgggcttccccggcagaagaagcgtgggcctggtgaagggcgccctgggctggagcgtgagcagaggcgccaactggagatggttccacagcacccagtggctgagaggcgaccccatcaagatcctgatgcccagcctgagccccaccatggaggagggcaacatcgtgaagtggctgaagaaggagggcgaggccgtgagcgccggcgacgccctgtgcgagatcgagaccgacaaggccgtggtgaccctggacgccagcgacgacggcatcctggccaagatcgtggtggaggagggcagcaagaacatcagactgggcagcctgatcggcctgatcgtggaggagggcgaggactggaagcacgtggagatccccaaggacgtgggcccccccccccccgtgagcaagcccagcgagcccagacccagccccgagccccagatcagcatccccgtgaagaaggagcacatccccggcaccctgagattcagactgagccccgccgccagaaacatcctggagaagcacagcctggacgccagccagggcaccgccaccggccccagaggcatcttcaccaaggaggacgccctgaagctggtgcagctgaagcagaccggcaagatcaccgagagcagacccacccccgcccccaccgccacccccaccgcccccagccccctgcaggccaccgccggccccagctaccccagacccgtgatcccccccgtgagcacccccggccagcccaacgccgtgggcaccttcaccgagatccccgccagcaacatcagaagagtgatcgccaagagactgaccgagagcaagagcaccgtgccccacgcctacgccaccgccgactgcgacctgggcgccgtgctgaaggtgagacaggacctggtgaaggacgacatcaaggtgagcgtgaacgacttcatcatcaaggccgccgccgtgaccctgaagcagatgcccgacgtgaacgtgagctgggacggcgagggccccaagcagctgcccttcatcgacatcagcgtggccgtggccaccgacaagggcctgctgacccccatcatcaaggacgccgccgccaagggcatccaggagatcgccgacagcgtgaaggccctgagcaagaaggccagagacggcaagctgctgcccgaggagtaccagggcggcagcttcagcatcagcaacctgggcatgttcggcatcgacgagttcaccgccgtgatcaaccccccccaggcctgcatcctggccgtgggcagattcagacccgtgctgaagctgaccgaggacgaggagggcaacgccaagctgcagcagagacagctgatcaccgtgaccatgagcagcgacagcagagtggtggacgacgagctggccaccagattcctgaagagcttcaaggccaacctggagaaccccatcagactggcctag

SEQ ID NO: 138584 - DNA, 1506 bp, Artificial Sequence
  derived and/or modified sequence
atggcggcctcctggcgtctaggctgcgacccacgcttgcttaggtatttagtgggcttcccaggacggcggagcgttgggctggtgaaaggagccctggggtggagcgtgtcacgtggcgcgaactggcggtggtttcattctacgcagtggctgcggggtgatcccatcaagatcctaatgccctccttaagcccaacaatggaggagggaaacatagttaagtggctgaagaaagagggcgaagcagtgagtgccggagatgctctgtgcgagatagagaccgacaaagcggtggtaactctggacgccagcgatgacggaatcctggcaaaaatcgtggtggaagagggctcgaaaaatataaggcttggctctctgatcggcctgatagtggaagaaggcgaggactggaaacacgtagaaatccctaaggacgtgggaccgcctccgcccgtgtctaagccaagtgagccaagacccagcccagagccacagatctctattccggttaaaaaagagcacatacctggaactctcaggttccgcctgagtccggccgctcgcaacatactggaaaaacactccctggatgccagtcaaggcaccgcaaccggcccccggggaattttcaccaaagaggatgccttaaaattggtgcagctgaagcagacgggtaagatcaccgagtcacggcccacacccgctcccacagcaacacctactgccccgtcccctttgcaggcgactgctggtccgtcatacccacgccccgttatcccccccgtgtctacacccggccagcccaacgctgtagggacctttacagaaattccagcatctaacatcaggcgcgtgattgctaaacggctcacggaatcaaaaagcacggtgcctcacgcatatgctaccgccgactgcgacctcggagccgtgctgaaagttcgccaagacttggtgaaggacgacatcaaagtctccgtgaacgactttataataaaagctgccgccgtcaccctgaagcagatgcccgacgtcaacgtctcatgggatggagagggtcctaagcaactccccttcatagatatctcagtggcagtggcaaccgacaagggtttgctgacgcctatcatcaaggacgcagcagccaaaggcatccaagaaatcgccgattctgtcaaggcactttccaagaaggctagagacggcaaactgctccctgaagagtaccagggggggagtttctccatcagcaacctaggcatgtttgggattgacgaattcacagctgtgattaatccgccacaggcctgcatcctggcggtgggacgctttaggcccgtgcttaagctaacagaggacgaagagggcaacgcgaagttgcagcagcggcagctgatcacagtgaccatgtcatctgactcaagggtcgtggatgatgagttagcaactcgatttctgaagagcttcaaggcaaatctcgaaaacccaattcggttggcgtag

SEQ ID NO: 138585 - DNA, 1506 bp, Artificial Sequence
  derived and/or modified sequence
atggccgcctcctggaggctgggctgtgacccccggctgctgcgctacctggtgggcttccctggaagaagatctgtgggcctggtgaagggggccctgggctggagcgtgtccagaggagccaactggcgctggttccacagcacccagtggctgcggggggaccccatcaagatcctgatgcccagcctgagccccaccatggaggagggcaacatcgtgaagtggctgaagaaggagggggaggccgtgtctgctggagatgccctgtgtgaaattgaaacagacaaggctgtggtgaccctggatgccagtgatgatggcatcctggccaagatcgtggtggaggagggcagcaagaacatccggctgggcagcctcatcggcctgattgtggaggagggggaggactggaagcacgtggagatccccaaggatgtgggccccccacctcctgtgtccaagcccagcgagccccggcccagccctgagccccagatcagcatccctgtgaagaaggagcacatccctggcaccctgcgcttccggctgagccctgctgccaggaacatcctggagaagcacagcctggatgccagccagggcacagccaccggcccccggggcatcttcaccaaggaggatgccctgaagctggtgcagctgaagcagacaggcaagatcacagagagccggcccaccccagcccccacagccacccccacagcccccagccccctgcaggccacagctggccccagctaccccaggcctgtgattcctcctgtgtccaccccaggccagcccaatgctgtgggcaccttcacagagatcccagccagcaacatccggcgggtgattgccaagaggctgacagagagcaagagcacagtgccccacgcctatgccacagctgactgtgacctgggcgctgtgctgaaggtgcggcaggacctggtgaaggatgacatcaaggtgtctgtgaatgacttcatcatcaaggctgctgctgtgaccctgaagcagatgccagatgtgaatgtgtcctgggatggagagggccccaagcagctgcccttcatcgacatctctgtggccgtggccacagacaagggcctgctgacccccatcatcaaggatgctgctgccaagggcatccaggagattgctgacagcgtgaaggccctgagcaagaaggccagagatggcaagctgctgcctgaggagtaccagggcggcagcttcagcatcagcaacctgggcatgtttggaattgatgagttcaccgctgtgatcaaccccccccaggcctgcatcctggccgtgggccgcttccggcctgtgctgaagctgacagaagatgaggagggcaatgccaagctgcagcagaggcagctgatcaccgtgaccatgagcagtgacagccgggtggtggatgatgagctggccacccgcttcctgaagagcttcaaggccaacctggagaaccccatccggctggcctag

SEQ ID NO: 138586 - DNA, 1506 bp, Artificial Sequence
  derived and/or modified sequence
atggccgccagctggcggctgggctgcgacccccggctgctgcggtacctggtgggttttcctgggagacgatcagtgggactggtgaagggggcgctgggatggtcggtgagccgcggggccaattggcgttggtttcatagtactcagtggctgcgcggggatccaatcaaaatcttaatgcctagtctgtctcccactatggaggagggaaatattgtcaaatggctcaagaaggaaggagaggccgtgtctgcaggggatgcgctgtgcgagatcgaaaccgacaaagccgtggtaaccttagacgcctccgatgacgggatactggcaaagatagtggtcgaagaaggttcgaagaatatccgcttaggaagtttaatcggactaatcgtcgaagagggcgaggactggaagcatgtcgagatacctaaggacgtaggacccccgcctccagtctctaaaccatcggagcctcgcccgagccctgaaccccagattagtatccctgttaagaaggagcatatacccggaacattaaggttccggctgagtccagccgcaagaaacattctcgaaaagcattcattggatgctagccaggggaccgcaacaggaccaaggggcatctttaccaaagaggacgcactcaagctcgtccaactcaagcaaactggtaaaatcacggagagccgccccactcccgctccaaccgccacacccacagccccctcccctctgcaggcaacagctgggccttcctaccctaggccagttatccctcccgttagcacgcccggacagcctaacgcagtcggtactttcaccgagatcccagccagtaatattcgcagggtgatagccaagcgactgaccgaatcaaaaagcaccgtcccacatgcctacgctacggctgattgcgacctcggcgccgtgttgaaggtgagacaggacctggtcaaagatgatatcaaagtctccgttaacgacttcattataaaggctgccgcagtgacactgaaacaaatgcccgatgtgaatgtgagctgggacggagaggggccaaaacaacttcccttcatcgacatatcagtggctgtggcaacggacaaagggctcctgacaccaatcatcaaagacgctgcagctaaaggcatccaggaaattgccgattctgtaaaggcattgtccaagaaggcacgggacggtaagctccttcccgaggagtaccagggcggatccttttccatatcaaacctgggcatgtttggcatcgacgaatttacagccgtcatcaatccaccgcaggcatgcatcctcgctgtgggcagattccgccccgtactgaagctgaccgaggatgaggagggcaatgcgaagctccagcagagacaactgattactgtcaccatgtccagcgacagcagggtcgtggacgacgaactcgccacacgattcctcaaatccttcaaggctaacctggaaaaccccatccggctcgcttag

SEQ ID NO: 138587 - DNA, 2389 bp, Artificial Sequence
  derived and/or modified sequence
gggcgtggccaaccatgcgggaggcggggccttgatgctggacatcaggctgtgctgcgggcagccagtgagaaggccgtcaagatggcggcctcctggaggctgggctgtgatccgcggctgctgcgttatcttgtgggcttccccggccgccgaagcgtagggctggtgaagggggctcttgggtggtctgtaagccgcggagctaattggagatggtttcacagcacgcagtggcttcggggtgatcccattaagatactaatgccatcactgtctcctacaatggaagaaggaaacattgtgaaatggctgaaaaaggaaggtgaagcggtgagtgctggagatgcattatgtgaaattgagactgacaaagctgtggttaccttagatgcaagtgatgatggaatcttggccaaaatcgtggttgaagaaggaagtaaaaatatacggctaggttcactaattggtttgatagtagaagaaggagaagattggaaacatgttgaaattcccaaagacgtaggtcctccaccaccagtttcaaaaccttcagagcctcgcccctcaccagaaccacagatttccatccctgtcaagaaggaacacatacccgggacactacggttccgtttaagtccagctgcccgcaatattctggaaaaacactcactggatgctagccagggcacagccactggccctcgggggatattcactaaagaggatgctctcaaacttgtccagttgaaacaaacgggcaagattaccgagtccagaccaactccagcccccacagccactcccacagcaccttcgcccctacaggccacagctggaccatcttatccccggcctgtgatcccaccagtatcaactcctggacaacccaatgcagtgggcacattcactgaaatccccgccagcaatattcgaagagttattgccaagagattaactgaatctaaaagtactgtacctcatgcatatgctactgctgactgtgaccttggagctgttttaaaagttaggcaagatctggtcaaagatgacattaaagtatcagtaaatgattttatcatcaaggcagcagctgttacccttaaacaaatgccagatgttaatgtaagctgggatggagagggcccaaagcaactgccatttattgacatttcagtggctgtggcaacagataaaggcttacttactccaatcataaaagatgctgctgctaaaggtatccaggaaattgctgactctgtaaaggctctatcaaagaaagcaagagatggaaaattgttgcctgaagaataccaaggaggatcttttagtatttccaacttggggatgtttggcatcgacgaatttactgcagtgattaaccctcctcaggcctgcattttggcggttgggaggttccgacctgtgctgaagctcactgaggatgaagagggaaatgccaaactgcagcagcgccagctcataacagtcacaatgtcaagtgacagtcgagtggttgatgacgaactggcaaccaggtttcttaaaagttttaaagcaaacctagagaatcctatccgacttgcctagtcctcaaagataagaagttggtgttcagcttagttgattcagtagttgttaccaagaaacatatgttataggaaaacaacttggtatttaagtatgaagtggatgaaatgtttatttatttaaggtgaaagcatttgacccagggtgtcttcatcttcaatttgggtttaatgttatagaaataaatgatgataaactctaactaataaaggaaagagaatatttggttactcagatccatttttaacctctggtgctgtataaagggaatattaaactagatgtaaatcaaagtatatgtttggctcatttgagcattttggaatatttgagaatgtatgatacatgtaaaattaaaaaaactattagaactgtaccataattatgttgaaggtagaagtgatcttcaaagagatggccattaacttagcagtgggacctcacttttacaagcactgctctagatatacttgaagaatttaataggtacagaagtttattctggataataaataaataaggatcacactgtattaggggttatggcaacattattgaattttttatgtacataaagccatatgtttagggtggtttctatctgtcttgtttttcacttatataacactgtgaacttctaaagcaagaggataaaagaagcatgaatgaaaagaatgacatttcaaaaaaatggttcaatgaaaaactatagctaaaatatgtaaacctttctaggtaaaccgcttgccttcatcttgagtcggaatatatttaaataaattgtgttatctcttgccaa

SEQ ID NO: 138588 - DNA, 1506 bp, Artificial Sequence
  derived and/or modified sequence
atggctgcatcttggaggttaggttgcgatcctcggctgctcagatatctggtggggtttcctggacgcaggtccgtaggtctagtgaaaggagctctggggtggtcagtcagccgcggagccaactggcgctggtttcacagcactcagtggctccggggtgaccccataaagatactgatgccctcactaagccctactatggaggagggcaacatcgtgaagtggctcaaaaaagagggagaagccgtatcagcaggcgacgcactttgcgaaattgagacagacaaggctgtggtgacccttgacgcctctgacgacggaatcttagccaaaatagtggtggaggaagggagcaagaacatccggctcgggtctctgatcggcctcatcgtcgaggagggggaggattggaaacacgtggaaattcccaaagatgtgggtccccctcccccagtgtctaagcctagcgagccacgaccttcacccgaacctcaaatctccatccccgtgaagaaagaacacatacctggtaccctcaggttccgactgagtccggcagcacgaaatatacttgaaaagcactccttggacgcctcccagggcaccgccacaggtccgaggggaattttcactaaggaagatgcgcttaagctagtgcagttgaaacagacaggcaaaatcacagagtcacgccctacgcccgctcccacggcaacaccgaccgccccaagcccgctgcaggctaccgctggccctagttatccgaggcctgtgattccaccagtgtctacccccggacagcctaatgcagtgggcacctttaccgaaatacccgctagcaatatccgtagggtaatcgccaaaaggcttactgagagcaagtccactgtgccacacgcatatgcaacagcagactgtgacctgggtgccgttctgaaagtacgacaggatctggttaaggacgatatcaaggtgtccgttaatgatttcatcattaaggctgccgctgttaccctcaagcagatgccagatgtcaacgttagctgggacggcgaagggcctaagcagctgccattcatagacataagcgtggcagttgcaacagataagggtctgctgacccctataataaaagatgccgcagcgaagggtatacaggagattgctgattccgttaaggcattgagcaagaaagccagggatggtaagcttctgccagaagaataccaggggggatccttttcaatatcaaaccttggaatgtttggcattgacgaattcacagctgtcatcaatccccctcaggcgtgtatcctggctgtgggaaggtttcgtcccgtcctgaagcttacggaggacgaggagggaaacgcaaagctgcagcagagacagttaatcacggtgacaatgtcctctgacagccgtgtggtggatgatgaactagccacacggtttttgaagtcttttaaagcaaatctggagaacccgattagacttgcctag

SEQ ID NO: 138589 - protein, 780 aa, Artificial Sequence
  derived and/or modified sequence
MATSNLLKNKGSLQFEDKWDFMRPIVLKLLRQESVTKQQWFDLFSDVHAVCLWDDKGPAKIHQALKEDILEFIKQAQARVLSHQDDTALLKAYIVEWRKFFTQCDILPKPFCQLEITLMGKQGSNKKSNVEDSIVRKLMLDTWNESIFSNIKNRLQDSAMKLVHAERLGEAFDSQLVIGVRESYVNLCSNPEDKLQIYRDNFEKAYLDSTERFYRTQAPSYLQQNGVQNYMKYADAKLKEEEKRALRYLETRRECNSVEALMECCVNALVTSFKETILAECQGMIKRNETEKLHLMFSLMDKVPNGIEPMLKDLEEHIISAGLADMVAAAETITTDSEKYVEQLLTLFNRFSKLVKEAFQDDPRFLTARDKAYKAVVNDATIFKLELPLKQKGVGLKTQPESKCPELLANYCDMLLRKTPLSKKLTSEEIEAKLKEVLLVLKYVQNKDVFMRYHKAHLTRRLILDISADSEIEENMVEWLREVGMPADYVNKLARMFQDIKVSEDLNQAFKEMHKNNKLALPADSVNIKILNAGAWSRSSEKVFVSLPTELEDLIPEVEEFYKKNHSGRKLHWHHLMSNGIITFKNEVGQYDLEVTTFQLAVLFAWNQRPREKISFENLKLATELPDAELRRTLWSLVAFPKLKRQVLLYEPQVNSPKDFTEGTLFSVNQEFSLIKNAKVQKRGKINLIGRLQLTTERMREEENEGIVQLRILRTQEAIIQIMKMRKKISNAQLQTELVEILKNMFLPQKKMIKEQIEWLIEHKYIRRDESDINTFIYMA

SEQ ID NO: 138590 - DNA, 2343 bp, Artificial Sequence
  derived and/or modified sequence
atggccacgtcaaacctgctaaagaataaaggctcattgcagtttgaggacaagtgggactttatgaggcctatcgtgctcaaacttttgcgccaagagtctgtgaccaagcagcaatggtttgacctgttctcagatgtacacgctgtatgcctgtgggacgataaagggccagccaaaatccaccaagcccttaaggaagatattctggagttcattaaacaggcccaggcccgggtcctaagccatcaggatgataccgccctgctgaaagcctatattgtagaatggaggaaattttttacacagtgcgacatcctgccgaagcctttttgccagttggaaattacgcttatgggaaagcagggcagtaacaagaaatctaacgtggaggactccattgttcgcaagctgatgcttgacacctggaatgaatcaatcttctctaacatcaagaatcgattgcaggacagcgcaatgaaactggttcacgcagagcgcctgggagaagctttcgattcacaactggttattggagttagagagagctacgttaacctctgctccaacccggaggataaattgcagatttatagggacaacttcgaaaaagcctacttggattctactgagagattctacaggacccaggccccatcctacctacagcaaaacggggtgcagaattacatgaagtacgctgacgctaagctcaaagaagaggaaaagagggcactgcgctacctggagaccaggcgggagtgcaatagtgtggaggctcttatggagtgctgcgttaatgccctggtcacaagcttcaaagagacaattctggccgagtgtcaaggcatgattaaaagaaatgagaccgaaaagttgcacctaatgttctctctgatggacaaggtgcccaatggaattgagccgatgctcaaggatctggaggaacacatcattagtgctgggttagctgacatggtggcagctgccgagactatcacaactgatagcgagaagtacgttgagcagttgctgaccctatttaacaggttttcaaagctcgtcaaggaagcctttcaggatgacccccgttttcttactgccagagacaaggcatacaaggctgtggtcaatgatgccactatcttcaaactcgagttgccactgaaacagaaaggggtcggcctgaagacgcaacccgaatccaaatgcccggagcttctggccaattattgcgatatgcttttacggaaaacccctttatccaagaaactgacgtctgaggagatagaagctaagctgaaagaagtgctgctggttttgaagtacgtgcaaaacaaagatgtgttcatgaggtatcacaaggcccacttgacccgacgattaattctcgacatatctgcggattctgagatcgaagaaaatatggtggagtggctgagagaggtcggaatgcctgccgactatgtcaacaagttagcacggatgtttcaggacataaaagtgtcagaggatcttaaccaggctttcaaagaaatgcacaagaacaacaaactggccttgccagctgactccgtcaatatcaaaatcctgaatgccggcgcttggtcacggagttccgaaaaagtattcgtctcccttccaactgaactggaggacctcatcccggaggttgaggagttttataagaagaaccacagcggccgcaagctgcattggcatcacctgatgagcaacggcatcatcacctttaagaacgaggtgggtcagtacgacctagaggtcactaccttccagcttgccgtgttgtttgcttggaaccaacgtccacgggaaaagatcagcttcgaaaatctgaaactggctaccgaactgccagatgccgaattgcgtcgaacgttgtggagcctggtggccttccctaagctcaagcgtcaggttctcctgtacgaaccacaggtgaatagccctaaggattttaccgagggcacccttttctccgtgaaccaggaattctcactcattaagaacgccaaagttcagaaacgtggcaaaatcaacttaatcggtagactccaactaacgactgagcggatgagggaagaagagaatgagggaatcgtccaactccggattttgcgtacccaggaggccatcatacagattatgaaaatgaggaagaagatctctaacgcacagttgcaaacagaactggtggagatcctaaaaaatatgttcctgccacagaagaagatgatcaaagagcaaattgagtggctgattgagcacaagtacatcaggagggacgagagcgatattaatactttcatctatatggcttag

SEQ ID NO: 138591 - DNA, 2343 bp, Artificial Sequence
  derived and/or modified sequence
atggcgactagtaatctgttaaaaaacaaaggttcgctgcaattcgaggacaaatgggacttcatgcgccccatagttctgaagctgttgcgtcaggaatcggttacgaaacagcaatggtttgacctgttttctgatgtgcacgctgtttgtctgtgggacgacaaagggccggcaaaaatacaccaggcattgaaagaggacatcttggagttcatcaagcaggcacaagcgagagtattgtcccaccaggacgacacagctctgctgaaggcctatattgtagaatggaggaagttctttacacagtgcgacatcctccccaagcccttctgtcagctggaaataactcttatgggaaagcaaggttcaaataaaaagtccaacgtggaagatagcatagttcgtaaactgatgttagatacctggaacgagagcattttttctaatatcaagaaccgtctccaagatagcgcaatgaaactggtccacgccgagcgactgggtgaagctttcgactctcagctggtgattggcgtgagagagagttatgtcaacctttgttctaaccccgaggataagttgcagatttatagggacaactttgaaaaggcctatctggactccactgaacgattttatcgtacccaagcgcccagttatctccagcagaacggagtgcagaattatatgaaatacgccgatgccaagctgaaagaggaggaaaagagggccttgaggtatcttgaaacccgtcgggagtgtaatagtgtggaggctttgatggagtgttgcgtgaatgcgctggtaacaagcttcaaagagacaattctagcagagtgccagggaatgatcaagcggaatgaaactgagaaactgcatctgatgttcagcctcatggataaagtgccaaacggcatcgagccaatgctgaaggacctcgaagaacacattattagtgctggtctggcggacatggttgctgcagctgaaacaattactacagactcagaaaaatacgttgagcagttattgacattgtttaaccgatttagcaagctggtcaaggaagcatttcaggacgatccccggtttctgacggccagggataaggcctacaaggcggtggtcaacgacgctacaatcttcaagttggaactgcctctgaagcaaaaaggtgttggcctcaaaacacagccggaatctaaatgccctgaactgttagcaaattattgtgacatgctgctgagaaaaacacctcttagcaagaagctgacgagcgaggagatcgaagcaaagcttaaagaggtcctcctcgtcttgaaatatgttcagaacaaggacgtcttcatgagatatcacaaggctcatctgaccaggcgacttatcctggatatctcagcagactcagaaatagaggagaacatggtggagtggttgcgtgaggtgggcatgcctgccgactacgtcaataagctggctcggatgtttcaggatataaaggtgagtgaggatctgaaccaagccttcaaggaaatgcataaaaataacaagctggccctgcccgccgatagtgtgaacatcaaaattctcaatgcaggcgcttggtcccggtcaagtgagaaagtgttcgtgagcctgcctaccgagttggaggatctgattcctgaagttgaagaattttataagaaaaatcattccggcagaaagttgcattggcaccacctgatgagcaacggtataattactttcaagaatgaagttggacagtacgatctggaggtgaccaccttccagctggccgtgctgtttgcttggaatcaacgaccccgggaaaaaatttcatttgagaacctgaaactcgctactgagctgccagatgcggagctccgtcgcaccctgtggtccctggtagcatttcctaagctcaagagacaggtgctactatatgagcctcaggtgaatagtcctaaggatttcacggaaggcacacttttttctgttaaccaggagttcagtctgatcaagaatgcgaaggttcaaaaacgagggaagatcaaccttatcgggaggctgcagttgaccacagagaggatgcgggaggaggaaaatgagggaattgtgcaactgcgtattctgagaacacaggaagcaatcatacaaataatgaagatgaggaagaagatcagcaacgctcagcttcagaccgagcttgtggagattttaaaaaatatgtttttgcctcagaaaaaaatgatcaaggaacagatcgagtggctgatcgagcacaaatacattcgccgcgatgaaagtgacattaatacctttatctacatggcgtag

SEQ ID NO: 138592 - DNA, 2343 bp, Artificial Sequence
  derived and/or modified sequence
atggccaccagcaacctgctgaagaacaagggcagcctgcagtttgaggacaagtgggacttcatgaggcccatcgtgctgaagctgctgcggcaggagagcgtgaccaagcagcagtggtttgacctcttcagtgatgtgcatgctgtgtgcctgtgggatgacaagggccctgccaagatccaccaggccctgaaggaggacatcctggagttcatcaagcaggcccaggcccgggtgctgagccaccaggatgacacagccctgctgaaggcctacatcgtggagtggaggaagttcttcacccagtgtgacatcctgcccaagcccttctgccagctggagatcaccctgatgggcaagcagggcagcaacaagaagagcaatgtggaggacagcatcgtgaggaagctgatgctggacacctggaatgaaagcatcttcagcaacatcaagaaccggctgcaggacagcgccatgaagctggtgcatgctgagcggctgggggaggcctttgacagccagctggtgattggagtgcgggagagctatgtgaacctgtgcagcaaccctgaggacaagctgcagatctacagagacaactttgagaaggcctacctggacagcacagagcgcttctaccgcacccaggcccccagctacctgcagcagaatggagtgcagaactacatgaagtatgcagatgccaagctgaaggaggaggagaagagggccctgcgctacctggagacccggcgggagtgcaacagcgtggaggccctgatggagtgctgcgtgaatgccctggtgaccagcttcaaggagaccatcctggccgagtgccagggcatgatcaagagaaatgaaacagagaagctgcacctgatgttcagcctgatggacaaggtgcccaatggaattgagcccatgctgaaggacctggaggagcacatcatctctgctggcctggccgacatggtggccgctgctgagaccatcaccacagattctgagaagtatgtggagcagctgctgaccctcttcaaccgcttcagcaagctggtgaaggaggccttccaggatgacccccgcttcctgacagcccgggacaaggcctacaaggctgtggtgaatgatgccaccatcttcaagctggagctgcccctgaagcagaagggcgtgggcctgaagacccagcctgagagcaaatgtcctgagctgctggccaactactgtgacatgctgctgaggaagacccccctgagcaagaagctgaccagcgaggagattgaggccaagctgaaggaggtgctgctggtgctgaagtatgtgcagaacaaggatgtgttcatgagataccacaaggcccacctgacccggcggctcatcctggacatctctgctgacagcgagattgaggagaacatggtggagtggctgcgggaggtgggcatgcctgctgactatgtgaacaagctggccaggatgttccaggacatcaaggtgtctgaggacctgaaccaggccttcaaggagatgcacaagaacaacaagctggccctgcctgctgacagcgtgaacatcaagatcctgaatgctggggcctggagccgcagcagcgagaaggtgtttgtgtccctgcccacagagctggaggacctgatccctgaggtggaggagttctacaagaagaaccacagcggcaggaagctgcactggcaccacctgatgagcaatggcatcatcaccttcaagaatgaggtgggccagtatgacctggaggtgaccaccttccagctggccgtgctgtttgcctggaaccagaggccccgggagaagatcagctttgagaacctgaagctggccacagagctgcctgatgctgagctgcggaggaccctgtggagcctggtggccttccccaagctgaagaggcaggtgctgctgtatgagccccaggtgaacagccccaaggacttcacagagggcaccctcttctctgtgaaccaggagttcagcctcatcaagaatgccaaggtgcagaagaggggcaagatcaacctgattggccgcctgcagctgaccacagagaggatgagggaggaggagaatgaaggaattgtgcagctgcgcatcctgcggacccaggaggccatcatccagatcatgaagatgaggaagaagatcagcaatgcccagctgcagacagagctggtggagatcctgaagaacatgttcctgccccagaagaagatgatcaaggagcagatcgagtggctgattgagcacaagtacatcagaagagatgaaagtgacatcaacaccttcatctacatggcctag

SEQ ID NO: 138593 - DNA, 2343 bp, Artificial Sequence
  derived and/or modified sequence
atggccaccagcaacctgctgaagaacaagggcagcctgcagttcgaagacaagtgggacttcatgaggcctatcgtcctgaagctcctgcgccaggaaagcgtgaccaaacaacagtggtttgacctgttctcagatgtgcacgctgtttgtctgtgggacgacaagggacccgctaaaatacatcaggctctgaaagaggatattttagaattcatcaagcaagcccaagccagagtgctgtctcaccaggacgacaccgccctgttaaaggcttacatcgtagaatggcgaaagttcttcactcagtgtgacatccttccaaagccattttgccagttggagatcacgctgatggggaagcagggaagtaacaaaaaaagcaacgttgaggactccatcgtacgaaaattgatgttagatacatggaatgagtcaattttttctaacatcaaaaataggcttcaggattctgccatgaaactggtgcatgctgagagactgggcgaagcctttgattcgcagctggttattggggttcgggagagctacgtgaacttgtgtagcaatccagaggacaagctgcagatctatcgcgacaattttgaaaaagcatacttagatagcaccgaacggttctaccgcacccaggcacccagttacctccaacagaatggcgtgcagaactacatgaaatatgccgatgctaaactgaaagaggaagagaaaagagccttgcggtatctggagacacgaagagagtgcaactcagttgaggccttaatggagtgctgtgttaacgcacttgtcaccagtttcaaggagactatcctcgccgagtgtcagggtatgattaaaagaaatgaaactgaaaaactccacctgatgttttcactgatggacaaagttcctaatgggatcgagccgatgctaaaagatttggaagagcacatcattagtgccggacttgccgacatggtggcagcagctgaaaccatcacaacagacagcgagaaatacgtagaacagctgcttactctctttaatcgctttagtaagctggtcaaggaggcgtttcaggatgatccccgctttctaactgcgagggacaaagcctacaaggccgtcgttaatgatgcaacgatttttaagctagagctgcccttaaaacagaagggggtcggcctgaagactcagcccgagagcaagtgcccagaattacttgccaactactgcgacatgctgctgcgcaaaacccccctatctaaaaagctgacaagtgaggaaatcgaagcgaagctgaaggaagtgttgttggtgttgaagtacgttcagaacaaagatgtattcatgagataccataaggctcacctcacccgacgactgatcctggatatcagcgcagacagcgagattgaggagaacatggttgagtggctcagggaagtaggaatgcctgcagactacgtgaacaagcttgcccgaatgttccaggatattaaggttagtgaagacttgaatcaggcctttaaagagatgcataaaaacaataagttagcacttccggccgactctgtgaacatcaaaatactaaacgccggcgcttggtcacggagtagtgaaaaggtcttcgtgtcccttcccaccgagcttgaggatctcatccctgaagtggaggagttctataaaaagaatcatagcggcaggaagctgcattggcaccatctgatgtccaacggcatcattactttcaagaatgaagtgggacagtacgacctggaggtgacgaccttccagctcgcagtcttatttgcctggaaccagagaccacgcgaaaagattagcttcgaaaatttgaaactggctacagagctcccagacgctgaattaagaagaaccctctggtcgttggttgcctttccaaagctgaagagacaggtgttactgtacgagcctcaggtaaactcccctaaggactttactgagggaacactcttcagcgtaaaccaggagtttagcctcatcaaaaatgctaaagttcagaaacgaggcaagattaacctcatcggccgactccagcttaccactgaacgcatgcgggaggaggagaatgaaggtattgtgcagctgagaattcttagaacccaggaagcgattatccaaatcatgaagatgaggaaaaagataagtaatgctcagctgcagaccgagctggtggagatactaaagaatatgtttcttccccaaaagaaaatgatcaaagagcagatcgagtggcttattgaacataaatatatcagacgtgatgaatcagatatcaacacctttatctatatggcttag

SEQ ID NO: 138594 - DNA, 2343 bp, Artificial Sequence
  derived and/or modified sequence
atggccaccagcaacctgctgaagaacaagggcagcctgcagttcgaagataagtgggattttatgaggcctatagtgctcaagctcttgcgtcaggaaagcgtgacgaagcagcaatggtttgacttattttcagatgtccacgccgtgtgcctttgggatgataaggggcctgcaaagatccaccaggcgctcaaagaagatatcctggagttcattaagcaggcacaggcccgcgttctatctcaccaggatgacaccgccctgttaaaggcctatattgttgagtggagaaaattcttcacccaatgcgacatcctgcccaaacccttttgtcaactcgaaatcaccctgatgggcaaacaggggtctaacaaaaagtctaacgtggaagattccatcgtcaggaagcttatgttggacacatggaacgaatctatattcagcaatatcaagaataggctgcaagatagcgctatgaagttggtccacgccgagcgccttggagaagccttcgacagccagctcgtgatcggggtgcgtgaatcatacgtcaacctctgtagtaatcctgaagacaagctgcagatatatcgggataacttcgaaaaggcctacctggatagcaccgaaagattctacaggactcaagcaccaagctaccttcagcagaacggcgttcagaactacatgaaatatgcagacgccaagcttaaggaagaggagaagcgtgctcttcggtacctcgaaactaggcgcgaatgcaactccgtcgaggcactgatggaatgctgcgtcaatgccctcgtgacttcatttaaggaaacaattctcgccgaatgtcaaggtatgattaaacgtaatgagactgaaaagctccacctcatgtttagtctcatggataaggtccccaacggaatagagcccatgctgaaggacttagaagaacacatcatctcggctggcctggctgacatggtggctgctgctgaaaccatcaccacagacagcgagaagtacgtagagcaactgctcacccttttcaatcggttcagcaaattggtcaaagaagcatttcaggatgatcccaggttcttgaccgcacgggacaaggcgtacaaggccgtcgtgaacgacgcgaccatcttcaagctggaactgccactgaagcagaaaggcgtggggctaaaaacccagcctgagtctaagtgtccagaattactggccaactattgtgatatgctcttgaggaagacacccctctccaaaaaacttacttctgaggagattgaggctaaattgaaggaagtactgttggttctgaaatatgttcaaaataaagacgtgtttatgcgttatcacaaagctcatttaacccgcagacttattcttgatatttctgcagattccgaaatcgaggagaatatggttgagtggctaagagaggtgggcatgcccgctgattacgtgaacaagcttgcgcggatgtttcaggatataaaggtaagtgaggacttgaatcaagcttttaaggagatgcacaaaaacaataagttagcacttcctgcagactccgttaatatcaaaatattgaatgccggagcctggtctaggagttcagagaaggtcttcgtgtcactccctaccgaactcgaggaccttatcccagaagtggaggagttctacaagaaaaaccacagtggacggaaactccactggcatcatctgatgtccaatggaatcattactttcaaaaacgaggtaggacagtatgacctggaagtgactacattccagctggctgttttattcgcgtggaaccaacggccacgcgaaaaaatctccttcgagaatctgaagctggctactgagctgcccgacgccgagctgcggcgcaccttatggagcctcgttgccttccccaagttaaaaagacaagttttactctatgagcctcaggtaaattcgcctaaagactttacggagggtacccttttctctgtgaaccaggagttttcactgattaaaaacgccaaagtgcagaagcgcgggaagataaatctgattgggcgcctgcagcttactacagaacgaatgagagaagaagaaaacgaaggtatcgtgcagctgaggatactgagaacgcaggaggctatcatccaaattatgaagatgcgcaagaagatcagtaatgcacaactccaaaccgagctggtggaaatcttaaaaaacatgtttttgccacaaaaaaagatgatcaaggaacagatagagtggttaatagaacacaagtacatccgacgagatgagtccgatatcaacacttttatctacatggcatag

SEQ ID NO: 138595 - DNA, 2343 bp, Artificial Sequence
  derived and/or modified sequence
atggccacctctaatctcctaaagaacaaaggctccttgcagtttgaggataaatgggattttatgcgaccgatcgtccttaagcttctcaggcaggagtcagtgactaagcaacagtggttcgacctctttagtgatgtgcacgctgtgtgcctttgggatgataaaggccctgctaagatccaccaagctctaaaggaggacatcctcgagttcatcaagcaagcgcaggcgagggtcctcagccatcaggacgatactgccctgctcaaggcttatatagtagagtggcgcaaattttttacccaatgtgatattctgcctaagccattttgtcagttggagatcacactcatgggaaagcagggttctaacaagaaatcaaacgtcgaagactcaattgtaaggaagctgatgctggatacatggaacgagagcatcttcagcaacattaaaaatcgactacaggattctgccatgaaactcgtgcacgccgagaggttaggagaggctttcgatagccaactggtaatcggcgtgcgggaaagctatgtcaacctctgttcaaaccccgaggacaagctacagatttaccgcgataacttcgaaaaggcgtaccttgacagcaccgaaagattctaccggacacaagccccaagttatctccagcagaatggggttcaaaactacatgaagtacgctgacgctaagctgaaagaagaagaaaaaagagccctgcgctacctcgaaacacggagggagtgtaatagcgtggaagctctcatggaatgctgtgttaatgccttagtcacctccttcaaagagaccatcctcgccgaatgtcagggtatgattaagaggaatgagactgaaaaattacacctgatgttttcattgatggataaggtccccaatggcatcgagcctatgctcaaggacctggaagagcacattattagcgcgggtctggcggacatggtcgccgcagcagaaaccatcaccaccgactctgagaaatacgtagaacaactcttaaccctattcaaccggttcagcaaactcgtgaaggaggctttccaggatgatcctagatttttaaccgctagagataaggcctacaaagccgtggtcaacgacgctacaatctttaaactggagctccctctaaagcagaaaggcgtcggtctgaagacgcagccagaaagcaagtgccctgaactgctcgcaaattactgtgatatgctgcttagaaaaacccccctgagcaagaagctaaccagtgaggagatcgaagccaaactgaaggaagtcctcctagtcctcaagtacgttcaaaacaaggatgtcttcatgaggtatcataaggcacacctgactcggcgacttatcctggatatcagtgctgacagcgagattgaagagaacatggtcgagtggttgcgcgaagtgggaatgccagcagattatgtcaataaactggccaggatgttccaggacatcaaggtttccgaagacctgaatcaggcctttaaagagatgcacaagaataacaagctggcattgcctgctgacagcgtgaacattaaaatactgaacgccggagcttggtcccggagcagcgagaaagtgtttgtctccctaccgacggagctcgaggatttgatacccgaggtcgaggaattctacaagaaaaaccacagcggcagaaagctgcactggcaccatttaatgtcaaatgggattattactttcaaaaatgaggttggacagtacgatctggaagtcacaactttccagttggcagtgctattcgcctggaatcagagacccagagagaagattagcttcgaaaacttgaaactggccaccgagctgccagacgcagagctgcggaggaccctctggtctttggtcgcttttccaaaactgaagcggcaggttctactctatgagccccaggtgaactctcccaaagactttacagaggggacacttttttcggtgaaccaggagttcagcctgatcaagaacgctaaggtccaaaaacggggaaaaatcaatctgattggtaggctgcagctcaccacggagcggatgagagaggaagagaacgaagggatagtccagcttcggatcctgagaacacaggaagctatcatccagattatgaaaatgcggaagaagatctctaatgctcagctccaaaccgagcttgttgagattctcaagaacatgtttcttccacagaaaaagatgatcaaagaacagatagaatggctgatcgagcacaagtacattcgacgagacgagagtgacatcaacacattcatctacatggcttag

SEQ ID NO: 138596 - DNA, 2343 bp, Artificial Sequence
  derived and/or modified sequence
atggcaacttcgaatcttcttaaaaataaaggctccctgcagtttgaagacaaatgggatttcatgcgaccaatcgttctgaagcttctgaggcaagaaagtgtgactaaacagcagtggtttgacctgttcagtgacgtgcacgctgtctgcctttgggacgataagggccctgccaaaattcatcaggcccttaaggaagacatcctggagttcataaagcaggctcaggcaagggttctgagccatcaggacgacaccgccctccttaaggcttacatcgtggagtggagaaagttcttcacccaatgtgacattttgcctaagccgttctgccaactggagattacactcatgggaaaacaaggtagcaataagaagtctaatgtggaggattccattgtccggaaactcatgctggatacttggaacgaaagtattttcagcaacatcaaaaacaggttgcaggatagcgctatgaaactagttcacgctgagcgtctcggcgaggcattcgactcccaactggttatcggggtgcgcgaatcatatgtaaacctgtgcagtaatcctgaggataaattacagatctaccgagataactttgagaaagcatacctggatagtactgaaaggttctataggactcaggccccaagttatctgcagcagaatggcgtccagaattacatgaaatatgccgacgccaagttgaaagaagaagagaagcgcgcattgcggtacttagaaactaggcgcgaatgtaattctgtagaggcattgatggagtgctgcgttaatgccttggtcacttcctttaaagagacgatcctggccgagtgtcagggcatgattaagcgcaatgaaacagagaaacttcacttgatgttttcattgatggataaagttccaaacggcatcgaacctatgcttaaggacctcgaagagcacatcatctcagcgggactggcggacatggtggcagccgcagaaacaatcactactgactctgaaaagtatgtcgagcagctgctcactctctttaaccggtttagtaagctcgtgaaggaggccttccaggatgaccctcggttcctaacagcaagggataaggcctataaagccgtggtaaatgacgccactatattcaagttagaactgcctctgaaacagaaaggtgtgggccttaaaacccaacctgagtcgaagtgccctgagctgcttgccaattactgcgacatgctcctccgaaagacccccctgtcaaagaaactgacatcggaggagatagaggccaagctgaaagaggtgctgctcgtgcttaaatacgtgcagaacaaagacgtatttatgcggtaccacaaagcccatctcaccaggaggctgatactggacatctccgcggactccgaaatcgaggaaaacatggtggagtggctccgagaggtgggaatgcctgcggactacgtcaataaactcgcccgaatgttccaagacataaaagtgtcagaagatctcaatcaggcatttaaggagatgcacaaaaacaacaaactggccctaccagctgattccgtcaatatcaagatactaaacgcgggagcctggtcgcggtcctccgaaaaggtatttgtatcccttccgactgagctcgaagatctaattcctgaggttgaagaattctacaaaaagaaccactccgggagaaagctgcattggcatcatctgatgtcgaatggaatcatcaccttcaaaaatgaggttgggcagtatgatctggaagtaacgacatttcaactggccgtactgttcgcgtggaaccagaggccaagagaaaaaatatcatttgaaaatttgaagcttgccacagaactacccgacgcggagctacgcagaactctatggagcctcgttgccttcccaaaactgaaacggcaagtcctgctgtatgagccccaggtgaattccccaaaggatttcaccgaaggaacactgttctctgttaatcaggagttcagcctgattaagaatgcgaaggtgcagaagagggggaagattaacctcatcggccgactccaactgacaacagaaaggatgagagaggaggaaaacgaaggcatcgttcaacttcgcattctgcggacacaggaggctattatccagatcatgaagatgcggaagaaaatttccaatgcgcagctccagacagaattggtcgaaattctgaaaaacatgtttctgccccaaaaaaaaatgataaaggaacagatcgagtggttgatcgagcataagtacataaggagggatgaatcggacatcaataccttcatatatatggcatag

SEQ ID NO: 138597 - DNA, 6351 bp, Artificial Sequence
  derived and/or modified sequence
agctgttgtaagcatttcaggacaatgcacctcccttaacaccgagtccgggatttggggcggggtgccggaaaacgccaggtcccgccagcagagggcacggtcccggcctcgctgcagcctcgggacccaccgaggcttccaggctcccacgctcgctcccgagcgcgtccccgccctcgcgtcacgtgacgtggccgcggaacctgagctgcggggcctaagccgagctaaattcgttgcaggtggccgcggcgggtgcaaccacaaaggctaatccgaaggagtcggggaggctcgtggagtcgatgcttcctcttccaagtcaggtcggctcccgttaccttctcagcattcgccgttccggtcttcctgagcgcgtgcatgaggtctttcgcgtggggaagctccggtgaccatgtaggggagaagagtgaggaagctcctggtgcttgggacgaggtcagcgctgtcggcgcgctgctccagcgcccaccacaccctggtgcgggccgacgggccctgggccctggtgggagctccggcctccggtcaaggcctggccgggagcgccacgaattctcgcgtcgtctcgcgagagtccaagttaaagaacatggcgacgtctaatctgttaaagaataaaggttctcttcagtttgaagacaaatgggattttatgcgcccgattgttttgaagcttttacgccaggaatctgttacaaaacagcagtggtttgatctgttttcggatgtgcatgcagtctgtctttgggatgataaaggcccagcaaaaattcatcaggctttaaaagaagatattcttgagtttattaagcaagcacaggcacgagtactgagccatcaagatgatacggctttgctaaaagcatatattgttgaatggcgaaagttctttacacaatgtgatattttaccaaaacctttttgtcaactagagattactttaatgggtaaacagggcagcaataaaaaatcaaatgtggaagacagtattgttcgaaagcttatgcttgatacatggaatgagtcaatcttttcaaacataaaaaacagactccaagatagtgcaatgaagctggtacatgctgagagattgggagaagcttttgattctcagctggttattggagtaagagaatcctatgttaacctttgttctaatcctgaggataaacttcaaatttatagggacaattttgagaaggcatacttggattcaacagagagattttatagaacacaagcaccctcgtatttacaacaaaatggtgtacagaattatatgaaatatgcagatgctaaattaaaagaagaagaaaaacgagcactacgttatttagaaacaagacgagaatgtaactccgttgaagcactcatggaatgctgtgtaaatgccctggtgacatcatttaaagagactatcttagctgagtgccaaggcatgatcaagagaaatgaaactgaaaaattacatttaatgttttcattgatggacaaagttcctaatggtatagagccaatgttgaaagacttggaggaacatatcattagtgctggcctggcagatatggtagcagctgctgaaactattactactgactctgagaaatacgttgagcagttacttacactatttaatagatttagtaaactcgtcaaagaagcttttcaagatgatccacgatttcttactgcaagagataaggcgtataaagcagttgttaatgatgctaccatatttaaacttgaattacctttgaagcagaagggggtgggattaaaaactcagcctgaatcaaaatgccctgagctgcttgccaattactgtgacatgttgctaagaaaaacaccattaagcaaaaaactaacctctgaagagattgaagcaaagcttaaagaagtgctcttggtacttaagtatgtacagaacaaagatgtttttatgaggtatcataaagctcatttgacacgacgtcttatattagacatctctgccgatagtgaaattgaagaaaacatggtagagtggctaagagaagttggtatgccagcggattatgtaaacaagcttgctagaatgtttcaggacataaaagtatctgaagatttgaaccaagcttttaaggaaatgcacaaaaataataaattggcattaccagctgattcagttaatataaaaattctgaatgctggcgcctggtcaagaagttctgagaaagtctttgtctcacttcctactgaactggaggacttgataccggaagtagaagaattctacaaaaaaaatcatagtggtagaaaattacattggcatcatctcatgtcaaatggaattataacatttaagaatgaagttggtcaatatgatttggaggtaaccacgtttcagctcgctgtattgtttgcatggaaccaaagacccagagagaaaatcagctttgaaaatcttaagcttgcaactgaactccctgatgctgaacttaggaggactttatggtctttagtagctttcccaaaactcaaacggcaagttttgttgtatgaacctcaagtcaactcacccaaagactttacagaaggtaccctcttctcagtgaaccaggagttcagtttaataaaaaatgcaaaggttcagaaaaggggtaaaatcaacttgattggacgtttgcagctcactacagaaaggatgagagaagaagagaatgaaggaatagttcaactacgaatactaagaacccaggaagctatcatacaaataatgaaaatgagaaagaaaattagtaatgctcagctgcagactgaattagtagaaattttgaaaaacatgttcttgccacaaaagaaaatgataaaagagcaaatagagtggctaatagagcacaaatacatcagaagagatgaatctgatatcaacactttcatatatatggcataattttgaatatcatggacaatatttagaacccaaattttggagtgcttgggcagaaagttgtaaagtttgtgctggagaaaggtttatttggactttgattacataaatattaaaatctctgccttaccttacaaaaacaactatattttgccaatcacattagttagcatgatggcattcccttcatgttgcacactctttgacagcatgctgttttgtggagaaacttgcattcatgaagagcccattatcaacttttaaaagtgaatttgatttgtacccaccaggagaaatacagttgggaagggtgagggtggggttcttgttgcttttttctcttttttcctctcttaaaaaatgtacttgcacaaggaaggatcttcagatattcatgcactgaaaaatgctgttatcttttgtttttaaaaaatgcaattaaaactagaaatagcactcttggtttcttttgatgaaaagagtgagctggtcaatgcaacattgggaaacggcagatgtaggtgagaagttaagtatttaatagtatcaaattgttcaaacattgctcagtataataactggattttaatggtgacctaaaaatggtattaaatattttcaactttcaaatgttggttttctttaagcaggagactgctattttagttgttgttaaatgatgaggagtttttttttttttaaatatggctggaaagcttgttttgaaaaatgaagcttatattaattgttgcttcaatagtttaaaaaatttatggagataggtaggtcattatgattgcagagccaaaatagcaaaacaaacatattaagtgtgtttactaaacatattgtgtgtttactaacacacttaatgtttatatacctaatatttattatgccatatctgaatttattaaaaacaacacagaaatctcctgctctgatatagttatgtaactgatctcttaatctgtagcatagaagtattttggtattttaaggtctcatgattagggatttgtagcctcaggtttgaatcagtcacctaggggtaagagaaaaaccacaacataagacctgaaaaacagaagcaaaattgttgcactcttaatacgagcagtaaacttgccaaatatatgtacatatatatttatatattttaaaaataaacattttttaaatcgtcagaaggcaacatttaccatgttcctttcagtctatccaaagtagcaacttaactagttgctggcaactgaatacccagagtagtggaaattttaggacttgaggacgtgaacaacttgaaagagaaaattgattccccttgaggaaagaatggctcaacgtggatttttattcattgtggtgcacgtttcaaattttcttgcaaattattttatatcttatttgatgttaagtaatatttttaaagtatggtttttgaagatagtaggaaatggagtacagaaaggcatacagtattatgttacagtggagtgctttcaagagcatttcgtaggatctgtccccatccgaagaggctttgtgaactgcctgctgaatggaaggaaagcaactttaaaacatttagagttttgctgagtatagccaaatgcctgttctgaaacttataggaaattggaattttgtttaaaattttacactttaaggtagcaaatgtcaattattagaccgagcatattgtgaagaattaaactaaaattaatacgtacagttttctctaattaggtgactgttcataatgggtatatttggaatttagaagaaataattttgtagtaattgtggcccttatgtttaacagataattcagcattggcgtatttgcttgtcccaatacaagaatgccaaaggaggaaacaggaaaaattgccgtccattttaaaaatttaggtttgttgttttaaaccataattgttctcagaacttttttggaacttctaattttgggtcatttaatttaagaatgagagtcatgatgttttgatttatgaaggtgaatttaatgcaaaagtgggtaacactacattcatagcaaagttttttattaaattttataaatttttaatagccaattatgtcctaattgtattttggggaatgaacagcagcaaatactgtaaatgtacagttttcttttttttttttttttggttatgtatacaaaagttttaactactttttggtgtttatgaaaatcatttagttgacaaggtgcctatgccattgttaaattttctttaagtaatttaacaacagatttgctaatttaaaaaaaaatgaaaaaaaaaatcttaccagcagtttgtaaaggtctggaatcacagttggcatcctttattcaggtctcttctctccagcgtacacttaaaattggtgccgagcagggatataacctgcagttaagtgaaaagaaaatccagcctccccctccaaaaaaaaaaaaaaaatttaatttttaaaaattagtggtatggcaataagacacttcagaggctatcttaacctctgaatacccatcttctagtttaaagacagagacatcccatctggaaaatgttaacttgtgttgccatctcgttgccggagtaagtagacataagacagagtttaagaagtaaaaatatagaaaaattttgatggtcacaatgagataaatattagaatattactattccaatgattaaatgaggatcttgaaataaattctgaagtcttccaatttttacatttattggaggggtccctgagttctgtcaacttttttatttaagtctcttgctcttattttgtgcataaatgttaaaccttccaaaaatgaaatgttagctttctttcttttactttttattaaatttaatagaaaatatgacctgagtagttaaaaagtattttgcattatttgcagtaagatgtctctagcactgctcaaagggcaaattttaaaacttcagtctgggtgaaagatttgctagttttacagaaagatttgctatcttaaactcaagctggtttttctgttctcatgtaagtgactgggatgctgtcttatgaattcttccaaggtcatgtttgtgaaataaacattacatgagagctttcctgtcatctacactatatgttgtctggagtgttgaacaaatttattttagtttctaagttgtaatctatcctcatatggtctatacgattttgaatgtgtgccactacatactgagatgataatgctgtacaattttaagtggtagcagtttctgtatgcagtaggctgaaatattttgatgaactgcttaatttttggattttattttttaagttgtataatttattttcttgcaaaataaaaatgtaatataaaagcttttacctatcca

SEQ ID NO: 138598 - DNA, 3596 bp, Artificial Sequence
  derived and/or modified sequence
ccctggtgggagctccggcctccggtcaaggcctggccgggagcgccacgaattctcgcgtcgtctcgcgagagtccaagttaaagaacatggcgacgtctaatctgttaaagaataaaggttctcttcagtttgaagacaaatgggattttatgcgcccgattgttttgaagcttttacgccaggaatctgttacaaaacagcagtggtttgatctgttttcggatgtgcatgcagtctgtctttgggatgataaaggcccagcaaaaattcatcaggctttaaaagaagatattcttgagtttattaagcaagcacaggcacgagtactgagccatcaagatgatacggctttgctaaaagcatatattgttgaatggcgaaagttctttacacaatgtgatattttaccaaaacctttttgtcaactagagattactttaatgggtaaacagggcagcaataaaaaatcaaatgtggaagacagtattgttcgaaagcttatgcttgatacatggaatgagtcaatcttttcaaacataaaaaacagactccaagatagtgcaatgaagctggtacatgctgagagattgggagaagcttttgattctcagctggttattggagtaagagaatcctatgttaacctttgttctaatcctgaggataaacttcaaatttatagggacaattttgagaaggcatacttggattcaacagagagattttatagaacacaagcaccctcgtatttacaacaaaatggtgtacagaattatatgaaatatgcagatgctaaattaaaagaagaagaaaaacgagcactacgttatttagaaacaagacgagaatgtaactccgttgaagcactcatggaatgctgtgtaaatgccctggtgacatcatttaaagagactatcttagctgagtgccaaggcatgatcaagagaaatgaaactgaaaaattacatttaatgttttcattgatggacaaagttcctaatggtatagagccaatgttgaaagacttggaggaacatatcattagtgctggcctggcagatatggtagcagctgctgaaactattactactgactctgagaaatacgttgagcagttacttacactatttaatagatttagtaaactcgtcaaagaagcttttcaagatgatccacgatttcttactgcaagagataaggcgtataaagcagttgttaatgatgctaccatatttaaacttgaattacctttgaagcagaagggggtgggattaaaaactcagcctgaatcaaaatgccctgagctgcttgccaattactgtgacatgttgctaagaaaaacaccattaagcaaaaaactaacctctgaagagattgaagcaaagcttaaagaagtgctcttggtacttaagtatgtacagaacaaagatgtttttatgaggtatcataaagctcatttgacacgacgtcttatattagacatctctgccgatagtgaaattgaagaaaacatggtagagtggctaagagaagttggtatgccagcggattatgtaaacaagcttgctagaatgtttcaggacataaaagtatctgaagatttgaaccaagcttttaaggaaatgcacaaaaataataaattggcattaccagctgattcagttaatataaaaattctgaatgctggcgcctggtcaagaagttctgagaaagtctttgtctcacttcctactgaactggaggacttgataccggaagtagaagaattctacaaaaaaaatcatagtggtagaaaattacattggcatcatctcatgtcaaatggaattataacatttaagaatgaagttggtcaatatgatttggaggtaaccacgtttcagctcgctgtattgtttgcatggaaccaaagacccagagagaaaatcagctttgaaaatcttaagcttgcaactgaactccctgatgctgaacttaggaggactttatggtctttagtagctttcccaaaactcaaacggcaagttttgttgtatgaacctcaagtcaactcacccaaagactttacagaaggtaccctcttctcagtgaaccaggagttcagtttaataaaaaatgcaaaggttcagaaaaggggtaaaatcaacttgattggacgtttgcagctcactacagaaaggatgagagaagaagagaatgaaggaatagttcaactacgaatactaagaacccaggaagctatcatacaaataatgaaaatgagaaagaaaattagtaatgctcagctgcagactgaattagtagaaattttgaaaaacatgttcttgccacaaaagaaaatgataaaagagcaaatagagtggctaatagagcacaaatacatcagaagagatgaatctgatatcaacactttcatatatatggcataattttgaatatcatggacaatatttagaacccaaattttggagtgcttgggcagaaagttgtaaagtttgtgctggagaaaggtttatttggactttgattacataaatattaaaatctctgccttaccttacaaaaacaactatattttgccaatcacattagttagcatgatggcattcccttcatgttgcacactctttgacagcatgctgttttgtggagaaacttgcattcatgaagagcccattatcaacttttaaaagtgaatttgatttgtacccaccaggagaaatacagttgggaagggtgagggtggggttcttgttgcttttttctcttttttcctctcttaaaaaatgtacttgcacaaggaaggatcttcagatattcatgcactgaaaaatgctgttatcttttgtttttaaaaaatgcaattaaaactagaaatagcactcttggtttcttttgatgaaaagagtgagctggtcaatgcaacattgggaaacggcagatgtagataattcagcattggcgtatttgcttgtcccaatacaagaatgccaaaggaggaaacaggaaaaattgccgtccattttaaaaatttaggtttgttgttttaaaccataattgttctcagaacttttttggaacttctaattttgggtcatttaatttaagaatgagagtcatgatgttttgatttatgaaggtgaatttaatgcaaaagtgggtaacactacattcatagcaaagttttttattaaattttataaatttttaatagccaattatgtcctaattgtattttggggaatgaacagcagcaaatactgtaaatgtacagttttcttttttttttttttttggttatgtatacaaaagttttaactactttttggtgtttatgaaaatcatttagttgacaaggtgcctatgccattgttaaattttctttaagtaatttaacaacagatttgctaatttaaaaaaaaatgaaaaaaaaaatcttaccagcagtttgtaaaggtctggaatcacagttggcatcctttattcaggtctcttctctccagcgtacacttaaaattggtgccgagcagggatataacctgcagttaagtgaaaagaaaatccagcctccccctccaaaaaaaaaaaaaaaa

SEQ ID NO: 138599 - DNA, 2343 bp, Artificial Sequence
  derived and/or modified sequence
atggccaccagcaacctgctgaagaacaagggcagcctgcagttcgaggacaagtgggacttcatgagacccatcgtgctgaagctgctgagacaggagagcgtgaccaagcagcagtggttcgacctgttcagcgacgtgcacgccgtgtgcctgtgggacgacaagggccccgccaagatccaccaggccctgaaggaggacatcctggagttcatcaagcaggcccaggccagagtgctgagccaccaggacgacaccgccctgctgaaggcctacatcgtggagtggagaaagttcttcacccagtgcgacatcctgcccaagcccttctgccagctggagatcaccctgatgggcaagcagggcagcaacaagaagagcaacgtggaggacagcatcgtgagaaagctgatgctggacacctggaacgagagcatcttcagcaacatcaagaacagactgcaggacagcgccatgaagctggtgcacgccgagagactgggcgaggccttcgacagccagctggtgatcggcgtgagagagagctacgtgaacctgtgcagcaaccccgaggacaagctgcagatctacagagacaacttcgagaaggcctacctggacagcaccgagagattctacagaacccaggcccccagctacctgcagcagaacggcgtgcagaactacatgaagtacgccgacgccaagctgaaggaggaggagaagagagccctgagatacctggagaccagaagagagtgcaacagcgtggaggccctgatggagtgctgcgtgaacgccctggtgaccagcttcaaggagaccatcctggccgagtgccagggcatgatcaagagaaacgagaccgagaagctgcacctgatgttcagcctgatggacaaggtgcccaacggcatcgagcccatgctgaaggacctggaggagcacatcatcagcgccggcctggccgacatggtggccgccgccgagaccatcaccaccgacagcgagaagtacgtggagcagctgctgaccctgttcaacagattcagcaagctggtgaaggaggccttccaggacgaccccagattcctgaccgccagagacaaggcctacaaggccgtggtgaacgacgccaccatcttcaagctggagctgcccctgaagcagaagggcgtgggcctgaagacccagcccgagagcaagtgccccgagctgctggccaactactgcgacatgctgctgagaaagacccccctgagcaagaagctgaccagcgaggagatcgaggccaagctgaaggaggtgctgctggtgctgaagtacgtgcagaacaaggacgtgttcatgagataccacaaggcccacctgaccagaagactgatcctggacatcagcgccgacagcgagatcgaggagaacatggtggagtggctgagagaggtgggcatgcccgccgactacgtgaacaagctggccagaatgttccaggacatcaaggtgagcgaggacctgaaccaggccttcaaggagatgcacaagaacaacaagctggccctgcccgccgacagcgtgaacatcaagatcctgaacgccggcgcctggagcagaagcagcgagaaggtgttcgtgagcctgcccaccgagctggaggacctgatccccgaggtggaggagttctacaagaagaaccacagcggcagaaagctgcactggcaccacctgatgagcaacggcatcatcaccttcaagaacgaggtgggccagtacgacctggaggtgaccaccttccagctggccgtgctgttcgcctggaaccagagacccagagagaagatcagcttcgagaacctgaagctggccaccgagctgcccgacgccgagctgagaagaaccctgtggagcctggtggccttccccaagctgaagagacaggtgctgctgtacgagccccaggtgaacagccccaaggacttcaccgagggcaccctgttcagcgtgaaccaggagttcagcctgatcaagaacgccaaggtgcagaagagaggcaagatcaacctgatcggcagactgcagctgaccaccgagagaatgagagaggaggagaacgagggcatcgtgcagctgagaatcctgagaacccaggaggccatcatccagatcatgaagatgagaaagaagatcagcaacgcccagctgcagaccgagctggtggagatcctgaagaacatgttcctgccccagaagaagatgatcaaggagcagatcgagtggctgatcgagcacaagtacatcagaagagacgagagcgacatcaacaccttcatctacatggcctag

SEQ ID NO: 138600 - protein, 173 aa, Artificial Sequence
  derived and/or modified sequence
MSLLGPKVLLFLAAFIITSDWIPLGVNSQRGDDVTQATPETFTEDPNLVNDPATDETVLAVLADIAPSTDDLASLSEKNTTAECWDEKFTCTRLYSVHRPVKQCIHQLCFTSLRRMYIVNKEICSRLVCKEHEAMKDELCRQMAGLPPRRLRRSNYFRLPPCENVDLQRPNGL

SEQ ID NO: 138601 - protein, 91 aa, Artificial Sequence
  derived and/or modified sequence
MSLLGPKVLLFLAAFIITSDWIPLGVNSQRGDDVTQATPETFTEDPNLVNDPATDETVLAVLADIAPSTDDLASLSEKNTTAECWDEKFTC

SEQ ID NO: 138602 - DNA, 522 bp, Artificial Sequence
  derived and/or modified sequence
atgagcctgttggggcctaaggtgctgctgttcttggccgcgttcattattacaagcgactggatccccctgggtgtgaacagtcagcggggcgatgacgtcacgcaagccactcctgaaactttcaccgaagaccccaacctcgttaatgatcccgccactgacgaaacagtgttggccgtacttgccgatatcgccccatcaacagacgacctggcaagcttgtctgaaaagaataccacggcagaatgttgggatgagaagttcacttgcacgcggttatacagcgttcaccgaccagttaagcagtgcatccaccagctgtgcttcacgtcactacgtcggatgtacatcgttaacaaggagatttgctctaggttggtgtgtaaagagcatgaggcaatgaaagacgaactctgcaggcagatggccgggctcccccctagaaggctacgacgctcaaactactttcgactccctccttgcgaaaatgttgatctgcaacgaccgaacggtctgtag

SEQ ID NO: 138603 - DNA, 276 bp, Artificial Sequence
  derived and/or modified sequence
atgtctctgctgggaccgaaggtcttactcttcctcgccgcctttatcatcacatccgattggatacctctcggtgtgaactcccagcggggcgacgatgtaacccaggcaacacctgagacattcactgaagaccccaatctggtgaacgatccggcaacggatgaaacagttctcgcagtcttggctgatattgcccccagcaccgatgatttggcctcactttcagaaaagaacacgaccgcggagtgttgggatgagaagttcacatgctag

SEQ ID NO: 138604 - DNA, 522 bp, Artificial Sequence
  derived and/or modified sequence
atgagcctgctgggccccaaggtgctgctcttcctggccgccttcatcatcaccagtgactggatccccctgggcgtgaacagccagagaggagatgatgtgacccaggccaccccagagaccttcacagaggaccccaacctggtgaatgaccctgccacagatgaaacagtgctggccgtgctggccgacatcgcccccagcacagatgacctggccagcctgtctgagaagaacaccacagctgagtgctgggatgagaagttcacctgcacccggctgtacagcgtgcacaggcctgtgaagcagtgcatccaccagctgtgcttcaccagcctgcggaggatgtacatcgtgaacaaggagatctgcagccggctggtgtgcaaggagcacgaggccatgaaggatgagctgtgccggcagatggccggcctgcccccccggcggctgcggcgcagcaactacttccggctgcccccctgtgaaaatgtggacctgcagaggcccaacggcctgtag

SEQ ID NO: 138605 - DNA, 276 bp, Artificial Sequence
  derived and/or modified sequence
atgagcctgctgggccccaaggtgctgctcttcctggccgccttcatcatcaccagtgactggatccccctgggcgtgaacagccagagaggagatgatgtgacccaggccaccccagagaccttcacagaggaccccaacctggtgaatgaccctgccacagatgaaacagtgctggccgtgctggccgacatcgcccccagcacagatgacctggccagcctgtctgagaagaacaccacagctgagtgctgggatgagaagttcacctgctag

SEQ ID NO: 138606 - DNA, 2845 bp, Artificial Sequence
  derived and/or modified sequence
tctacgcctagcctggctttcttgctctccctcatctcattgtttcagcggaggccaaatctgaagtcctttccagggagtggctctgttcatcttattcgccagccaaagtaggaacagcgtaagaggagagagacacattcagcagccaaaggactcggtggaaagagcagaacaccatagacaatatgtcgctcttgggacccaaggtgctgctgtttcttgctgcattcatcatcacctctgactggatacccctgggggtcaatagtcaacgaggagacgatgtgactcaagcgactccagaaacattcacagaagatcctaatctggtgaatgatcccgctacagatgaaacagttttggctgttttggctgatattgcaccttccacagatgacttggcctccctcagtgaaaaaaataccactgcagagtgctgggatgagaaatttacctgcacaaggctctactctgtgcatcggccggttaaacaatgcattcatcagttatgcttcaccagtttacgacgtatgtacatcgtcaacaaggagatctgctctcgtcttgtctgtaaggaacacgaagctatgaaagatgagctttgccgtcagatggctggtctgccccctaggagactccgtcgctccaattacttccgacttcctccctgtgaaaatgtggatttgcagagacccaatggtctgtgatcattgaaaaagaggaaagaagaaaaaatgtatgggtgagaggaaggaggatctccttcttctccaaccattgacagctaacccttagacagtatttcttaaaccaatccttttgcaatgtccagcttttacccctactctctactttttcacccaaactgataacatttatctcattttctagcacttaaaatacaaagtctatattattgcataattttgctgcttctcaatatcatagacacagtgaatagatgatgactatatggcttatatacaaacattctatgtacaatttcaagggagactaaactttaggctaataatctttactattgaatctgtctgatatagatcttagggttgaagaagctatctttgtctatttgggctaaccatagaatttcatttattttcctcacaatattttcctagaccaactccccatcattcacgtgttcctctttactcttactttaactattttgctggcttgcccgaaaatttgcctggcaagtcttccttataagacacatcatggtaagttttgtagtcctgtaagattctgcaacacagtcaagaattatacaatcctactagcaatatataaggacccaaaatgtcttctgctaagctcagaggctggggctaaagcatgaggactatgccagctatagaacttggactcataattcgctatccaatttttcatgcagttgtctagtcgggaagtaaggttggaaactaagtctcatttactgattcgtttatgggtagtaccgggatgaacccaccaccacaaagcaaattagacaacttaatgtgaaatcataccattggttgacgtttccttgagttgctacttcgttcatcttcacaacttaacaagtgcacggtcgaattattgtgcaagtggcttttggatatcctgattggggcctaagaagggcattcagacttgaattttaataggcagacagaaagtttgcctaatagttaatacgaaagagtgaaagaaacacaatattcagacaacccacattcttatcctggctctagcagtaaccacgtagccttggataagccattttccttcattaggtcctggtttaatttcctcatctttaaaatgagaaggttaaatttatcttagtactgctgggcgcagtggctcatgcctgtaatctgagcactttgggaagctgaggcgggtggatcacttgaggtcagaaatttgagacgagcctggccaacatggtgaaaccccatctctactaaaaatacaaaaattagctgggcgtggtggcacgtgcctgtaatcccagctactcgggaggctgaggcaggagaatcaattgaacctgggaggcagaggttgcagtgagccgagatggcgccattgcactccagcctgggtgacaaaagcaaaagtccatcttaagaaatatatatatatattatatatattcttagttctaagatttcctttaattctatgattctctggatttaaatgcattattcatatttcttgaagcttagatacagtctaattcatagcaaccatatctgctttatcctaggtgagggtagcagtccacaatggaatagaagaaaatcccattataacaaatgacaaattatatatcatgaatccttctgtctgactaactcaataactttctataaaagccaatggaattcaaataggagctaggagacaacaagttatatatgacagtggaggttgtattccttttatattgctgagaaaactagttaaatgatcagattcttgctgttaagaaacaatttcgtttaatgggatctgtacaactgattttaaaaaaatgctacaaaaagccccaaagcatataatctctactccttacagtctctagaattaaatgtactcatttagacaacatattaaatgcatattttagccactttagagaaacctcataggcacagagtttccaagattaattttaagaatatcttcacgaacttgaccctcctactccacattgcaacatttccatcagacagcatttcaattccagtattatgtatattgcaaattaaacattttaaaatatttttttccaatttatttctcaaaataaaatgtc

SEQ ID NO: 138607 - DNA, 582 bp, Artificial Sequence
  derived and/or modified sequence
atttgattacctgaaaccctaaagagacagagggaatgtgtgtatgtctgtgtgtgtgtgaaagggctggagggggcaatggggaatgtcactgaacttagtcttgagcagacctcccaaataaccgtggaattctgatgaaggagacgccaagatgagcagatgatatgaaaaagtcacgcatatgagaaaggaagattccacatcaggggtgaaagaggccaaagggtagggccaagtacggaccatgtagaatgtaaaatttcctctgacttggtagcagagaataataaaagcaagaataatgatatgtcgctcttgggacccaaggtgctgctgtttcttgctgcattcatcatcacctctgactggatacccctgggggtcaatagtcaacgaggagacgatgtgactcaagcgactccagaaacattcacagaagatcctaatctggtgaatgatcccgctacagatgaaacagttttggctgttttggctgatattgcaccttccacagatgacttggcctccctcagtgaaaaaaataccactgcagagtgctgggatgagaaatttacctgc

SEQ ID NO: 138608 - DNA, 522 bp, Artificial Sequence
  derived and/or modified sequence
atgagcctgctgggccccaaggtgctgctgttcctggccgccttcatcattacttcagattggattcctctgggcgtgaacagccaaaggggagatgatgtaacccaggctactcctgaaaccttcaccgaggatccaaaccttgtgaatgaccctgctaccgacgagaccgttctggctgtgctcgctgatattgccccatcaactgacgatctggccagtctgagtgaaaaaaacaccacagctgaatgctgggacgagaaattcacttgtacgcgactgtactctgtccatcgccccgtgaaacaatgcattcatcaactctgttttactagcctccggcggatgtacatcgtgaacaaagaaatatgtagcagacttgtctgtaaggaacatgaggcaatgaaggacgaattatgtagacagatggccggactcccaccgcggcgccttcgacgcagcaattacttccgtctgcccccgtgtgaaaatgtggacctgcagagacccaacggcctctag

SEQ ID NO: 138609 - DNA, 276 bp, Artificial Sequence
  derived and/or modified sequence
atgagcctgctgggccccaaggtgctgctgttcctggccgccttcataattactagtgattggatccctctcggcgtaaatagtcagaggggggacgacgtgacacaggccacccccgagacttttacagaagatcctaatctagtcaacgatcccgcgacagacgagaccgtcctggccgtgttggctgacatcgccccaagcactgatgatctagcctccctctccgaaaaaaacaccacggccgaatgttgggacgaaaagttcacatgctag

SEQ ID NO: 138610 - DNA, 522 bp, Artificial Sequence
  derived and/or modified sequence
atgagtctcttgggacccaaggtattactgtttcttgccgctttcatcatcacttcagactggatccctctgggcgtcaacagccagaggggagatgacgtgacacaggcaacacccgaaacatttaccgaagaccctaatctcgtgaacgaccctgctacagacgaaacggtgctggccgtcttagcagatatcgccccatctactgacgacttagctagcctgagtgagaagaataccacagctgagtgctgggacgaaaagtttacttgcacccgtttgtactctgtgcaccgccctgtaaaacagtgtatccatcagctatgtttcacatcactccgcaggatgtacatcgtcaataaagagatttgtagccgtttggtctgtaaagagcatgaggccatgaaagatgagttatgtcgccagatggccggactcccccctaggcggctgagaagatccaattattttcggttgccaccatgcgaaaacgtggaccttcagagacccaacggtctgtag

SEQ ID NO: 138611 - DNA, 276 bp, Artificial Sequence
  derived and/or modified sequence
atgtctcttctgggtccgaaagtgcttctgtttctggcggcattcattatcacatctgactggatccccctcggcgttaacagtcaacggggagatgatgtcactcaagctacaccggagactttcactgaggacccaaacctagtgaatgaccccgcaactgacgaaactgtcctggctgttctcgctgacatcgcccctagcaccgacgacctggctagcctgtcggagaagaatacaacggctgagtgttgggacgagaagtttacgtgttag

SEQ ID NO: 138612 - DNA, 522 bp, Artificial Sequence
  derived and/or modified sequence
atgtccctgcttggaccaaaagtactactgttcctcgctgcctttattataacctccgattggatccccttaggcgtgaatagccagcgaggggatgatgtcacacaggccacgccggagaccttcaccgaagaccccaacctggtgaatgatccagccaccgatgagaccgtccttgccgtacttgccgatattgccccctctactgacgaccttgcttcactgtcagagaaaaacaccaccgctgaatgctgggacgaaaagtttacctgtactcgtctctactctgtgcaccgccctgtaaaacaatgcattcaccagctctgtttcaccagtctgagacggatgtacatagtcaacaaagaaatttgctctagacttgtctgcaaagagcatgaggctatgaaagatgaattgtgcagacagatggccggtctgccccccaggcgtctccgacgtagcaactattttagactgcctccttgcgagaatgtggacctccagagaccaaatggattatag

SEQ ID NO: 138613 - DNA, 276 bp, Artificial Sequence
  derived and/or modified sequence
atgagtctcctaggacccaaggtgttattatttctggccgcatttattataacctctgattggatccccctgggggtgaatagccagcgaggggatgatgtaactcaagctacccctgaaacttttacagaagacccaaacctcgttaacgatcccgctacagatgagaccgtgttagccgttcttgcggacattgctcctagtaccgacgatctcgcatcgttgtccgaaaaaaacaccaccgcggaatgctgggatgaaaaattcacgtgttag

SEQ ID NO: 138614 - DNA, 522 bp, Artificial Sequence
  derived and/or modified sequence
atgtctcttttgggccctaaggttctgctgtttctggccgcattcatcataacctctgattggatccctctcggagtgaatagccagcggggcgacgatgtgacccaagccacacctgaaaccttcactgaagaccccaaccttgttaatgatccagccacagatgaaaccgtgctcgctgtactcgcagacatcgcacctagcactgatgacttggcttccctcagcgaaaaaaacaccactgccgagtgttgggacgagaaatttacatgcactaggttgtactcggtccaccgtccagtcaaacaatgtatccaccagctctgttttacctctttgcggcggatgtatatagttaataaagaaatatgctcaagactggtctgtaaggaacacgaggccatgaaggatgaattgtgtcgtcagatggcaggactacctccccgtagattacgacgttccaactactttaggctcccaccgtgcgagaacgtcgacttgcagcggcctaatggcctgtag

SEQ ID NO: 138615 - DNA, 522 bp, Artificial Sequence
  derived and/or modified sequence
atgagcctgctgggccccaaggtgctgctgttcctggccgccttcatcatcaccagcgactggatccccctgggcgtgaacagccagagaggcgacgacgtgacccaggccacccccgagaccttcaccgaggaccccaacctggtgaacgaccccgccaccgacgagaccgtgctggccgtgctggccgacatcgcccccagcaccgacgacctggccagcctgagcgagaagaacaccaccgccgagtgctgggacgagaagttcacctgcaccagactgtacagcgtgcacagacccgtgaagcagtgcatccaccagctgtgcttcaccagcctgagaagaatgtacatcgtgaacaaggagatctgcagcagactggtgtgcaaggagcacgaggccatgaaggacgagctgtgcagacagatggccggcctgccccccagaagactgagaagaagcaactacttcagactgcccccctgcgagaacgtggacctgcagagacccaacggcctgtag

SEQ ID NO: 138616 - DNA, 276 bp, Artificial Sequence
  derived and/or modified sequence
atgagcctgctgggccccaaggtgctgctgttcctggccgccttcatcatcaccagcgactggatccccctgggcgtgaacagccagagaggcgacgacgtgacccaggccacccccgagaccttcaccgaggaccccaacctggtgaacgaccccgccaccgacgagaccgtgctggccgtgctggccgacatcgcccccagcaccgacgacctggccagcctgagcgagaagaacaccaccgccgagtgctgggacgagaagttcacctgctag

SEQ ID NO: 138617 - RNA, 276 nt, Artificial Sequence
  derived and/or modified sequence
augagucuccuaggacccaagguguuauuauuucuggccgcauuuauuauaaccucugauuggaucccccugggggugaauagccagcgaggggaugauguaacucaagcuaccccugaaacuuuuacagaagacccaaaccucguuaacgaucccgcuacagaugagaccguguuagccguucuugcggacauugcuccuaguaccgacgaucucgcaucguuguccgaaaaaaacaccaccgcggaaugcugggaugaaaaauucacguguuag

SEQ ID NO: 138618 - protein, 835 aa, Artificial Sequence
  derived and/or modified sequence
MAELSEEALLSVLPTIRVPKAGDRVHKDECAFSFDTPESEGGLYICMNTFLGFGKQYVERHFNKTGQRVYLHLRRTRRPKEEDPATGTGDPPRKKPTRLAIGVEGGFDLSEEKFELDEDVKIVILPDYLEIARDGLGGLPDIVRDRVTSAVEALLSADSASRKQEVQAWDGEVRQVSKHAFSLKQLDNPARIPPCGWKCSKCDMRENLWLNLTDGSILCGRRYFDGSGGNNHAVEHYRETGYPLAVKLGTITPDGADVYSYDEDDMVLDPSLAEHLSHFGIDMLKMQKTDKTMTELEIDMNQRIGEWELIQESGVPLKPLFGPGYTGIRNLGNSCYLNSVVQVLFSIPDFQRKYVDKLEKIFQNAPTDPTQDFSTQVAKLGHGLLSGEYSKPVPESGDGERVPEQKEVQDGIAPRMFKALIGKGHPEFSTNRQQDAQEFFLHLINMVERNCRSSENPNEVFRFLVEEKIKCLATEKVKYTQRVDYIMQLPVPMDAALNKEELLEYEEKKRQAEEEKMALPELVRAQVPFSSCLEAYGAPEQVDDFWSTALQAKSVAVKTTRFASFPDYLVIQIKKFTFGLDWVPKKLDVSIEMPEELDISQLRGTGLQPGEEELPDIAPPLVTPDEPKAPMLDESVIIQLVEMGFPMDACRKAVYYTGNSGAEAAMNWVMSHMDDPDFANPLILPGSSGPGSTSAAADPPPEDCVTTIVSMGFSRDQALKALRATNNSLERAVDWIFSHIDDLDAEAAMDISEGRSAADSISESVPVGPKVRDGPGKYQLFAFISHMGTSTMCGHYVCHIKKEGRWVIYNDQKVCASEKPPKDLGYIYFYQRVAS

SEQ ID NO: 138619 - DNA, 2508 bp, Artificial Sequence
  derived and/or modified sequence
atggccgagctgagcgaggaggccctgctgagcgtgctgcccaccatcagagtgcccaaggccggcgacagagtgcacaaggacgagtgcgccttcagcttcgacacccccgagagcgagggcggcctgtacatctgcatgaacaccttcctgggcttcggcaagcagtacgtggagagacacttcaacaagaccggccagagagtgtacctgcacctgagaagaaccagaagacccaaggaggaggaccccgccaccggcaccggcgacccccccagaaagaagcccaccagactggccatcggcgtggagggcggcttcgacctgagcgaggagaagttcgagctggacgaggacgtgaagatcgtgatcctgcccgactacctggagatcgccagagacggcctgggcggcctgcccgacatcgtgagagacagagtgaccagcgccgtggaggccctgctgagcgccgacagcgccagcagaaagcaggaggtgcaggcctgggacggcgaggtgagacaggtgagcaagcacgccttcagcctgaagcagctggacaaccccgccagaatccccccctgcggctggaagtgcagcaagtgcgacatgagagagaacctgtggctgaacctgaccgacggcagcatcctgtgcggcagaagatacttcgacggcagcggcggcaacaaccacgccgtggagcactacagagagaccggctaccccctggccgtgaagctgggcaccatcacccccgacggcgccgacgtgtacagctacgacgaggacgacatggtgctggaccccagcctggccgagcacctgagccacttcggcatcgacatgctgaagatgcagaagaccgacaagaccatgaccgagctggagatcgacatgaaccagagaatcggcgagtgggagctgatccaggagagcggcgtgcccctgaagcccctgttcggccccggctacaccggcatcagaaacctgggcaacagctgctacctgaacagcgtggtgcaggtgctgttcagcatccccgacttccagagaaagtacgtggacaagctggagaagatcttccagaacgcccccaccgaccccacccaggacttcagcacccaggtggccaagctgggccacggcctgctgagcggcgagtacagcaagcccgtgcccgagagcggcgacggcgagagagtgcccgagcagaaggaggtgcaggacggcatcgcccccagaatgttcaaggccctgatcggcaagggccaccccgagttcagcaccaacagacagcaggacgcccaggagttcttcctgcacctgatcaacatggtggagagaaactgcagaagcagcgagaaccccaacgaggtgttcagattcctggtggaggagaagatcaagtgcctggccaccgagaaggtgaagtacacccagagagtggactacatcatgcagctgcccgtgcccatggacgccgccctgaacaaggaggagctgctggagtacgaggagaagaagagacaggccgaggaggagaagatggccctgcccgagctggtgagagcccaggtgcccttcagcagctgcctggaggcctacggcgcccccgagcaggtggacgacttctggagcaccgccctgcaggccaagagcgtggccgtgaagaccaccagattcgccagcttccccgactacctggtgatccagatcaagaagttcaccttcggcctggactgggtgcccaagaagctggacgtgagcatcgagatgcccgaggagctggacatcagccagctgagaggcaccggcctgcagcccggcgaggaggagctgcccgacatcgccccccccctggtgacccccgacgagcccaaggcccccatgctggacgagagcgtgatcatccagctggtggagatgggcttccccatggacgcctgcagaaaggccgtgtactacaccggcaacagcggcgccgaggccgccatgaactgggtgatgagccacatggacgaccccgacttcgccaaccccctgatcctgcccggcagcagcggccccggcagcaccagcgccgccgccgaccccccccccgaggactgcgtgaccaccatcgtgagcatgggcttcagcagagaccaggccctgaaggccctgagagccaccaacaacagcctggagagagccgtggactggatcttcagccacatcgacgacctggacgccgaggccgccatggacatcagcgagggcagaagcgccgccgacagcatcagcgagagcgtgcccgtgggccccaaggtgagagacggccccggcaagtaccagctgttcgccttcatcagccacatgggcaccagcaccatgtgcggccactacgtgtgccacatcaagaaggagggcagatgggtgatctacaacgaccagaaggtgtgcgccagcgagaagccccccaaggacctgggctacatctacttctaccagagagtggccagctag

SEQ ID NO: 138620 - DNA, 2508 bp, Artificial Sequence
  derived and/or modified sequence
atggccgagttaagcgaagaggcgttgctgtccgttttgccaaccatccgtgtccccaaagctggcgatagggtacataaagatgagtgtgcctttagcttcgacacacctgagagcgaaggaggcctgtacatatgcatgaacacattcctcgggtttggtaaacaatacgtggaacggcattttaacaagaccggacaacgagtctacctgcacctgaggagaacaaggcggccaaaggaggaggatcccgccacaggtactggggacccaccacggaaaaagcctaccaggctcgccattggtgttgaaggaggattcgatcttagcgaagaaaagttcgagctcgatgaagacgtgaaaatcgtcatcttgccggattacttggagatcgccagagatggtctcggggggctacccgacatagttagagatagagtgacatctgcagtggaggctctgctgtccgcggacagtgcgtctaggaaacaagaagtgcaggcttgggatggcgaagtccggcaggtgtctaagcatgccttcagtcttaaacagctcgataaccccgctcgaattccaccttgcgggtggaagtgttccaaatgcgatatgcgcgaaaacttatggttaaacctaaccgatggatcgatcttgtgtgggaggagatattttgacgggagcggcggaaacaaccacgctgtggagcattacagagagaccggctaccctttggcagtaaaacttggtacaatcactccagacggcgctgacgtttactcatacgacgaagatgacatggtgctggatcctagcctggccgagcatttaagtcatttcgggatagacatgctgaaaatgcagaaaaccgacaagaccatgactgagttggagattgacatgaatcagagaattggtgaatgggagcttattcaagaatcaggagttcccctgaagccactgtttggaccaggttacacaggcattcgaaatctgggcaatagctgctatctgaacagcgttgtgcaggttctcttctctataccagactttcagaggaagtatgtcgataagctggaaaaaattttccaaaacgcacccacagacccgactcaggacttcagtacacaggttgcgaaactgggccacggtctcctgagcggtgaatactccaagccagtgcccgaaagtggcgatggagaacgggtgcctgagcagaaggaggtacaggatgggatcgcacctcgtatgttcaaggccttaataggcaaggggcacccagaattttcaacaaaccggcaacaggacgcccaggagttctttttgcatctgataaatatggtcgagcggaattgccgcagctctgagaatcctaatgaagtgttccggttcttagtggaggagaagattaagtgtctggcaacagaaaaggttaagtacacacagagagtggactacattatgcagctgccagttccaatggatgccgccctgaataaggaggagctgctggagtatgaggagaagaaaaggcaggccgaagaggagaagatggcactccccgaactagtccgcgcccaagtgccattctctagttgccttgaggcatacggcgccccagagcaggttgatgacttctggtcaacagccctccaagctaaaagcgtggctgtgaaaactacaagattcgcttccttccctgattatctggtgatccagatcaaaaaattcacctttggcctcgactgggttccaaaaaaactggatgtgtccatagagatgcctgaagaactcgatatctctcagctgcgggggaccggcttgcagcctggggaggaggagcttccagatattgcaccccccctggtaactcccgacgagccaaaggctccaatgttagatgagagtgtgattattcagctcgttgagatgggcttccccatggacgcttgcagaaaggccgtgtattacactggaaattcaggagccgaagcggccatgaattgggtgatgtcacatatggatgatcccgacttcgctaatccattgatcctgcccgggtcttcgggtccggggtccacttcagcggccgccgatcccccccccgaagactgcgtgaccactatagtatctatgggattcagtcgcgaccaagcgctcaaggctctaagagctactaataactcattagagcgggcggtggattggattttcagtcacattgacgatctcgatgctgaagccgccatggacattagcgagggacggtcagccgcagacagcattagcgaatccgtgcccgtgggtccaaaggtgcgggacggcccaggtaaataccaactgtttgcttttatatcacatatggggacatcaaccatgtgcggccactatgtgtgtcacatcaagaaagagggtagatgggttatctataacgaccagaaagtgtgtgcatccgaaaaaccacctaaggatctgggctatatctacttttaccagcgagttgctagttag

SEQ ID NO: 138621 - DNA, 2508 bp, Artificial Sequence
  derived and/or modified sequence
atggccgagctgtctgaggaggccctgctgtctgtgctgcccaccatccgggtgcccaaggccggggacagagtgcacaaggatgaatgtgccttctcctttgacaccccagagagcgagggcggcctgtacatctgcatgaacaccttcctgggctttgggaagcagtatgtggagcggcacttcaacaagacaggccagagggtgtacctgcacctgcggaggacccggcggcccaaggaggaggaccctgccaccggcaccggggacccccccaggaagaagcccacccggctggccatcggcgtggagggcggctttgacctgtctgaggagaagtttgagctggatgaagatgtgaagatcgtcatcctgcctgactacctggagatcgccagagatggcctgggcggcctgcctgacatcgtgcgggacagagtgaccagcgctgtggaggccctgctgtctgctgacagcgccagcaggaagcaggaggtgcaggcctgggatggagaggtgcggcaggtgtccaagcacgccttcagcctgaagcagctggacaacccagcccgcatccccccctgtggctggaagtgcagcaaatgtgacatgagggagaacctgtggctgaacctgacagatggcagcatcctgtgtggccgccgctactttgatggcagcggcggcaacaaccacgctgtggagcactaccgggagaccggctaccccctggccgtgaagctgggcaccatcaccccagatggagcagatgtgtacagctatgatgaagatgacatggtgctggaccccagcctggccgagcacctgagccactttggaattgacatgctgaagatgcagaagacagacaagaccatgacagagctggagattgacatgaaccagagaattggagagtgggagctgatccaggagagcggcgtgcccctgaagcccctgtttggacctggctacacaggcatccggaacctgggcaacagctgctacctgaacagcgtggtgcaggtgctcttcagcatcccagacttccagaggaaatatgtggacaagctggagaagatcttccagaatgcccccacagaccccacccaggacttcagcacccaggtggccaagctgggccacggcctgctgagcggggagtacagcaagcctgtgcctgagagcggagatggagagcgggtgcctgagcagaaggaggtgcaggacggcatcgcccccaggatgttcaaggccctgattggcaagggccaccctgagttcagcaccaaccggcagcaggatgcccaggagttcttcctgcacctgatcaacatggtggagaggaactgccgcagcagcgagaaccccaatgaggtgttccgcttcctggtggaggagaagatcaagtgcctggccacagagaaggtgaagtacacccagagggtggactacatcatgcagctgcctgtgcccatggatgctgccctgaacaaggaggagctgctggagtatgaggagaagaagaggcaggccgaggaggagaagatggccctgcctgagctggtgcgggcccaggtgcccttcagcagctgcctggaggcctacggggcccctgagcaggtggatgacttctggagcacagccctgcaggccaagtctgtggccgtgaagaccaccaggtttgccagcttcccagactacctggtgatccagatcaagaagttcaccttcggcctggactgggtgcccaagaagctggatgtgtccattgagatgcctgaggagctggacatcagccagctgcggggcaccggcctgcagcctggagaggaggagctgcctgacatcgccccacccctggtgaccccagatgagcccaaggcccccatgctggatgaatctgtcatcatccagctggtggagatgggcttccccatggatgcctgcaggaaggctgtgtactacacaggcaacagcggggctgaggccgccatgaactgggtgatgagccacatggatgatcctgactttgccaaccccctcatcctgcccggcagcagcggccctggcagcaccagcgctgctgctgaccccccacctgaggactgtgtgaccaccatcgtgtccatgggcttcagccgggaccaggccctgaaggccctgcgggccaccaacaacagcctggagagagctgtggactggatcttcagccacattgatgacctggatgctgaggccgccatggacatcagcgagggccgctctgctgctgacagcatcagcgagagcgtgcctgtgggccccaaggtgagagatggccctgggaagtaccagctgtttgccttcatcagccacatgggcaccagcaccatgtgtggccactacgtgtgccacatcaagaaggagggccgctgggtgatctacaatgaccagaaggtgtgtgccagcgagaagccacccaaggacctgggctacatctacttctaccagagggtggccagctag

SEQ ID NO: 138622 - DNA, 2508 bp, Artificial Sequence
  derived and/or modified sequence
atggccgagctgagcgaggaggccctgctgagcgtgctgcccaccattcgggtccccaaggccggcgaccgggtgcacaaggatgagtgtgcctttagctttgataccccagagagtgaaggcggtctgtacatctgcatgaatacatttttgggtttcggcaagcagtatgtcgagagacattttaacaagacaggacaacgggtgtatctccacttgcgcaggacgaggagaccgaaagaagaggatcctgctactggaacgggcgacccgccacgcaagaagccaactaggctggccattggcgtagagggaggtttcgacctttctgaagagaaattcgagttagacgaggatgtcaagatcgtgatactgccggattatttggagattgctagagacgggctcggcggcctccccgatatcgttcgagaccgggtgactagcgccgtggaggccctcttgtcggccgattctgcaagtcggaaacaagaagtgcaggcctgggacggggaagtgcgccaggtgagcaagcacgcctttagtctgaagcagttggataacccagcgcggatcccgccctgcggatggaagtgttccaaatgtgacatgagagaaaatctttggctgaacctgaccgatgggagcattctttgtgggcgccgttactttgacggaagcggagggaacaatcatgctgttgaacactaccgggagaccggataccccctcgccgtcaagctgggcaccatcacacccgatggcgcggacgtgtatagctacgacgaggatgatatggtgcttgacccctcactcgcggaacacctgagtcactttggaattgatatgctcaagatgcaaaagaccgataagactatgactgaacttgagatcgacatgaaccagagaatcggagagtgggagctcatacaggagtcaggcgtgccactaaaaccgctattcggaccaggatatacaggcatccgcaacctcggtaacagctgttatctgaattccgtcgtacaggtgctgttctccatccctgacttccagcgcaagtacgtcgacaaacttgagaagatctttcagaatgcccccacggacccgacccaggattttagtacccaagtggctaagttaggacatggactgctgagcggcgaatattcaaaaccagtgcctgagtctggagatggagagcgggtgcctgagcagaaagaagttcaggatggaattgccccacgaatgttcaaggcccttatcggcaaaggtcaccccgagttcagcactaaccgccagcaggatgctcaggaatttttcctgcacttgatcaacatggtggagaggaattgccggtctagcgaaaaccctaacgaggtatttagattcttggtagaggaaaaaataaagtgcctggccacggagaaggtcaaatacactcagcgagtcgattacattatgcagctgcctgtgcctatggacgcagccttaaataaggaggagctgctagagtacgaggagaaaaagcggcaagcagaggaggagaagatggccctgcctgaactggtgagggctcaagtgccattcagctcctgcttggaggcatatggtgctcctgaacaggtggatgacttttggtccacagctctccaggccaagtccgtggctgtgaagactaccaggtttgctagttttcctgactacctggtcatacagattaaaaaattcacctttggtcttgactgggtgcccaaaaagctcgacgtaagtattgagatgcctgaggaattggatatcagtcagctgaggggaactgggttgcaaccaggagaggaagagttgcccgacattgccccacccctggtgactcccgatgaacctaaagcacctatgctggatgaatcagtaatcattcagctggtagaaatgggctttcctatggatgcctgtcgaaaagccgtgtactacacagggaatagtggagccgaagcagctatgaactgggtcatgagccacatggacgatccagacttcgctaatcctctgattttacctggatcttcgggcccgggctccacctctgctgctgctgaccccccacctgaggactgcgtcacaaccatcgtgtccatgggcttctccagagaccaagccctcaaggctctcagagcgaccaataactctctggaaagggccgttgactggatctttagccacatagacgacctggatgcagaagccgctatggatatatccgaggggagatcagccgccgattcaatcagcgagtctgtgccggtagggcccaaggtgcgggatggacccggcaaataccagctgtttgctttcatctctcatatgggaacgtccacgatgtgtggccattacgtctgccatataaagaaagagggcagatgggtgatatataacgaccagaaggtgtgcgccagcgaaaagccacccaaagacctgggctacatatatttttaccagcgtgtggcttcctag

SEQ ID NO: 138623 - DNA, 2508 bp, Artificial Sequence
  derived and/or modified sequence
atggcagaactgtccgaggaggccctcctgagtgttctgcccacgattcgagtccctaaagccggtgaccgggtgcataaggatgaatgtgcattttcatttgacactcccgagtccgagggcggtctgtacatctgtatgaacacattcctgggatttgggaaacagtacgtggaaaggcacttcaacaagactggccaacgcgtttacctccacctgcgcagaacccggcgacccaaagaggaggacccagctactgggaccggggatccccctagaaaaaagccaacaaggctggccattggggtggagggcggttttgatctcagcgaagagaaattcgagctcgatgaggacgtgaagatagtgatcctccctgattatctcgagattgccagagacggcctggggggtctgcctgatattgtaagagatcgggttacttccgctgtggaagcactactctccgccgattccgcatcacgcaagcaagaggtgcaggcatgggacggtgaggtacgccaagtctctaagcatgctttttccctcaagcagctggataatcctgctagaatccccccatgcgggtggaaatgttctaaatgcgacatgagagagaacctatggctgaacttgactgacggctctattttgtgtgggaggcgctatttcgacggttcgggtggaaataaccacgccgtcgagcactacagggagacgggttatcccttggcagtgaagctgggcacgattacacctgatggcgctgacgtttattcatacgacgaagacgacatggtcctggatccctctttagcagaacacttgtcacatttcggaatcgacatgctgaagatgcaaaagacagataagacgatgacagaactggagatagacatgaaccagcgtatcggcgagtgggagctgatccaggaaagtggtgtgcccctcaagcccctcttcggacccggatataccggaataaggaacctggggaattcttgctacctaaacagtgtggtgcaagtgctgttttcaatacccgattttcagcgaaaatatgtagacaagctggagaagatttttcagaatgcccctacagatcctacccaggatttctccacacaggtcgccaaactgggccatggactacttagcggcgaatattccaaacccgtgccagaaagtggggacggggaaagggtcccggaacagaaagaggttcaggacgggatagctcccaggatgtttaaggcattgataggcaaggggcaccccgagttctccacgaaccggcagcaggacgctcaggagtttttcctgcacttgataaatatggtcgaaagaaattgcagaagctctgaaaaccctaacgaagtgttccggtttttagtcgaggagaagatcaaatgtttagccaccgagaaggtcaagtacacgcagagggtcgactacatcatgcagctcccggtgcctatggacgctgctctcaacaaagaggagctcctggagtacgaagagaagaagaggcaagcagaagaggaaaaaatggccttaccagaactggtgcgagcacaagtgccattcagctcatgccttgaagcgtatggagcacccgagcaggtggatgacttctggtccacagctctgcaagcaaaaagcgtggccgttaagacaacccgttttgccagttttcccgactatttggtaattcaaattaagaaattcactttcggactcgactgggtgcctaagaaactggatgtcagcatcgagatgcccgaggaactcgacatctcccagctccgcggaaccggcctgcaacctggggaagaggaattgcccgatatagcacctccattggtcacacctgacgaaccaaaagcgccaatgctcgatgagtccgttatcatacagctggtggaaatgggcttccccatggacgcctgtcggaaggctgtgtattataccgggaattcaggcgcagaagccgctatgaattgggttatgagtcacatggatgatccagacttcgccaatccgttgattctacctggcagttcaggccctggcagtaccagtgccgctgctgaccctccgccagaagactgtgtaactaccatcgtctctatgggtttttccagagatcaggctctcaaggccctgcgcgctaccaacaacagccttgaacgtgctgtggattggatcttctcgcacatcgacgacctggacgccgaagctgcaatggacatctcagagggacgatcagcagccgactctatttccgaatctgtgccagtgggacctaaggttcgggacggccctggtaaatatcagcttttcgcctttatcagccacatgggcactagtacgatgtgtggccattacgtgtgtcatattaagaaagagggcagatgggttatatacaatgatcagaaagtgtgcgccagtgagaagccgcctaaagacctaggatacatctatttctaccagcgcgtggcaagctag

SEQ ID NO: 138624 - DNA, 3083 bp, Artificial Sequence
  derived and/or modified sequence
ccgccgtgtgtggagaagctgctgccggtgtcatggcggagctgagtgaggaggcgctgctgtcagtattaccgacgatccgggtccctaaggctggagaccgggtccacaaagacgagtgcgccttctccttcgacacgccggagtctgaggggggcctctacatctgtatgaacacgtttctgggctttgggaaacagtatgtggagagacatttcaataagaccggccagcgagtctacttgcacctccggcggacccggcgcccgaaagaggaggaccctgctacaggcactggagacccaccccggaagaagcccacgcggctggctattggtgttgaaggcggatttgaccttagcgaggagaagtttgaattagacgaggatgtgaagattgtcattttgccagattacctggagattgcccgggatggactggggggactgcctgacattgtcagagatcgggtgaccagtgcagtggaggccctactgtcggccgactcagcctcccgcaagcaggaggtgcaggcatgggatggggaagtacggcaggtgtctaagcatgccttcagcctcaagcagttggacaaccctgctcgaatccctccctgtggctggaagtgctccaagtgtgacatgagagagaacctgtggctcaacctgactgatggctccatcctctgtgggcgacgctacttcgatggcagtgggggcaacaaccacgctgtggagcactaccgagagacaggctacccgttagctgtcaagctgggcaccatcacccctgatggagctgacgtgtactcatatgatgaggatgacatggtcctggaccccagcctggctgagcacctgtcccacttcggcatcgacatgctgaagatgcagaagacagacaagacgatgactgagttggagatagacatgaaccagcggattggtgaatgggagctgatccaggagtcaggtgtgccactcaagcccctgtttgggcctggctacacaggcatccggaacctgggtaacagctgctacctcaactctgtggtccaggtgctcttcagcatccctgacttccagaggaagtatgtggataagctggagaagatcttccagaatgccccgacggaccctacccaggatttcagcacccaggtggccaagctgggccatggccttctctccggggagtattccaagccagtaccggagtcgggcgatggggagcgggtgccagaacagaaggaagttcaagatggcattgcccctcggatgttcaaggccctcatcggcaagggccaccctgaattctccaccaaccggcagcaggatgcccaggagttcttccttcaccttatcaacatggtggagaggaattgccggagctctgaaaatcctaatgaagtgttccgcttcttggtggaggaaaagatcaagtgcctggccacagagaaggtgaagtacacccagcgagttgactacatcatgcagctgcctgtgcccatggatgcagcccttaacaaagaggagcttctggagtacgaggagaagaagcggcaagccgaagaggagaagatggcactgccagaactggttcgggcccaggtgcccttcagctcttgcctggaggcctacggggcccctgagcaggtcgatgacttctggagcacggccctgcaggccaagtcagtagctgtcaagaccacacgatttgcctcattccctgactacctggtcatccagatcaagaagttcaccttcggcttagactgggtgcccaagaaactggatgtgtccatcgagatgccagaggagctcgacatctcccagttgaggggcacagggctgcagcccggagaggaggagctgccagacattgccccacccctggtcactccggatgagcccaaagcgcccatgctggatgaatcagtcatcatccagctggtggagatgggattccctatggacgcctgccgcaaagctgtctactacacgggcaacagcggggctgaggccgccatgaactgggtcatgtcacacatggatgatccagattttgcaaaccccctcatcctgcctggctctagtgggccgggctccacaagcgcagcagccgacccccctcctgaggactgtgtgaccaccattgtctccatgggcttctcccgggaccaggccttgaaagcgctgcgggccacgaacaatagtttagaacgggctgtggactggatcttcagtcacattgacgacctggatgctgaagctgccatggacatctcagagggccgctcagctgccgactccatctctgagtctgtgccagtgggacctaaagtccgggatggtcctggaaagtatcagctctttgccttcattagtcacatgggcacctctaccatgtgtggtcactacgtctgccacatcaagaaagaaggcagatgggtgatctacaatgaccagaaagtgtgtgcctccgagaagccgcccaaggacctgggctacatctacttctaccagagagtggccagctaagagcctgcctcaccccttaccaatgagggcaggggaagaccacctggcatgagggagaggggctgagggatggacttcagcccctctgctctgtaccctttttccttttgtccccggcagcagggaagaagctggaggccgtgggagaatggctgggcagagcagaggggcagcgatagactctggggatggagcaggacggggacgggaggggccggccacctgtctgtaaggagactttgttgcttcccctgcccccggaatccacagtgctctgcttctctgtgtcgccccgcccagccccctggtgtggagggaggggtctcgtttgtgcgcgtgggtgtagctttgtgcatcctctcccagtggagcgatcacctgtgcctcccctccccctttgtttgcccctgtgtggttggtcaaggagggatgtgagggaaatagggaccccccgacttgccctcctgcctcagtctttcccccaccctgtctcttccttgtccttctctggaaaatgccaaaatacacgatgtgaataaaagt

SEQ ID NO: 138625 - protein, 109 aa, Artificial Sequence
  derived and/or modified sequence
MSARGEGAGQPSTSAQGQPAAPAPQKRGRGRPRKQQQEPTGEPSPKRPRGRPKGSKNKSPSKAAQKKAEATGEKRPRGRPRKWPQQVVQKKPAQEETEETSSQESAEED

SEQ ID NO: 138626 - DNA, 4150 bp, Artificial Sequence
  derived and/or modified sequence
cttgaatcttggggcaggaactcagaaaacttccagcccgggcagcgcgcgcttggtgcaagactcaggagctagcagcccgtccccctccgactctccggtgccgccgctgcctgctcccgccaccctaggaggcgcggtgccacccactactctgtcctctgcctgtgctccgtgcccgaccctatcccggcggagtctccccatcctcctttgctttccgactgcccaaggcactttcaatctcaatctcttctctctctctctctctctctctctctctctctctctctctctctctctctctctcgcagggtggggggaagaggaggaggaattctttccccgcctaacatttcaagggacacaattcactccaagtctcttccctttccaagccgcttccgaagtgctcccggtgcccgcaactcctgatcccaacccgcgagaggagcctctgcgacctcaaagcctctcttccttctccctcgcttccctcctcctcttgctacctccacctccaccgccacctccacctccggcacccacccaccgccgccgccgccaccggcagcgcctcctcctctcctcctcctcctcccctcttctctttttggcagccgctggacgtccggtgttgatggtggcagcggcggcagcctaagcaacagcagccctcgcagcccgccagctcgcgctcgccccgccggcgtccccagccctatcacctcatctcccgaaaggtgctgggcagctccggggcggtcgaggcgaagcggctgcagcggcggtagcggcggcgggaggcaggatgagcgcacgcggtgagggcgcggggcagccgtccacttcagcccagggacaacctgccgccccagcgcctcagaagagaggacgcggccgccccaggaagcagcagcaagaaccaaccggtgagccctctcctaagagacccaggggaagacccaaaggcagcaaaaacaagagtccctctaaagcagctcaaaagaaagcagaagccactggagaaaaacggccaagaggcagacctaggaaatggccacaacaagttgttcagaagaagcctgctcaggaggaaactgaagagacatcctcacaagagtctgccgaagaggactagggggcgccaacgttcgatttctacctcagcagcagttggatcttttgaagggagaagacactgcagtgaccacttattctgtattgccatggtctttccactttcatctggggtggggtggggtggggtgggggaggggggggtggggtggggagaaatcacataaccttaaaaaggactatattaatcaccttctttgtaatcccttcacagtcccaggtttagtgaaaaactgctgtaaacacaggggacacagcttaacaatgcaacttttaattactgttttcttttttcttaacctactaatagtttgttgatctgataagcaagagtgggcgggtgagaaaaaccgaattgggtttagtcaatcactgcactgcatgcaaacaagaaacgtgtcacacttgtgacgtcgggcattcatataggaagaacgcggtgtgtaacactgtgtacacctcaaataccaccccaacccactccctgtagtgaatcctctgtttagaacaccaaagataaggactagatactactttctctttttcgtataatcttgtagacacttacttgatgatttttaactttttatttctaaatgagacgaaatgctgatgtatcctttcattcagctaacaaactagaaaaggttatgttcatttttcaaaaagggaagtaagcaaacaaatattgccaactcttctatttatggatatcacacatatcagcaggagtaataaatttactcacagcacttgttttcaggacaacacttcattttcaggaaatctacttcctacagagccaaaatgccatttagcaataaataacacttgtcagcctcagagcatttaaggaaactagacaagtaaaattatcctctttgtaatttaatgaaaaggtacaacagaataatgcatgatgaactcacctaattatgaggtgggaggagcgaaatctaaatttcttttgctatagttatacatcaatttaaaaagcaaaaaaaaaaaaggggggggcaatctctctctgtgtctttctctctctctcttcctctccctctctcttttcattgtgtatcagtttccatgaaagacctgaataccacttacctcaaattaagcatatgtgttacttcaagtaatacgttttgacataagatggttgaccaaggtgcttttcttcggcttgagttcaccatctcttcattcaaactgcacttttagccagagatgcaatatatccccactactcaatactacctctgaatgttacaacgaatttacagtctagtacttattacatgctgctatacacaagcaatgcaagaaaaaaacttactgggtaggtgattctaatcatctgcagttctttttgtacacttaattacagttaaagaagcaatctccttactgtgtttcagcatgactatgtatttttctatgtttttttaattaaaaatttttaaaatacttgtttcagcttctctgctagatttctacattaacttgaaaattttttaaccaagtcgctcctaggttcttaaggataattttcctcaatcacactacacatcacacaagatttgactgtaatatttaaatattaccctccaagtctgtacctcaaatgaattctttaaggagatggactaattgacttgcaaagacctacctccagacttcaaaaggaatgaacttgttacttgcagcattcatttgttttttcaatgtttgaaatagttcaaactgcagctaaccctagtcaaaactatttttgtaaaagacatttgatagaaaggaacacgtttttacatacttttgcaaaataagtaaataataaataaaataaaagccaaccttcaaagaaacttgaagctttgtaggtgagatgcaacaagccctgcttttgcataatgcaatcaaaaatatgtgtttttaagattagttgaatataagaaaatgcttgacaaatattttcatgtattttacacaaatgtgatttttgtaatatgtctcaaccagatttattttaaacgcttcttatgtagagtttttatgcctttctctcctagtgagtgtgctgactttttaacatggtattatcaactgggccaggaggtagtttctcatgacggcttttgtcagtatggcttttagtactgaagccaaatgaaactcaaaaccatctctcttccagctgcttcagggaggtagtttcaaaggccacatacctctctgagactggcagatcgctcactgttgtgaatcaccaaaggagctatggagagaattaaaactcaacattactgttaactgtgcgttaaataagcaaataaacagtggctcataaaaataaaagtcgcattccatatctttggatgggccttttagaaacctcattggccagctcataaaatggaagcaattgctcatgttggccaaacatggtgcaccgagtgatttccatctctggtaaagttacacttttatttcctgtatgttgtacaatcaaaacacactactacctcttaagtcccagtatacctcatttttcatactgaaaaaaaaagcttgtggccaatggaacagtaagaacatcataaaatttttatatatatagtttatttttgtgggagataaattttataggactgttctttgctgttgttggtcgcagctacataagactggacatttaacttttctaccatttctgcaagttaggtatgtttgcaggagaaaagtatcaagacgtttaactgcagttgactttctccctgttcctttgagtgtcttctaactttattctttgttctttatgtagaattgctgtctatgattgtactttgaatcgcttgcttgttgaaaatatttctctagtgtattatcactgtctgttctgcacaataaacataacagcctctgtgatccccatgtgttttgattcctgctctttgttacagttccattaaatgagtaataaagtttggtcaaaacagaaaaaaaaaaa

SEQ ID NO: 138627 - DNA, 330 bp, Artificial Sequence
  derived and/or modified sequence
atgagtgccaggggcgagggagccggccagccttccaccagcgctcagggacagcctgctgcacctgccccacagaaacgcggacgaggacggccacgtaaacagcaacaggaaccaaccggcgagcctagccccaagcggccccgaggccggccaaaaggaagtaaaaataagtctcccagcaaggcagcccagaaaaaagcagaagcaacaggtgagaaaaggccacgcggaaggccgaggaaatggcctcagcaggtcgtgcaaaagaagccagcacaggaagagaccgaggagacctcctctcaggaatctgctgaagaagactag

SEQ ID NO: 138628 - DNA, 261 bp, Artificial Sequence
  derived and/or modified sequence
atgagcgcccgcggcgaaggtgcaggccagccttccacctcagcccaagggcaacctgctgctccggccccccagaagcgtggtcgtgggaggccgcgcaagcaacagcaagagcccaccggggaaccatcccccaaaagacctcggggccgccctaaaggatccaagaataaatccccgagtaaggccgcacaaaagaaggctgaagccaccggcgaaaagagacccagaggacgacctcgaaagtggctccagaactag

SEQ ID NO: 138629 - DNA, 4473 bp, Artificial Sequence
  derived and/or modified sequence
cagcccgggatccccggcctgtccctttaaccccgccgccgggcgggagcacgtgagcggggctccgggtggcacccgggcgccgccgccgccgaggcagttgtatttcgaacgctgcctctggctagcagccaggcgccttggctcggcggtccgcctggcctccctcctcctcatacttttcttcctgcgcaaccccctcccctttatccgcccacgattagaggtgggcactccccccaccaccaccccctccccaagcgcaagcgcgtgcacgcacacacaccacacacactcacactcacacacactcacacacactcatcccacttgaatcttggggcaggaactcagaaaacttccagcccgggcagcgcgcgcttggtgcaagactcaggagctagcagcccgtccccctccgactctccggtgccgccgctgcctgctcccgccaccctaggaggcgcggtgccacccactactctgtcctctgcctgtgctccgtgcccgaccctatcccggcggagtctccccatcctcctttgctttccgactgcccaaggcactttcaatctcaatctcttctctctctctctctctctctctctctctctctctctctctctctctctctctctcgcagggtggggggaagaggaggaggaattctttccccgcctaacatttcaagggacacaattcactccaagtctcttccctttccaagccgcttccgaagtgctcccggtgcccgcaactcctgatcccaacccgcgagaggagcctctgcgacctcaaagcctctcttccttctccctcgcttccctcctcctcttgctacctccacctccaccgccacctccacctccggcacccacccaccgccgccgccgccaccggcagcgcctcctcctctcctcctcctcctcccctcttctctttttggcagccgctggacgtccggtgttgatggtggcagcggcggcagcctaagcaacagcagccctcgcagcccgccagctcgcgctcgccccgccggcgtccccagccctatcacctcatctcccgaaaggtgctgggcagctccggggcggtcgaggcgaagcggctgcagcggcggtagcggcggcgggaggcaggatgagcgcacgcggtgagggcgcggggcagccgtccacttcagcccagggacaacctgccgccccagcgcctcagaagagaggacgcggccgccccaggaagcagcagcaagaaccaaccggtgagccctctcctaagagacccaggggaagacccaaaggcagcaaaaacaagagtccctctaaagcagctcaaaagaaagcagaagccactggagaaaaacggccaagaggcagacctaggaaatggccacaacaagttgttcagaagaagcctgctcaggaggaaactgaagagacatcctcacaagagtctgccgaagaggactagggggcgccaacgttcgatttctacctcagcagcagttggatcttttgaagggagaagacactgcagtgaccacttattctgtattgccatggtctttccactttcatctggggtggggtggggtggggtgggggaggggggggtggggtggggagaaatcacataaccttaaaaaggactatattaatcaccttctttgtaatcccttcacagtcccaggtttagtgaaaaactgctgtaaacacaggggacacagcttaacaatgcaacttttaattactgttttcttttttcttaacctactaatagtttgttgatctgataagcaagagtgggcgggtgagaaaaaccgaattgggtttagtcaatcactgcactgcatgcaaacaagaaacgtgtcacacttgtgacgtcgggcattcatataggaagaacgcggtgtgtaacactgtgtacacctcaaataccaccccaacccactccctgtagtgaatcctctgtttagaacaccaaagataaggactagatactactttctctttttcgtataatcttgtagacacttacttgatgatttttaactttttatttctaaatgagacgaaatgctgatgtatcctttcattcagctaacaaactagaaaaggttatgttcatttttcaaaaagggaagtaagcaaacaaatattgccaactcttctatttatggatatcacacatatcagcaggagtaataaatttactcacagcacttgttttcaggacaacacttcattttcaggaaatctacttcctacagagccaaaatgccatttagcaataaataacacttgtcagcctcagagcatttaaggaaactagacaagtaaaattatcctctttgtaatttaatgaaaaggtacaacagaataatgcatgatgaactcacctaattatgaggtgggaggagcgaaatctaaatttcttttgctatagttatacatcaatttaaaaagcaaaaaaaaaaaaggggggggcaatctctctctgtgtctttctctctctctcttcctctccctctctcttttcattgtgtatcagtttccatgaaagacctgaataccacttacctcaaattaagcatatgtgttacttcaagtaatacgttttgacataagatggttgaccaaggtgcttttcttcggcttgagttcaccatctcttcattcaaactgcacttttagccagagatgcaatatatccccactactcaatactacctctgaatgttacaacgaatttacagtctagtacttattacatgctgctatacacaagcaatgcaagaaaaaaacttactgggtaggtgattctaatcatctgcagttctttttgtacacttaattacagttaaagaagcaatctccttactgtgtttcagcatgactatgtatttttctatgtttttttaattaaaaatttttaaaatacttgtttcagcttctctgctagatttctacattaacttgaaaattttttaaccaagtcgctcctaggttcttaaggataattttcctcaatcacactacacatcacacaagatttgactgtaatatttaaatattaccctccaagtctgtacctcaaatgaattctttaaggagatggactaattgacttgcaaagacctacctccagacttcaaaaggaatgaacttgttacttgcagcattcatttgttttttcaatgtttgaaatagttcaaactgcagctaaccctagtcaaaactatttttgtaaaagacatttgatagaaaggaacacgtttttacatacttttgcaaaataagtaaataataaataaaataaaagccaaccttcaaagaaacttgaagctttgtaggtgagatgcaacaagccctgcttttgcataatgcaatcaaaaatatgtgtttttaagattagttgaatataagaaaatgcttgacaaatattttcatgtattttacacaaatgtgatttttgtaatatgtctcaaccagatttattttaaacgcttcttatgtagagtttttatgcctttctctcctagtgagtgtgctgactttttaacatggtattatcaactgggccaggaggtagtttctcatgacggcttttgtcagtatggcttttagtactgaagccaaatgaaactcaaaaccatctctcttccagctgcttcagggaggtagtttcaaaggccacatacctctctgagactggcagatcgctcactgttgtgaatcaccaaaggagctatggagagaattaaaactcaacattactgttaactgtgcgttaaataagcaaataaacagtggctcataaaaataaaagtcgcattccatatctttggatgggccttttagaaacctcattggccagctcataaaatggaagcaattgctcatgttggccaaacatggtgcaccgagtgatttccatctctggtaaagttacacttttatttcctgtatgttgtacaatcaaaacacactactacctcttaagtcccagtatacctcatttttcatactgaaaaaaaaagcttgtggccaatggaacagtaagaacatcataaaatttttatatatatagtttatttttgtgggagataaattttataggactgttctttgctgttgttggtcgcagctacataagactggacatttaacttttctaccatttctgcaagttaggtatgtttgcaggagaaaagtatcaagacgtttaactgcagttgactttctccctgttcctttgagtgtcttctaactttattctttgttctttatgtagaattgctgtctatgattgtactttgaatcgcttgcttgttgaaaatatttctctagtgtattatcactgtctgttctgcacaataaacataacagcctctgtgatccccatgtgttttgattcctgctctttgttacagttccattaaatgagtaataaagtttggtcaaaacagatcaa

SEQ ID NO: 138630 - DNA, 330 bp, Artificial Sequence
  derived and/or modified sequence
atgtctgcccggggggagggcgccggccagcccagcaccagcgcccagggccagcctgctgccccagccccccagaagaggggccggggccggcccaggaagcagcagcaggagcccaccggggagcccagccccaagaggccccggggccggcccaagggcagcaagaacaagagccccagcaaggccgcccagaagaaggccgaggccactggagagaagaggccccggggccggcccaggaagtggccccagcaggtggtgcagaagaagccagcccaggaggagacagaggagaccagcagccaggagagcgctgaggaggactag

SEQ ID NO: 138631 - DNA, 261 bp, Artificial Sequence
  derived and/or modified sequence
atgtctgcccggggggagggcgccggccagcccagcaccagcgcccagggccagcctgctgccccagccccccagaagaggggccggggccggcccaggaagcagcagcaggagcccaccggggagcccagccccaagaggccccggggccggcccaagggcagcaagaacaagagccccagcaaggccgcccagaagaaggccgaggccactggagagaagaggccccggggccggcccaggaagtggctgcagaactag

SEQ ID NO: 138632 - DNA, 330 bp, Artificial Sequence
  derived and/or modified sequence
atgagcgcccggggcgagggcgccggccagcccagcaccagcgcccaaggccagccagccgctccagctccacagaaaagaggccgcggacgacctaggaaacaacagcaagaacctacgggcgagccaagcccaaagcgcccccgtgggcggcctaagggatctaaaaataagtcaccctcaaaggcggctcaaaaaaaagctgaagcaaccggcgaaaagcgacctagagggcgaccaagaaaatggcctcagcaggtcgtgcagaagaagccagcacaggaggagacagaagagaccagttctcaggagtcagccgaggaggattag

SEQ ID NO: 138633 - DNA, 261 bp, Artificial Sequence
  derived and/or modified sequence
atgagcgcccggggcgagggcgccggccagcccagcaccagcgcccaaggtcaacccgcagcgcctgccccccagaaaagagggcgcgggcgcccaagaaagcagcaacaagagcccacgggggaaccaagccctaaacggccccgcggtaggccaaaaggctcaaaaaacaagagcccctcaaaagccgctcaaaaaaaagccgaagctaccggggagaaaagaccaaggggtcgaccacgcaaatggctgcagaactag

SEQ ID NO: 138634 - DNA, 330 bp, Artificial Sequence
  derived and/or modified sequence
atgagcgcaaggggcgagggtgcaggacaaccctctaccagcgcccaaggccagcctgccgcacctgctcctcagaaacgtggcagaggcaggcccaggaagcagcaacaggagcccaccggtgaacctagccctaagcgcccacgaggcaggcccaaggggagcaaaaacaagagccccagcaaggcagcacagaagaaggccgaagcaaccggagaaaagagaccgagaggcagaccaaggaagtggccccagcaagtggttcagaaaaagcctgcacaggaggagactgaggagacatcctctcaggagtcggccgaagaagactag

SEQ ID NO: 138635 - DNA, 261 bp, Artificial Sequence
  derived and/or modified sequence
atgagcgctcgcggtgaaggtgcaggccagcccagcacatcagctcagggacagccagctgccccagctccacaaaaaaggggtcgcggaaggccccgtaagcaacagcaggagccaactggcgagcccagccccaagcggccacggggacgcccaaaagggagcaaaaacaagtctcctagcaaagctgcccagaagaaggcagaagcgaccggtgagaagcggcctcgcggacgacccaggaagtggctgcagaattag

SEQ ID NO: 138636 - DNA, 330 bp, Artificial Sequence
  derived and/or modified sequence
atgagcgccagaggcgagggcgccggccagcccagcaccagcgcccagggccagcccgccgcccccgccccccagaagagaggcagaggcagacccagaaagcagcagcaggagcccaccggcgagcccagccccaagagacccagaggcagacccaagggcagcaagaacaagagccccagcaaggccgcccagaagaaggccgaggccaccggcgagaagagacccagaggcagacccagaaagtggccccagcaggtggtgcagaagaagcccgcccaggaggagaccgaggagaccagcagccaggagagcgccgaggaggactag

SEQ ID NO: 138637 - DNA, 261 bp, Artificial Sequence
  derived and/or modified sequence
atgagcgccagaggcgagggcgccggccagcccagcaccagcgcccagggccagcccgccgcccccgccccccagaagagaggcagaggcagacccagaaagcagcagcaggagcccaccggcgagcccagccccaagagacccagaggcagacccaagggcagcaagaacaagagccccagcaaggccgcccagaagaaggccgaggccaccggcgagaagagacccagaggcagacccagaaagtggctgcagaactag

SEQ ID NO: 138638 - protein, 106 aa, Artificial Sequence
  derived and/or modified sequence
MSARGEGAGQPSTSAQGQPAAPAPQKRGRGRPRKQQQEPTGEPSPKRPRGRPKGSKNKSPSKAAQKKAEATGEKRPRGRPRKWDNLLPRTSSKKKTSLGNSTKRSH

SEQ ID NO: 138639 - protein, 90 aa, Artificial Sequence
  derived and/or modified sequence
MSARGEGAGQPSTSAQGQPAAPAPQKRGRGRPRKQQQEPTGEPSPKRPRGRPKGSKNKSPSKAAQKKAEATGEKRPRGRPRKWEEFYIAA

SEQ ID NO: 138640 - protein, 92 aa, Artificial Sequence
  derived and/or modified sequence
MSARGEGAGQPSTSAQGQPAAPAPQKRGRGRPRKQQQEPTGEPSPKRPRGRPKGSKNKSPSKAAQKKAEATGEKRPRGRPRKWWLLMKSPCW

SEQ ID NO: 138641 - DNA, 153 bp, Artificial Sequence
  derived and/or modified sequence
atggacatcctgctggacctgggctggcacttcagcaactgcgacgaggacaccttctacagccccgtgcagaacaccgagggcgacctgctgttcttcgaccacaacctgaagaccgacagaggccacgtggagagaagcgtgatggactag

SEQ ID NO: 138642 - DNA, 321 bp, Artificial Sequence
  derived and/or modified sequence
atgagcgccagaggggagggcgccggccagccgagtacaagcgcccagggccaaccagctgcccccgcaccccaaaaaaggggacgtggccgccctcgaaagcagcagcaagaacccaccggggagccttcaccgaagcgaccaaggggaagaccaaagggcagtaagaacaaatctccgagtaaggccgcacaaaaaaaagctgaagccaccggcgagaagaggccgcgcgggcgtcctcgaaagtgggataacctgttacctcgaaccagctcaaagaaaaaaaccagtcttggaaattccaccaaacggtcccattag

SEQ ID NO: 138643 - DNA, 273 bp, Artificial Sequence
  derived and/or modified sequence
atgtcagcccgcggggagggggccggccagccgagcacttccgcccagggccagccagcggcacccgccccacagaagcgaggacgaggaagacctcggaagcaacaacaggagcccacgggagagccaagccctaagaggccgagagggaggcccaagggcagtaaaaacaagtcgccttctaaggccgcccagaaaaaagctgaagccaccggtgagaaacgaccacggggccgacctcgaaaatgggaggagttctacattgcggcctag

SEQ ID NO: 138644 - DNA, 279 bp, Artificial Sequence
  derived and/or modified sequence
atgtctgcgcgcggggagggtgcggggcagccttctacgtccgctcaaggacagcctgcagcccccgctccccaaaagcgaggccgtgggagacccagaaaacagcagcaagaacctactggtgaaccttctccgaagcgcccaagaggcaggcccaagggcagcaaaaacaagagcccatctaaagcggctcagaagaaggccgaagcgacaggcgaaaagaggcctagagggcgcccaagaaagtggtggttgctgatgaaaagtccctgctggtag

SEQ ID NO: 138645 - DNA, 312 bp, Artificial Sequence
  derived and/or modified sequence
atgtccgcccgcggggagggcgcaggccagccttccaccagtgcgcaaggtcaacctgcggccccagccccccagaagcgcgggagaggcagacccaggaaacagcagcaggagcccaccggcgagccttctccgaaacgcccaaggggcagacctaagggctccaagaacaagtcccctagtaaagccgcccagaagaaggctgaagccaccggtgagaagcgtcccagagggaggccccgtaaatggttgagggcacaggccctagacagcgatggactgggcagcaattcgggccccagcctctcttag

SEQ ID NO: 138646 - DNA, 300 bp, Artificial Sequence
  derived and/or modified sequence
atgtcagcacgtggggaaggcgcggggcagccctcaactagcgcacagggtcaacccgctgcccccgccccacaaaagcgcggtcgaggcagaccacgcaaacagcagcaggagcctaccggggagccatcgccaaaacggcccagaggaagacccaagggatcaaaaaataaatctccaagcaaagcagctcagaagaaagccgaggccactggcgagaaaagaccacgcgggcgtccccggaagtggccacagcaggtagtgcaaaagaaacctgctcaggtacgccatagtcattag

SEQ ID NO: 138647 - DNA, 1529 bp, Artificial Sequence
  derived and/or modified sequence
cttgaatcttggggcaggaactcagaaaacttccagcccgggcagcgcgcgcttggtgcaagactcaggagctagcagcccgtccccctccgactctccggtgccgccgctgcctgctcccgccaccctaggaggcgcggtgccacccactactctgtcctctgcctgtgctccgtgcccgaccctatcccggcggagtctccccatcctcctttgctttccgactgcccaaggcactttcaatctcaatctcttctctctctctctctctctctctctctctctctctctctctctctctctctctctcgcagggtggggggaagaggaggaggaattctttccccgcctaacatttcaagggacacaattcactccaagtctcttccctttccaagccgcttccgaagtgctcccggtgcccgcaactcctgatcccaacccgcgagaggagcctctgcgacctcaaagcctctcttccttctccctcgcttccctcctcctcttgctacctccacctccaccgccacctccacctccggcacccacccaccgccgccgccgccaccggcagcgcctcctcctctcctcctcctcctcccctcttctctttttggcagccgctggacgtccggtgttgatggtggcagcggcggcagcctaagcaacagcagccctcgcagcccgccagctcgcgctcgccccgccggcgtccccagccctatcacctcatctcccgaaaggtgctgggcagctccggggcggtcgaggcgaagcggctgcagcggcggtagcggcggcgggaggcaggatgagcgcacgcggtgagggcgcggggcagccgtccacttcagcccagggacaacctgccgccccagcgcctcagaagagaggacgcggccgccccaggaagcagcagcaagaaccaaccggtgagccctctcctaagagacccaggggaagacccaaaggcagcaaaaacaagagtccctctaaagcagctcaaaagaaagcagaagccactggagaaaaacggccaagaggcagacctaggaaatgggacaatctactaccaagaaccagctccaagaagaaaacatctctgggaaacagtaccaaaaggagtcactgaattgtcattggaggagtccaggatagctcttcatgttattttcaccttgaggaattgtccattacatctatgagccttatgtgtggctttctccgatatagaaacctatcaggtgtcttttagatcatttcaaaacactggcttattctttcttatgtttccaactgaagtctgcatcccaagatgtagtttcactgctaccccatatggcacccttgtacgaatttgaaaaaagtactcactctaggcacatgcagagccatgcctgcggggacagcttagagagtagagggtgggctgaactccagttactctcgtacagggatccacctttttgcagaaatcacagtgtggctatggtgtggtttgatttcataaaacagatgcttaaaaagta

SEQ ID NO: 138648 - DNA, 1398 bp, Artificial Sequence
  derived and/or modified sequence
cttgaatcttggggcaggaactcagaaaacttccagcccgggcagcgcgcgcttggtgcaagactcaggagctagcagcccgtccccctccgactctccggtgccgccgctgcctgctcccgccaccctaggaggcgcggtgccacccactactctgtcctctgcctgtgctccgtgcccgaccctatcccggcggagtctccccatcctcctttgctttccgactgcccaaggcactttcaatctcaatctcttctctctctctctctctctctctctctctctctctctctctctctctctctctctcgcagggtggggggaagaggaggaggaattctttccccgcctaacatttcaagggacacaattcactccaagtctcttccctttccaagccgcttccgaagtgctcccggtgcccgcaactcctgatcccaacccgcgagaggagcctctgcgacctcaaagcctctcttccttctccctcgcttccctcctcctcttgctacctccacctccaccgccacctccacctccggcacccacccaccgccgccgccgccaccggcagcgcctcctcctctcctcctcctcctcccctcttctctttttggcagccgctggacgtccggtgttgatggtggcagcggcggcagcctaagcaacagcagccctcgcagcccgccagctcgcgctcgccccgccggcgtccccagccctatcacctcatctcccgaaaggtgctgggcagctccggggcggtcgaggcgaagcggctgcagcggcggtagcggcggcgggaggcaggatgagcgcacgcggtgagggcgcggggcagccgtccacttcagcccagggacaacctgccgccccagcgcctcagaagagaggacgcggccgccccaggaagcagcagcaagaaccaaccggtgagccctctcctaagagacccaggggaagacccaaaggcagcaaaaacaagagtccctctaaagcagctcaaaagaaagcagaagccactggagaaaaacggccaagaggcagacctaggaaatgggaggagttttacattgcagcttagaagcctttcttccaatagcagagatttggtgtcatgtggtgttcatcagtttgaaaagaagtatttctgctgtttgcctcaagatgtacatacagagatgtgctgattctcagaacttctatagaattccattagccagtcctgccaattgaaatttggcatttaattatttgcatttttctattcttgcctaggaaaggagctcgtcacatacctagtttagtgatggaaagtatttggagaaagttttagagagtggggctcaggctcaagaatacaatgaagtaataaagttgttaacctcatgtataaaa

SEQ ID NO: 138649 - DNA, 1508 bp, Artificial Sequence
  derived and/or modified sequence
cttgaatcttggggcaggaactcagaaaacttccagcccgggcagcgcgcgcttggtgcaagactcaggagctagcagcccgtccccctccgactctccggtgccgccgctgcctgctcccgccaccctaggaggcgcggtgccacccactactctgtcctctgcctgtgctccgtgcccgaccctatcccggcggagtctccccatcctcctttgctttccgactgcccaaggcactttcaatctcaatctcttctctctctctctctctctctctctctctctctctctctctctctctctctctctcgcagggtggggggaagaggaggaggaattctttccccgcctaacatttcaagggacacaattcactccaagtctcttccctttccaagccgcttccgaagtgctcccggtgcccgcaactcctgatcccaacccgcgagaggagcctctgcgacctcaaagcctctcttccttctccctcgcttccctcctcctcttgctacctccacctccaccgccacctccacctccggcacccacccaccgccgccgccgccaccggcagcgcctcctcctctcctcctcctcctcccctcttctctttttggcagccgctggacgtccggtgttgatggtggcagcggcggcagcctaagcaacagcagccctcgcagcccgccagctcgcgctcgccccgccggcgtccccagccctatcacctcatctcccgaaaggtgctgggcagctccggggcggtcgaggcgaagcggctgcagcggcggtagcggcggcgggaggcaggatgagcgcacgcggtgagggcgcggggcagccgtccacttcagcccagggacaacctgccgccccagcgcctcagaagagaggacgcggccgccccaggaagcagcagcaagaaccaaccggtgagccctctcctaagagacccaggggaagacccaaaggcagcaaaaacaagagtccctctaaagcagctcaaaagaaagcagaagccactggagaaaaacggccaagaggcagacctaggaaatggttaagagctcaggctctggattcagatggcttgggttcaaattctggtccgtcacttagctaactggagtcttaagaaaatcacatgacctttaaaggtccagtttcctcatctgcaaaaggaggagttttacattgcagcttagaagcctttcttccaatagcagagatttggtgtcatgtggtgttcatcagtttgaaaagaagtatttctgctgtttgcctcaagatgtacatacagagatgtgctgattctcagaacttctatagaattccattagccagtcctgccaattgaaatttggcatttaattatttgcatttttctattcttgcctaggaaaggagctcgtcacatacctagtttagtgatggaaagtatttggagaaagttttagagagtggggctcaggctcaagaatacaatgaagtaataaagttgttaacct

SEQ ID NO: 138650 - DNA, 321 bp, Artificial Sequence
  derived and/or modified sequence
atgtctgcccggggggagggcgccggccagcccagcaccagcgcccagggccagcctgctgccccagccccccagaagaggggccggggccggcccaggaagcagcagcaggagcccaccggggagcccagccccaagaggccccggggccggcccaagggcagcaagaacaagagccccagcaaggccgcccagaagaaggccgaggccactggagagaagaggccccggggccggcccaggaagtgggacaacctgctgcccaggaccagcagcaagaagaagaccagcctgggcaacagcaccaagaggagccactag

SEQ ID NO: 138651 - DNA, 273 bp, Artificial Sequence
  derived and/or modified sequence
atgtctgcccggggggagggcgccggccagcccagcaccagcgcccagggccagcctgctgccccagccccccagaagaggggccggggccggcccaggaagcagcagcaggagcccaccggggagcccagccccaagaggccccggggccggcccaagggcagcaagaacaagagccccagcaaggccgcccagaagaaggccgaggccactggagagaagaggccccggggccggcccaggaagtgggaggagttctacatcgccgcctag

SEQ ID NO: 138652 - DNA, 279 bp, Artificial Sequence
  derived and/or modified sequence
atgtctgcccggggggagggcgccggccagcccagcaccagcgcccagggccagcctgctgccccagccccccagaagaggggccggggccggcccaggaagcagcagcaggagcccaccggggagcccagccccaagaggccccggggccggcccaagggcagcaagaacaagagccccagcaaggccgcccagaagaaggccgaggccactggagagaagaggccccggggccggcccaggaagtggtggctgctgatgaagagcccctgctggtag

SEQ ID NO: 138653 - DNA, 312 bp, Artificial Sequence
  derived and/or modified sequence
atgtctgcccggggggagggcgccggccagcccagcaccagcgcccagggccagcctgctgccccagccccccagaagaggggccggggccggcccaggaagcagcagcaggagcccaccggggagcccagccccaagaggccccggggccggcccaagggcagcaagaacaagagccccagcaaggccgcccagaagaaggccgaggccactggagagaagaggccccggggccggcccaggaagtggctgcgggcccaggccctggacagtgatggcctgggcagcaacagcggccccagcctgtcctag

SEQ ID NO: 138654 - DNA, 300 bp, Artificial Sequence
  derived and/or modified sequence
atgtctgcccggggggagggcgccggccagcccagcaccagcgcccagggccagcctgctgccccagccccccagaagaggggccggggccggcccaggaagcagcagcaggagcccaccggggagcccagccccaagaggccccggggccggcccaagggcagcaagaacaagagccccagcaaggccgcccagaagaaggccgaggccactggagagaagaggccccggggccggcccaggaagtggccccagcaggtggtgcagaagaagccagcccaggtgcgccacagccactag

SEQ ID NO: 138655 - DNA, 321 bp, Artificial Sequence
  derived and/or modified sequence
atgagcgcccggggcgagggcgccggccagcccagcaccagcgcccaaggacaacctgccgcaccggcgccccaaaagcgggggaggggacggcctcggaagcaacagcaggagcctaccggcgaacccagccctaaacgcccccgcggcaggcccaagggttccaagaacaagagcccttcaaaggcagcacaaaaaaaggccgaggcgaccggcgagaaacgcccacgcggccgcccacggaagtgggataacttactgcctaggaccagctcgaagaagaaaacctccctcgggaactcaacaaagcgatcacattag

SEQ ID NO: 138656 - DNA, 273 bp, Artificial Sequence
  derived and/or modified sequence
atgagcgcccggggcgagggcgccggccagcccagcaccagcgcccagggacagccagcagcacccgccccccaaaagcgaggccgtggcaggcctaggaaacagcagcaagaaccaaccggtgagccttccccaaagcggccacggggccggcctaaggggtcaaagaataagtccccttcgaaggccgcgcagaagaaggctgaagcaacgggagagaaacggccgcgaggtagaccccgcaagtgggaggaattctatatcgcagcctag

SEQ ID NO: 138657 - DNA, 279 bp, Artificial Sequence
  derived and/or modified sequence
atgagcgcccggggcgagggcgccggccagcccagcaccagcgcccaggggcagcccgctgctcccgcaccccaaaaaagaggcagagggaggcctcgtaagcaacaacaggaaccaaccggcgagccatctcccaagcgacctcggggtagaccgaaaggcagcaaaaacaagagcccatccaaagccgcacaaaagaaagctgaggctacaggcgaaaaacggcctcggggccggcctcggaagtggtggcttctgatgaagtccccatgctggtag

SEQ ID NO: 138658 - DNA, 312 bp, Artificial Sequence
  derived and/or modified sequence
atgagcgcccggggcgagggcgccggccagcccagcaccagcgcccaaggccagccggcagcccctgctccgcagaagcggggtcgaggtcggccacggaagcagcaacaagaacccaccggagagccctctcctaagaggcccaggggacgacctaagggttcaaagaataagtccccatccaaagctgcccagaagaaggctgaggctactggggagaaacgtcctcgaggccgccccagaaagtggttgcgggcccaggcgttggactctgatggtctcgggagcaacagtggccctagcctctcctag

SEQ ID NO: 138659 - DNA, 300 bp, Artificial Sequence
  derived and/or modified sequence
atgagcgcccggggcgagggcgccggccagcccagcaccagcgcccaaggacagcccgctgctcctgcgccgcaaaagagaggaaggggaaggccgaggaagcaacagcaggaacccacaggtgaaccttcacccaagcgacctcggggccgtcccaaggggtcaaagaacaaatccccttctaaggcggctcagaagaaagccgaggccacaggtgagaagcgacctcgaggacgccctagaaagtggccacagcaagtggtgcagaagaaacctgctcaagttcggcactcccattag

SEQ ID NO: 138660 - DNA, 321 bp, Artificial Sequence
  derived and/or modified sequence
atgtccgcaaggggagagggcgcaggacagccctcaacttctgcccagggccagcccgctgcccctgcgccacagaaaagggggcgtggaaggccacggaagcaacaacaggagccgacaggcgagccctcaccgaagcgccctcggggaagaccaaagggcagcaagaataagtccccttcgaaggccgcacagaagaaggcagaggctacgggcgaaaaacgtccccgtggacggcctcggaagtgggacaacctgctgcctaggaccagcagcaaaaagaaaactagcctgggcaactcgactaaacggagccattag

SEQ ID NO: 138661 - DNA, 273 bp, Artificial Sequence
  derived and/or modified sequence
atgtcagccagaggagaaggcgctggccagccctccacctctgcgcagggccaacccgcagccccagccccacagaagcgaggcagaggacgtcctagaaagcagcagcaggaacctaccggcgaaccaagccccaaaagacccagaggcaggcctaaggggagcaagaataagtctccttctaaggcagcacaaaagaaagcggaggctacaggggagaaacggcctagaggacgcccacggaaatgggaggagttttatatcgcggcttag

SEQ ID NO: 138662 - DNA, 279 bp, Artificial Sequence
  derived and/or modified sequence
atgtctgcgaggggggagggagcagggcaaccaagcactagcgcccagggtcagcccgctgctcccgctccccaaaagcggggtagaggacggccacggaagcagcaacaggagcccaccggagagccctctcctaagcggcctcgagggaggccaaagggatccaagaacaagagtccttctaaggcagcccagaaaaaggcggaagctactggggagaagaggcctcggggacggccacggaaatggtggctgctgatgaagagtccatgttggtag

SEQ ID NO: 138663 - DNA, 312 bp, Artificial Sequence
  derived and/or modified sequence
atgtctgccaggggggagggcgctggacagccctccacttcagctcaggggcaacctgccgctcccgctccccagaaaaggggacgcggacgccctcggaagcagcagcaagagcccacaggagaacccagtcctaaacggccacggggaaggcccaagggcagcaaaaataagtccccttctaaggcagcacaaaaaaaagccgaggctacaggtgagaagaggcctaggggcaggccacgaaagtggcttcgggctcaagcactcgatagtgatggcctcggctctaactccggtcctagtctgagttag

SEQ ID NO: 138664 - DNA, 300 bp, Artificial Sequence
  derived and/or modified sequence
atgagcgctagaggggaaggagctgggcagccttctacaagcgcgcagggccagccagctgcacctgcccctcagaaaagaggcagaggtcgtccacgcaaacagcaacaggagcccaccggcgagccgtcccccaaacggccaaggggaaggcccaagggaagtaagaataaatccccttcaaaggccgcacaaaagaaggcagaagccactggggagaaaagacccaggggcaggcctagaaagtggccgcagcaggtcgtgcagaagaagcccgcacaggtgcggcactcacattag

SEQ ID NO: 138665 - DNA, 321 bp, Artificial Sequence
  derived and/or modified sequence
atgagcgccagaggcgagggcgccggccagcccagcaccagcgcccagggccagcccgccgcccccgccccccagaagagaggcagaggcagacccagaaagcagcagcaggagcccaccggcgagcccagccccaagagacccagaggcagacccaagggcagcaagaacaagagccccagcaaggccgcccagaagaaggccgaggccaccggcgagaagagacccagaggcagacccagaaagtgggacaacctgctgcccagaaccagcagcaagaagaagaccagcctgggcaacagcaccaagagaagccactag

SEQ ID NO: 138666 - DNA, 273 bp, Artificial Sequence
  derived and/or modified sequence
atgagcgccagaggcgagggcgccggccagcccagcaccagcgcccagggccagcccgccgcccccgccccccagaagagaggcagaggcagacccagaaagcagcagcaggagcccaccggcgagcccagccccaagagacccagaggcagacccaagggcagcaagaacaagagccccagcaaggccgcccagaagaaggccgaggccaccggcgagaagagacccagaggcagacccagaaagtgggaggagttctacatcgccgcctag

SEQ ID NO: 138667 - DNA, 279 bp, Artificial Sequence
  derived and/or modified sequence
atgagcgccagaggcgagggcgccggccagcccagcaccagcgcccagggccagcccgccgcccccgccccccagaagagaggcagaggcagacccagaaagcagcagcaggagcccaccggcgagcccagccccaagagacccagaggcagacccaagggcagcaagaacaagagccccagcaaggccgcccagaagaaggccgaggccaccggcgagaagagacccagaggcagacccagaaagtggtggctgctgatgaagagcccctgctggtag

SEQ ID NO: 138668 - DNA, 312 bp, Artificial Sequence
  derived and/or modified sequence
atgagcgccagaggcgagggcgccggccagcccagcaccagcgcccagggccagcccgccgcccccgccccccagaagagaggcagaggcagacccagaaagcagcagcaggagcccaccggcgagcccagccccaagagacccagaggcagacccaagggcagcaagaacaagagccccagcaaggccgcccagaagaaggccgaggccaccggcgagaagagacccagaggcagacccagaaagtggctgagagcccaggccctggacagcgacggcctgggcagcaacagcggccccagcctgagctag

SEQ ID NO: 138669 - DNA, 300 bp, Artificial Sequence
  derived and/or modified sequence
atgagcgccagaggcgagggcgccggccagcccagcaccagcgcccagggccagcccgccgcccccgccccccagaagagaggcagaggcagacccagaaagcagcagcaggagcccaccggcgagcccagccccaagagacccagaggcagacccaagggcagcaagaacaagagccccagcaaggccgcccagaagaaggccgaggccaccggcgagaagagacccagaggcagacccagaaagtggccccagcaggtggtgcagaagaagcccgcccaggtgagacacagccactag

SEQ ID NO: 138670 - protein, 507 aa, Artificial Sequence
  derived and/or modified sequence
MAGAGPKRRALAAPAAEEKEEAREKMLAAKSADGSAPAGEGEGVTLQRNITLLNGVAIIVGTIIGSGIFVTPTGVLKEAGSPGLALVVWAACGVFSIVGALCYAELGTTISKSGGDYAYMLEVYGSLPAFLKLWIELLIIRPSSQYIVALVFATYLLKPLFPTCPVPEEAAKLVACLCVLLLTAVNCYSVKAATRVQDAFAAAKLLALALIILLGFVQIGKGDVSNLDPNFSFEGTKLDVGNIVLALYSGLFAYGGWNYLNFVTEEMINPYRNLPLAIIISLPIVTLVYVLTNLAYFTTLSTEQMLSSEAVAVDFGNYHLGVMSWIIPVFVGLSCFGSVNGSLFTSSRLFFVGSREGHLPSILSMIHPQLLTPVPSLVFTCVMTLLYAFSKDIFSVINFFSFFNWLCVALAIIGMIWLRHRKPELERPIKVNLALPVFFILACLFLIAVSFWKTPVECGIGFTIILSGLPVYFFGVWWKNKPKWLLQGIFSTTVLCQKLMQVVPQET

SEQ ID NO: 138671 - DNA, 1524 bp, Artificial Sequence
  derived and/or modified sequence
atggccggcgccggccccaagagaagagccctggccgcccccgccgccgaggagaaggaggaggccagagagaagatgctggccgccaagagcgccgacggcagcgcccccgccggcgagggcgagggcgtgaccctgcagagaaacatcaccctgctgaacggcgtggccatcatcgtgggcaccatcatcggcagcggcatcttcgtgacccccaccggcgtgctgaaggaggccggcagccccggcctggccctggtggtgtgggccgcctgcggcgtgttcagcatcgtgggcgccctgtgctacgccgagctgggcaccaccatcagcaagagcggcggcgactacgcctacatgctggaggtgtacggcagcctgcccgccttcctgaagctgtggatcgagctgctgatcatcagacccagcagccagtacatcgtggccctggtgttcgccacctacctgctgaagcccctgttccccacctgccccgtgcccgaggaggccgccaagctggtggcctgcctgtgcgtgctgctgctgaccgccgtgaactgctacagcgtgaaggccgccaccagagtgcaggacgccttcgccgccgccaagctgctggccctggccctgatcatcctgctgggcttcgtgcagatcggcaagggcgacgtgagcaacctggaccccaacttcagcttcgagggcaccaagctggacgtgggcaacatcgtgctggccctgtacagcggcctgttcgcctacggcggctggaactacctgaacttcgtgaccgaggagatgatcaacccctacagaaacctgcccctggccatcatcatcagcctgcccatcgtgaccctggtgtacgtgctgaccaacctggcctacttcaccaccctgagcaccgagcagatgctgagcagcgaggccgtggccgtggacttcggcaactaccacctgggcgtgatgagctggatcatccccgtgttcgtgggcctgagctgcttcggcagcgtgaacggcagcctgttcaccagcagcagactgttcttcgtgggcagcagagagggccacctgcccagcatcctgagcatgatccacccccagctgctgacccccgtgcccagcctggtgttcacctgcgtgatgaccctgctgtacgccttcagcaaggacatcttcagcgtgatcaacttcttcagcttcttcaactggctgtgcgtggccctggccatcatcggcatgatctggctgagacacagaaagcccgagctggagagacccatcaaggtgaacctggccctgcccgtgttcttcatcctggcctgcctgttcctgatcgccgtgagcttctggaagacccccgtggagtgcggcatcggcttcaccatcatcctgagcggcctgcccgtgtacttcttcggcgtgtggtggaagaacaagcccaagtggctgctgcagggcatcttcagcaccaccgtgctgtgccagaagctgatgcaggtggtgccccaggagacctag

SEQ ID NO: 138672 - DNA, 1524 bp, Artificial Sequence
  derived and/or modified sequence
atggctggcgcaggcccaaaacggcgggctctcgccgcccccgcggcggaagaaaaggaagaggctcgcgagaagatgctggctgcgaagtcagcggacgggtcagctccagcaggagagggtgagggcgtgactcttcagcggaacattactttattaaacggagtggcaatcattgtcggcaccatcatagggtctggtatcttcgtgactccaactggcgtcctcaaggaagcagggtcccctggtctcgctctggtagtttgggccgcttgtggggtgttctctatcgtcggcgcgctgtgctacgccgaactcgggacaaccatatccaagtccggcggggactacgcgtatatgttagaggtgtatggctctttacccgctttcctgaaactgtggatcgagctgctgatcatccggccctcctcccagtatattgttgcattagtattcgcaacatatctgttgaagcctctcttccccacatgtccagtacccgaggaggccgccaaacttgtggcttgcctttgcgtacttctgcttacggccgtgaattgctattccgtgaaggctgctacacgcgtccaggatgcctttgctgcggctaaactgctcgcccttgccttaatcattctgctcggatttgtgcagatagggaagggggacgtctctaacctcgatccaaacttcagtttcgaggggaccaaacttgatgtgggtaacatcgtgttggccctgtattcaggattgttcgcctatgggggatggaattatctcaatttcgtgacagaagaaatgatcaacccctatcggaatctaccactcgcgatcatcattagtcttcccatcgtcacacttgtgtatgtgctgactaacctggcctattttacaacgcttagcaccgaacagatgctgtcttccgaggcagtggctgtggattttggcaattatcacctgggcgtgatgagttggatcatcccagttttcgtcggactcagctgttttgggtccgtcaacggttctctgtttaccagttcaagattgttcttcgtgggaagcagagagggccacctacccagtatactctcaatgattcatccgcaattattgaccccagtaccaagtctggtgtttacgtgcgtgatgacattactttacgccttttccaaagatatctttagtgtgatcaactttttttctttctttaattggctttgcgttgcactggctatcatcggcatgatttggcttagacaccgaaagcctgagctggaaagacccataaaagttaatctggctctgcctgtgttctttattctcgcgtgcctcttcttgattgccgtttcattttggaaaacgcctgttgagtgtggaattggctttacaatcatcctcagcggactccccgtctacttcttcggtgtgtggtggaagaacaagccaaagtggttgttgcaaggtatcttttctactacagtcctgtgccaaaagctgatgcaggtcgtgccgcaagagacttag

SEQ ID NO: 138673 - DNA, 1524 bp, Artificial Sequence
  derived and/or modified sequence
atggccggggccggccccaagaggcgggccctggccgccccagctgctgaggagaaggaggaggcccgggagaagatgctggccgccaagtctgcagatggcagcgccccagctggggagggggagggcgtgaccctgcagaggaacatcaccctgctgaatggagtggccatcatcgtgggcaccatcatcggcagcggcatctttgtgacccccactggagtgctgaaggaggccggcagccctggcctggccctggtggtgtgggccgcctgtggggtcttcagcatcgtgggcgccctgtgctacgccgagctgggcaccaccatcagcaagtctggaggagactatgcctacatgctggaggtgtatggcagcctgcctgccttcctgaagctgtggattgagctgctgatcatccggcccagcagccagtacatcgtggccctggtgtttgccacctacctgctgaagcccctcttccccacctgccctgtgcctgaggaggccgccaagctggtggcctgcctgtgtgtgctgctgctgacagctgtgaactgctacagcgtgaaggccgccaccagggtgcaggatgcctttgctgctgccaagctgctggccctggccctgatcatcctgctgggctttgtgcagattggaaaaggagatgtgagcaacctggaccccaacttctcctttgagggcaccaagctggatgtgggcaacatcgtgctggccctgtacagcggcctgtttgcctacggcggctggaactacctgaactttgtgacagaggagatgatcaacccctacagaaacctgcccctggccatcatcatcagcctgcccatcgtgaccctggtgtatgtgctgaccaacctggcctacttcaccaccctgagcacagagcagatgctgagcagcgaggccgtggccgtggactttggaaactaccacctgggcgtgatgtcctggatcatccctgtgtttgtgggcctgagctgcttcggctctgtgaatggcagcctcttcaccagcagccgcctcttctttgtgggcagccgggagggccacctgcccagcatcctgtccatgatccacccccagctgctgacccctgtgcccagcctggtgttcacctgtgtgatgaccctgctgtatgccttcagcaaggacatcttcagcgtcatcaacttcttctccttcttcaactggctgtgtgtggccctggccatcatcggcatgatctggctgcggcacaggaagccagagctggagcggcccatcaaggtgaacctggccctgcccgtcttcttcatcctggcctgcctcttcctgattgctgtgtccttctggaagacccctgtggagtgtggcatcggcttcaccatcatcctgagcggcctgcctgtgtacttcttcggcgtgtggtggaagaacaagcccaagtggctgctgcagggcatcttcagcaccaccgtgctgtgccagaagctgatgcaggtggtgccccaggagacctag

SEQ ID NO: 138674 - DNA, 1524 bp, Artificial Sequence
  derived and/or modified sequence
atggccggcgccggccccaagcggcgggccctggccgcccccgccgccgaggagaaagaagaggcccgcgagaagatgctggcggctaagtccgcggatggctcggcccccgctggcgagggtgagggcgtcacactccagaggaacataaccctgctgaacggtgtggcaatcatcgtcggcacgataatcggctccggcatatttgtgacaccgacgggagtgctgaaagaagctggttcccccgggctggccttggtggtctgggctgcatgtggtgtattctctatcgtcggtgcattatgctacgccgaactagggaccacaatcagcaaatctggtggagactacgcctatatgctcgaggtttatggctcactacctgcatttctgaagttatggatagagctgctgattataagacctagctctcagtacatagtcgcgttagtttttgctacatatctgctcaagcccctcttcccaacctgcccagtgcctgaggaagcggccaagctggtggcctgtctgtgtgtcctcttactgaccgccgtaaactgctactcggtgaaagccgctaccagggttcaggacgcatttgccgcagcaaagcttctggctttggccttaattattcttctgggatttgtccagataggaaagggggatgtgtcaaacctcgacccaaacttctcattcgaaggcacaaaactcgacgtgggtaatattgtactggcactctactccggcctcttcgcatacggcggctggaattacctgaacttcgtgactgaggagatgataaacccctataggaatctgcctctcgccatcattatttctctgccgattgtgacgctcgtgtacgtgctgaccaaccttgcttactttactacgctttctacggagcagatgctctcatccgaggccgtagcggtagatttcggaaactaccatttgggcgttatgtcatggataatccctgtcttcgtaggtctcagctgttttgggtccgtcaatgggtccctgtttacatcctcgcgcctgttcttcgtgggctctagagagggccatctgccatctatactctcaatgatacacccccagcttttgactccagtcccatcactggtattcacatgtgtgatgacattactttatgcattcagtaaggatatattttctgtgatcaactttttcagttttttcaactggctgtgtgtggcgttagcaattatcggaatgatttggctgcgtcaccgcaaaccagagctcgaacggcctataaaggtgaatctagctctacctgtgttctttattcttgcatgtctgtttcttatcgctgtcagcttttggaagacgccagtcgaatgtggcatcgggttcaccattattttaagcgggctgccagtgtacttcttcggtgtgtggtggaagaacaagccaaagtggctgcttcagggtatcttttcgaccactgtcctatgccagaaattgatgcaagtggtcccccaggagacctag

SEQ ID NO: 138675 - DNA, 1524 bp, Artificial Sequence
  derived and/or modified sequence
atggctggggctgggcctaagcgcagggctctggcagccccagccgctgaggaaaaagaggaagccagagagaaaatgctggcagctaagtccgccgacgggtccgcacccgctggagagggagagggggttaccctgcagagaaatatcaccctgcttaacggtgtcgccatcatagtgggcactattattgggagcggcatattcgtaacccccactggagtattaaaagaagcgggtagtcccggacttgccctagtggtctgggcggcttgcggggtcttttctattgtgggcgctctctgttatgcagaactgggcaccacaatttctaaaagcggaggggactatgcctatatgttggaggtatatggctcccttcccgctttcctgaagctatggattgagctgcttataatcagaccttcatctcaatatatcgtcgcacttgtcttcgcaacttaccttctgaaacccttatttccaacttgtcctgtgcccgaagaggccgcaaaactggtcgcttgtctctgcgtgttgctactgaccgctgtgaattgctacagcgtgaaggccgctacccgggtgcaggacgcttttgcagccgctaagctgctagccctggccttgatcatcctgttggggtttgtgcaaataggcaaaggcgatgtgtcaaatctggaccctaactttagctttgaaggtaccaagcttgacgtaggcaacatagtgctggctctgtactctggcttgtttgcatacggtggctggaactatcttaatttcgtgacagaggaaatgattaatccctacaggaatctgccccttgctatcataatttctttacccattgtgacactcgtatatgtcctgacgaatttagcctatttcacaaccctatcaaccgagcaaatgttgtcatccgaggctgtggccgtggactttgggaattaccatctaggcgtcatgagctggatcattcctgtatttgtgggactgtcctgcttcgggagcgttaatggcagcctgtttaccagctctcgcctgttcttcgtgggctctcgggaggggcatcttccaagcattctctccatgatacatcctcaactgttgactcctgtgccatcactggtgttcacttgcgtgatgacgctcctctacgcttttagtaaggatatatttagtgtgataaactttttttcgttctttaattggctgtgcgtggctctggcaattataggcatgatttggctccgacacagaaaacctgagctggaaaggcccatcaaggtcaatctggcccttcctgttttctttattctggcctgcctattcctaatcgctgttagcttttggaaaaccccagtggagtgcggtattggatttacgataattctttccggactcccagtttacttcttcggcgtgtggtggaagaacaagccaaagtggctgctccaaggcatattttccactaccgtcctgtgtcagaaacttatgcaggttgtcccacaggaaacttag

SEQ ID NO: 138676 - DNA, 4575 bp, Artificial Sequence
  derived and/or modified sequence
gcggggttcctgacgcagctgcgggcggcgggcggcgcgcacactgctcgctgggccgcggctcccgggtgtcccaggcccggccggtgcgcagagcatggcgggtgcgggcccgaagcggcgcgcgctagcggcgccggcggccgaggagaaggaagaggcgcgggagaagatgctggccgccaagagcgcggacggctcggcgccggcaggcgagggcgagggcgtgaccctgcagcggaacatcacgctgctcaacggcgtggccatcatcgtggggaccattatcggctcgggcatcttcgtgacgcccacgggcgtgctcaaggaggcaggctcgccggggctggcgctggtggtgtgggccgcgtgcggcgtcttctccatcgtgggcgcgctctgctacgcggagctcggcaccaccatctccaaatcgggcggcgactacgcctacatgctggaggtctacggctcgctgcccgccttcctcaagctctggatcgagctgctcatcatccggccttcatcgcagtacatcgtggccctggtcttcgccacctacctgctcaagccgctcttccccacctgcccggtgcccgaggaggcagccaagctcgtggcctgcctctgcgtgctgctgctcacggccgtgaactgctacagcgtgaaggccgccacccgggtccaggatgcctttgccgccgccaagctcctggccctggccctgatcatcctgctgggcttcgtccagatcgggaagggtgatgtgtccaatctagatcccaacttctcatttgaaggcaccaaactggatgtggggaacattgtgctggcattatacagcggcctctttgcctatggaggatggaattacttgaatttcgtcacagaggaaatgatcaacccctacagaaacctgcccctggccatcatcatctccctgcccatcgtgacgctggtgtacgtgctgaccaacctggcctacttcaccaccctgtccaccgagcagatgctgtcgtccgaggccgtggccgtggacttcgggaactatcacctgggcgtcatgtcctggatcatccccgtcttcgtgggcctgtcctgcttcggctccgtcaatgggtccctgttcacatcctccaggctcttcttcgtggggtcccgggaaggccacctgccctccatcctctccatgatccacccacagctcctcacccccgtgccgtccctcgtgttcacgtgtgtgatgacgctgctctacgccttctccaaggacatcttctccgtcatcaacttcttcagcttcttcaactggctctgcgtggccctggccatcatcggcatgatctggctgcgccacagaaagcctgagcttgagcggcccatcaaggtgaacctggccctgcctgtgttcttcatcctggcctgcctcttcctgatcgccgtctccttctggaagacacccgtggagtgtggcatcggcttcaccatcatcctcagcgggctgcccgtctacttcttcggggtctggtggaaaaacaagcccaagtggctcctccagggcatcttctccacgaccgtcctgtgtcagaagctcatgcaggtggtcccccaggagacatagccaggaggccgagtggctgccggaggagcatgcgcagaggccagttaaagtagatcacctcctcgaacccactccggttccccgcaacccacagctcagctgcccatcccagtccctcgccgtccctcccaggtcgggcagtggaggctgctgtgaaaactctggtacgaatctcatccctcaactgagggccagggacccaggtgtgcctgtgctcctgcccaggagcagcttttggtctccttgggccctttttcccttccctcctttgtttacttatatatatattttttttaaacttaaattttgggtcaacttgacaccactaagatgattttttaaggagctgggggaaggcaggagccttcctttctcctgccccaagggcccagaccctgggcaaacagagctactgagacttggaacctcattgctaccacagacttgcactgaagccggacagctgcccagacacatgggcttgtgacattcgtgaaaaccaaccctgtgggcttatgtctctgccttagggtttgcagagtggaaactcagccgtagggtggcactgggagggggtgggggatctgggcaaggtgggtgattcctcccaggaggtgcttgaggccccgatggactcctgaccataatcctagccccgagacaccatcctgagccagggaacagccccagggttggggggtgccggcatctcccctagctcaccaggcctggcctctgggcagtgtggcctcttggctatttctgtgtccagttttggaggctgagttctggttcatgcagacaaagccctgtccttcagtcttctagaaacagagacaagaaaggcagacacaccgcggccaggcacccatgtgggcgcccaccctgggctccacacagcagtgtcccctgccccagaggtcgcagctaccctcagcctccaatgcattggcctctgtaccgcccggcagccccttctggccggtgctgggttcccactcccggcctaggcacctccccgctctccctgtcacgctcatgtcctgtcctggtcctgatgcccgttgtctaggagacagagccaagcactgctcacgtctctgccgcctgcgtttggaggcccctgggctctcacccagtccccacccgcctgcagagagggaactagggcaccccttgtttctgttgttcccgtgaatttttttcgctatgggaggcagccgaggcctggccaatgcggcccactttcctgagctgtcgctgcctccatggcagcagccagggacccccagaacaagaagaccccgcaggatccctcctgagctcggggggctctgccttctcaggccccgggcttcccttctccccagccagaggtggagccaagtggtccagcgtcactccagtgctcagctgtggctggaggagctggcctgtggcacagccctgagtgtcccaagccgggagccaacgaagccggacacggcttcactgaccagcggctgctcaagccgcaagctctcagcaagtgcccagtggagcctgccgcccccgcctgggcaccgggaccccctcaccatccagtgggcccggagaaacctgatgaacagtttggggactcaggaccagatgtccgtctctcttgcttgaggaatgaagacctttattcacccctgccccgttgcttcccgctgcacatggacagacttcacagcgtctgctcataggacctgcatccttcctggggacgaattccactcgtccaagggacagcccacggtctggaggccgaggaccaccagcaggcaggtggactgactgtgttgggcaagacctcttccctctgggcctgttctcttggctgcaaataaggacagcagctggtgccccacctgcctggtgcattgctgtgtgaatccaggaggcagtggacatcgtaggcagccacggccccgggtccaggagaagtgctccctggaggcacgcaccactgcttcccactggggccggcggggcccacgcacgacgtcagcctcttaccttcccgcctcggctaggggtcctcgggatgccgttctgttccaacctcctgctctgggacgtggacatgcctcaaggatacagggagccggcggcctctcgacggcacgcacttgcctgttggctgctgcggctgtgggcgagcatgggggctgccagcgtctgttgtggaaagtagctgctagtgaaatggctggggccgctggggtccgtcttcacactgcgcaggtctcttctgggcgtctgagctggggtgggagctcctccgcagaaggttggtggggggtccagtctgtgatccttggtgctgtgtgccccactccagcctggggaccccacttcagaaggtaggggccgtgtcccgcggtgctgactgaggcctgcttccccctccccctcctgctgtgctggaattccacagggaccagggccaccgcaggggactgtctcagaagacttgatttttccgtccctttttctccacactccactgacaaacgtccccagcggtttccacttgtgggcttcaggtgttttcaagcacaacccaccacaacaagcaagtgcattttcagtcgttgtgcttttttgttttgtgctaacgtcttactaatttaaagatgctgtcggcaccatgtttatttatttccagtggtcatgctcagccttgctgctctgcgtggcgcaggtgccatgcctgctccctgtctgtgtcccagccacgcagggccatccactgtgacgtcggccgaccaggctggacaccctctgccgagtaatgacgtgtgtggctgggaccttctttattctgtgttaatggctaacctgttacactgggctgggttgggtagggtgttctggcttttttgtggggtttttatttttaaagaaacactcaatcatcctaccgctga

SEQ ID NO: 138677 - protein, 903 aa, Artificial Sequence
  derived and/or modified sequence
MAIQFRSLFPLALPGMLALLGWWWFFSRKKGHVSSHDEQQVEAGAVQLRADPAIKEPLPVEDVCPKVVSTPPSVTEPPEKELSTVSKLPAEPPALLQTHPPCRRSESSGILPNTTDMRLRPGTRRDDSTKLELALTGGEAKSIPLECPLSSPKGVLFSSKSAEVCKQDSPFSRVPRKVQPGYPVVPAEKRSSGERARETGGAEGTGDAVLGEKVLEEALLSREHVLELENSKGPSLASLEGEEDKGKSSSSQVVGPVQEEEYVAEKLPSRFIESAHTELAKDDAAPAPPVADAKAQDRGVEGELGNEESLDRNEEGLDRNEEGLDRNEESLDRNEEGLDRNEEIKRAAFQIISQVISEATEQVLATTVGKVAGRVCQASQLQGQKEESCVPVHQKTVLGPDTAEPATAEAAVAPPDAGLPLPGLPAEGSPPPKTYVSCLKSLLSSPTKDSKPNISAHHISLASCLALTTPSEELPDRAGILVEDATCVTCMSDSSQSVPLVASPGHCSDSFSTSGLEDSCTETSSSPRDKAITPPLPESTVPFSNGVLKGELSDLGAEDGWTMDAEADHSGGSDRNSMDSVDSCCSLKKTESFQNAQAGSNPKKVDLIIWEIEVPKHLVGRLIGKQGRYVSFLKQTSGAKIYISTLPYTQSVQICHIEGSQHHVDKALNLIGKKFKELNLTNIYAPPLPSLALPSLPMTSWLMLPDGITVEVIVVNQVNAGHLFVQQHTHPTFHALRSLDQQMYLCYSQPGIPTLPTPVEITVICAAPGADGAWWRAQVVASYEETNEVEIRYVDYGGYKRVKVDVLRQIRSDFVTLPFQGAEVLLDSVMPLSDDDQFSPEADAAMSEMTGNTALLAQVTSYSPTGLPLIQLWSVVGDEVVLINRSLVERGLAQWVDSYYTSL

SEQ ID NO: 138678 - protein, 945 aa, Artificial Sequence
  derived and/or modified sequence
MGALGVSGSSSPGGCPGWRRLPAAVNTNPVDFAPGVITQASRMAIQFRSLFPLALPGMLALLGWWWFFSRKKGHVSSHDEQQVEAGAVQLRADPAIKEPLPVEDVCPKVVSTPPSVTEPPEKELSTVSKLPAEPPALLQTHPPCRRSESSGILPNTTDMRLRPGTRRDDSTKLELALTGGEAKSIPLECPLSSPKGVLFSSKSAEVCKQDSPFSRVPRKVQPGYPVVPAEKRSSGERARETGGAEGTGDAVLGEKVLEEALLSREHVLELENSKGPSLASLEGEEDKGKSSSSQVVGPVQEEEYVAEKLPSRFIESAHTELAKDDAAPAPPVADAKAQDRGVEGELGNEESLDRNEEGLDRNEEGLDRNEESLDRNEEGLDRNEEIKRAAFQIISQVISEATEQVLATTVGKVAGRVCQASQLQGQKEESCVPVHQKTVLGPDTAEPATAEAAVAPPDAGLPLPGLPAEGSPPPKTYVSCLKSLLSSPTKDSKPNISAHHISLASCLALTTPSEELPDRAGILVEDATCVTCMSDSSQSVPLVASPGHCSDSFSTSGLEDSCTETSSSPRDKAITPPLPESTVPFSNGVLKGELSDLGAEDGWTMDAEADHSGGSDRNSMDSVDSCCSLKKTESFQNAQAGSNPKKVDLIIWEIEVPKHLVGRLIGKQGRYVSFLKQTSGAKIYISTLPYTQSVQICHIEGSQHHVDKALNLIGKKFKELNLTNIYAPPLPSLALPSLPMTSWLMLPDGITVEVIVVNQVNAGHLFVQQHTHPTFHALRSLDQQMYLCYSQPGIPTLPTPVEITVICAAPGADGAWWRAQVVASYEETNEVEIRYVDYGGYKRVKVDVLRQIRSDFVTLPFQGAEVLLDSVMPLSDDDQFSPEADAAMSEMTGNTALLAQVTSYSPTGLPLIQLWSVVGDEVVLINRSLVERGLAQWVDSYYTSL

SEQ ID NO: 138679 - DNA, 2712 bp, Artificial Sequence
  derived and/or modified sequence
atggctatacagtttcgttccttatttcctctggccctgcctggtatgctggccctactggggtggtggtggtttttctctcgaaagaagggacacgtaagctcccatgacgagcagcaggtcgaggcaggtgcggtacagttacgggcggatccggcaatcaaagaacctttgcctgtcgaggacgtgtgcccgaaggtcgtgtctacaccaccatccgtcaccgaacctcctgagaaggagctgtcaaccgtgtctaaactccccgctgagcctccagctctgctgcagacccaccctccctgccgtcgaagcgagagttcaggcatactgcccaacacaacagacatgcggctgagacccggaactcggagagatgactcaacaaaattagagttggccctgactggcggcgaagctaagtccatccccctcgaatgccccctatcaagtccgaaaggggttttgtttagcagcaagagtgccgaggtatgcaaacaagactctccattttctagggtgccccgaaaagtgcaacctggttatcctgtggtccccgcagaaaagaggtcctcaggcgagcgcgcacgcgaaactggaggcgctgaaggaacaggagatgccgtgctgggcgagaaagtgctggaggaagccctgcttagtcgggagcacgtacttgaactggagaattcaaaagggccatccctggcttccttggagggtgaggaggacaaggggaaatcgagcagtagtcaggtggtaggccctgtacaggaagaagagtacgttgccgaaaaacttccgtcccgatttatcgagtccgcccatacagagctggccaaggatgacgcagccccggcgccacctgttgccgacgccaaggcccaggacagaggagtagagggggagctggggaatgaggagagccttgacagaaacgaagaggggttagacagaaatgaagaagggctggaccgcaatgaggaaagtctggaccggaacgaagaggggctggatcgaaacgaggagattaaaagggccgctttccagataatatcccaagtgatctctgaggctaccgaacaggtcctggcaaccactgtaggcaaggttgccggcagggtctgtcaggccagccagctgcaaggtcagaaggaggagtcatgcgttcccgttcatcagaaaaccgtgcttgggccagataccgctgaacccgccacagctgaagctgccgtggcaccaccggacgctggcctcccacttcccggtctccccgcagaaggatccccgcccccgaaaacatatgtgtcttgccttaagtctttgctgtccagtcctaccaaggattccaagcccaatatatcagcgcatcacatctctcttgcttcctgtctggctctcacaacacccagtgaggaacttccagacagggccggtatcttggtggaggatgcaacctgcgtaacttgcatgtccgactcatcccagtcagtgccccttgtggcgagtcccggacattgcagcgacagtttttccacctcgggcctggaagactcttgcacggagactagtagttcccctagagataaagcaatcacaccccctctgcctgagtctaccgtccccttttcgaacggcgtgctgaagggagaattatctgatctaggtgcagaggatgggtggacgatggatgccgaggcagatcatagcggggggtctgacaggaattccatggatagtgttgattcatgttgctcactaaaaaagaccgagtcttttcaaaacgcccaggccggatctaaccctaagaaagtggatctcatcatttgggaaattgaagtaccgaagcatttagtgggccgcttgattgggaagcagggcagatacgtcagtttccttaagcagacatccggcgcaaagatttatatatcaacgttgccatacacacagtcggtgcaaatctgtcacattgaggggagtcagcaccatgtcgacaaggccctgaatctgattggaaagaagttcaaagagcttaacctcactaacatctatgcgcctcccttgccatccctggctctgccttcgctgcccatgactagctggctgatgttgccagacggaattacggtcgaggttatcgttgtcaaccaggtgaacgccggacacctcttcgttcaacagcatacccaccccacctttcacgccctgagatcactcgaccagcagatgtacctctgctacagccagcctgggattccaactctacctactccggtagaaatcactgttatctgtgccgctcctggcgcagacggcgcttggtggagggcacaggtggttgcctcttacgaagaaaccaacgaggtagagattcggtacgttgactatggcggttacaagcgcgtgaaggtcgacgttctgcgtcagattagaagcgattttgttaccctgccatttcaaggcgccgaagtactcttagattctgtgatgcctctcagtgacgatgaccagttttctcccgaagccgacgcagccatgagcgagatgacaggtaacaccgccctgttggcacaggtaaccagctacagccctaccggcctgccgttgatccagctgtggagcgtggtcggggatgaggtcgtgctcatcaacaggtctctggtggagcgcgggcttgcccagtgggtggactcttactacacatctttatag

SEQ ID NO: 138680 - DNA, 2838 bp, Artificial Sequence
  derived and/or modified sequence
atgggggctttaggggtcagtggctcctcgagccctggcggatgtccaggttggcggaggttgccggcggcagtaaacaccaacccagtcgattttgcacctggagtaattacacaagccagtaggatggcgatccaatttagaagtctatttccactagccctgcccggcatgttggctcttctgggctggtggtggttcttcagccggaaaaagggccacgtttcatctcacgatgaacagcaggtcgaagctggggcagtacagttacgtgccgaccccgcgataaaggagcctcttccagttgaggatgtatgccctaaggtagtgagcacgcccccgtccgtgaccgaacctccggaaaaggagctctccactgtgagcaagcttcccgcggagccccctgcactcttgcagacacacccaccctgccgcaggagcgaatcttccggaatactgccaaatacgaccgatatgagactccgcccaggcacacgcagggacgacagtaccaagctagagctagccctaacaggcggtgaagccaagtccatacctctcgagtgccccctgtcttcccccaaaggagtcctgttttcctcgaagagtgccgaagtgtgtaagcaggactcgccgttctcgcgggtaccgcgtaaggtgcagcccggttatcctgtggtacctgccgagaagaggagcagcggtgagagagctagagagacaggaggagctgagggtactggtgatgctgtgcttggagaaaaggtcctcgaggaggcactgctgagtcgcgagcacgttcttgaacttgagaacagcaaagggcctagcctggccagcctagaaggcgaggaagacaagggtaaaagttcaagttctcaagtggtgggacctgtccaggaggaggagtacgtggctgagaaacttcctagccgctttatcgagagtgcccataccgagctcgccaaagacgatgcagcccctgcccctcctgtggctgacgccaaagctcaggataggggagtcgaaggagagctcgggaatgaggaatccctggatcggaatgaggagggactcgatagaaatgaggaaggcttagaccggaacgaggaaagcctggacaggaatgaggaaggcttagaccgtaacgaggaaatcaaacgcgcagcgtttcagattatcagccaagtcatttcagaggctacagaacaagtgctcgcgacgacagtaggcaaagtggctggcagagtttgtcaggctagtcaactccagggacagaaggaggaaagctgcgtccctgtgcatcagaaaactgttctcgggcctgacactgcagaacctgccactgcagaagccgccgtggcgccccccgatgcggggctgccacttccagggctgcctgctgagggcagcccccccccaaaaacttatgtttcttgtcttaagagtttgttgtcttcccctaccaaggattctaagcctaatatctctgcacaccacatcagcttggcgagttgtctcgcgctcacaactccttccgaggaattgcccgatcgggcgggcattctcgtggaggatgccacctgcgtgacctgcatgtcagattccagccagtccgtgccccttgtggcatccccaggtcattgttccgacagcttttccacgtccggactggaggactcatgtacggagacttcctcctcgccccgtgacaaagcaatcacaccaccactgccagaatcaacagtgcccttttcaaatggcgtccttaagggtgagctcagcgatctgggtgctgaagacggttggacaatggacgcagaagctgatcacagcgggggcagcgatcggaacagcatggatagtgtggattcttgttgttccctaaaaaaaaccgaatcatttcagaatgcacaggccgggtcaaatcccaaaaaagtcgacctcatcatctgggagatagaagttcctaagcacctagtaggtcgcctcatcggtaaacagggacggtatgtctcattcctgaaacagacaagcggggcgaagatctatatcagcaccctgccatacacacagagtgtccagatctgtcatatcgagggctctcagcaccacgttgataaagcgctcaaccttattggcaaaaagtttaaggaactgaatctcacgaatatctacgcgccccccctcccatcattagcccttccctctctccccatgacaagttggctgatgcttccggacgggattacagtagaggtgatcgtggtaaatcaggtgaacgcaggacaccttttcgtgcagcagcatactcatcctacattccacgccctcaggagcctcgatcaacaaatgtatctgtgctattcccaaccaggcataccaaccctgccaacacccgtcgagataacggtgatctgtgctgccccaggagctgacggagcttggtggagagcccaagtggtcgcctcttatgaggagacgaacgaggtggagatacgatatgtcgactatggcgggtacaagcgcgttaaggtggacgtcctgcggcagatccgcagtgacttcgtcactctcccgttccaaggtgctgaggtgctgctggactctgtgatgcccctgagtgatgatgatcagttcagtcctgaggccgatgccgctatgtcggagatgactggcaataccgctcttctagcacaggttacctcttattcccccacagggctgccgctcatccagctgtggagcgtggttggagacgaggtcgtgctgattaatcgcagtctggtcgagcgcggactggctcagtgggttgacagctactacacttctctctag

SEQ ID NO: 138681 - DNA, 2712 bp, Artificial Sequence
  derived and/or modified sequence
atggccatccagttccgcagcctcttccccctggctctgcctggaatgctggcgctgctaggctggtggtggttcttctccaggaagaaggggcacgttagctctcatgacgagcagcaggttgaggcaggcgcagtccaactccgtgcagaccctgccattaaggagcctctgcctgtggaagacgtgtgtcctaaggttgtaagtacacctccatccgtgacagagccgcccgaaaaagagttgagtaccgtgtcaaaactgcctgctgagcccccagctctgctacagacacatccaccatgccgccggtctgagagctcaggcattctgcctaacactaccgacatgaggctgcgacctggcacacgacgcgatgattcgactaaactcgagttggccctcaccgggggtgaagcgaaaagcatcccactggagtgccccctttcaagtcctaagggtgtcctattttcaagcaaatcagcagaggtttgtaagcaggattcccctttttctcgagtgcctcgaaaggttcaacctggctaccccgtggtacccgctgaaaaacgcagttccggcgagagagcaagagaaaccggtggtgctgaaggaaccggagacgctgtcctgggcgaaaaagtgttggaggaggctctgttaagccgtgaacacgtgctcgagttagagaattccaagggaccgagcctggccagccttgaaggggaagaggacaaaggtaagagtagttccagtcaagtcgttggtccagtgcaggaagaagaatacgtggctgaaaagctgccatcgcgctttatagagagcgcccacacagagctcgcaaaagatgatgctgctccagccccaccggtcgccgatgctaaagcccaggatagaggggttgagggggaactgggcaatgaagagtcactggacaggaatgaggaaggcctggacagaaacgaggagggactggaccgcaatgaagaatcacttgataggaatgaggaggggcttgataggaacgaagagataaagagggcggcatttcagatcataagccaggtgatcagtgaggctactgagcaggttctggctacgaccgttgggaaagttgcgggccgcgtgtgtcaggcctcccagttacagggacagaaggaggagagctgcgtgcctgttcatcagaagactgtcctgggccccgacactgcggagcctgccaccgccgaggcggccgtcgctccgccagatgctggactaccactgcctggtctgcctgccgagggctcgcctcctccaaaaacatatgtcagttgtctgaaatcactgctgtcttcaccgactaaggattccaaacccaacatctctgcccatcacattagcctcgccagttgcttagccctgacaactccatccgaagaactgcccgaccgcgctggcattctggtggaggatgccacttgtgtgacgtgcatgagtgatagttcccagagcgtgccactcgtggcttctcctggacactgttccgactcattcagcactagtggactggaggatagctgcaccgagaccagctcttctcctagagacaaagccatcacacctccactccccgaaagtacggtgcccttctcgaatggcgtcctgaagggtgagttgtccgacctaggcgctgaggacggctggaccatggacgccgaagccgatcatagtgggggatctgaccgaaattctatggattcggtcgattcttgttgctccctcaagaaaactgaatcattccaaaacgcccaggcgggcagcaatccgaaaaaggtggaccttatcatttgggaaatcgaggtgcccaagcatctggtcgggcgccttattggcaagcagggtcggtacgtgtcttttctgaaacagacgtcgggtgccaagatttatatttcaactctgccatatacccagtcggtgcagatatgccacatcgagggatcccaacaccatgtggataaggctttaaatctgatcggaaagaagttcaaggagctaaatctaaccaatatttatgcccctcccctgcctagcctggccctccccagtctacccatgacttcatggctcatgctgcccgatgggattacagttgaggtgattgtcgtgaaccaggtaaacgctggacacttgtttgtccagcaacatacccatcccacgtttcacgccctgaggtcattggaccagcagatgtacctatgctactcacaacctggcatcccaacgcttccgacgccagtggaaattacggttatctgcgccgcccccggagccgacggtgcctggtggagagctcaggtcgttgcatcttacgaagagacaaatgaagtcgaaatcaggtacgtcgattatggcggctataagcgggtgaaggtcgacgtccttagacagatacgaagtgatttcgtaaccctgccattccagggtgctgaggtcctgctggacagcgtcatgccactgtcggatgacgatcagttcagtcccgaggccgatgctgccatgagcgagatgaccgggaacacagccctcttggctcaggtcaccagttattcccccacaggtcttcctttgatacagctctggagcgtcgtgggggacgaggttgttctgattaatcgtagcctggtagagagagggctggctcagtgggtggacagctattataccagcctctag

SEQ ID NO: 138682 - DNA, 2712 bp, Artificial Sequence
  derived and/or modified sequence
atggccatccagttccgcagcctcttccccctggccctgcccggcatgctggccctgctgggctggtggtggttcttcagcaggaagaagggccacgtgagcagccatgatgagcagcaggtggaggccggggctgtgcagctgcgggctgaccctgccatcaaggagcccctgcctgtggaggatgtgtgccccaaggtggtgtccaccccaccttctgtgacagagcccccagagaaggagctgagcacagtgtccaagctgcctgctgagcccccagccctgctgcagacccaccccccctgcagaagaagtgagagcagcggcatcctgcccaacaccacagacatgaggctgcggcccggcaccaggagagatgacagcaccaagctggagctggccctgaccggcggggaggccaagagcatccccctggagtgccccctgagcagccccaagggcgtgctcttcagcagcaagtctgctgaggtgtgcaagcaggacagccccttcagccgggtgcccaggaaggtgcagcccggctaccctgtggtgcctgctgagaagaggagcagcggggagcgggcccgggagactggaggagctgagggcactggagatgctgtgctgggggagaaggtgctggaggaggccctgctgagccgggagcacgtgctggagctggagaacagcaagggccccagcctggccagcctggagggggaggaggacaagggcaagagcagcagcagccaggtggtgggccctgtgcaggaggaggagtatgtggccgagaagctgcccagccgcttcatcgagagcgcccacacagagctggccaaggatgatgctgccccagcccctcctgtggctgatgccaaggcccaggacagaggagtggagggggagctgggcaatgaggagagcctggacagaaatgaggagggcctggacagaaatgaggagggcctggacagaaatgaggagagcctggacagaaatgaggagggcctggacagaaatgaggagatcaagagagctgccttccagatcatcagccaggtgatcagcgaggccacagagcaggtgctggccaccaccgtgggcaaggtggccggccgggtgtgccaggccagccagctgcagggccagaaggaggagagctgtgtgcctgtgcaccagaagacagtgctgggccctgacacagctgagcccgccacagctgaggccgctgtggcccccccagatgctggcctgcccctgcccggcctgcctgctgagggcagccccccacccaagacctacgtgtcctgcctgaagagcctgctgagcagccccaccaaggacagcaagcccaacatcagcgcccaccacatcagcctggccagctgcctggccctgaccaccccatctgaggagctgcctgaccgggccggcatcctggtggaggatgccacctgtgtgacctgcatgtctgacagcagccagagcgtgcccctggtggccagccctggccactgcagcgacagcttcagcaccagcggcctggaggacagctgcacagagaccagcagcagcccccgggacaaggccatcaccccacccctgcctgagagcacagtgcccttcagcaatggagtgctgaagggggagctgagtgacctgggcgcagaagatggctggaccatggatgctgaggccgaccacagcggcggcagtgacagaaattccatggacagcgtggacagctgctgcagcctgaagaagacagagagcttccagaatgcccaggccggcagcaaccccaagaaggtggacctgatcatctgggagattgaggtgcccaagcacctggtgggccgcctgattggcaagcagggccgctacgtgtccttcctgaagcagaccagcggggccaagatctacatcagcaccctgccctacacccagagcgtgcagatctgccacatcgagggcagccagcaccacgtggacaaggccctgaacctgattggcaagaagttcaaggagctgaacctgaccaacatctatgccccacccctgcccagcctggccctgcccagcctgcccatgacctcctggctgatgctgcctgatggcatcaccgtggaggtgattgtggtgaaccaggtgaatgccggccacctgtttgtgcagcagcacacccaccccaccttccacgccctgcggagcctggaccagcagatgtacctgtgctacagccagcccggcatccccaccctgcccacccctgtggagatcaccgtcatctgtgccgcccctggagcagatggagcctggtggagggcccaggtggtggccagctatgaggagaccaatgaggtggagatccgctacgtggactatggaggctacaagagggtgaaggtggatgtgctgcggcagatccgcagtgactttgtgaccctgcccttccagggcgctgaggtgctgctggacagcgtgatgcccctgagtgatgatgaccagttcagccctgaggctgatgctgccatgtctgagatgacaggcaacacagccctgctggcccaggtgaccagctacagccccaccggcctgcccctcatccagctgtggagcgtggtgggagatgaggtggtgctgatcaacagaagcctggtggagcggggcctggcccagtgggtggacagctactacaccagcctgtag

SEQ ID NO: 138683 - DNA, 2838 bp, Artificial Sequence
  derived and/or modified sequence
atgggcgccctgggcgtgtctggcagcagcagccctgggggctgccccggctggaggcggctgcctgctgctgtgaacaccaaccctgtggactttgcccctggggtcatcacccaggccagcaggatggccatccagttccgcagcctcttccccctggccctgcccggcatgctggccctgctgggctggtggtggttcttcagcaggaagaagggccacgtgagcagccatgatgagcagcaggtggaggccggggctgtgcagctgcgggctgaccctgccatcaaggagcccctgcctgtggaggatgtgtgccccaaggtggtgtccaccccaccttctgtgacagagcccccagagaaggagctgagcacagtgtccaagctgcctgctgagcccccagccctgctgcagacccaccccccctgcagaagaagtgagagcagcggcatcctgcccaacaccacagacatgaggctgcggcccggcaccaggagagatgacagcaccaagctggagctggccctgaccggcggggaggccaagagcatccccctggagtgccccctgagcagccccaagggcgtgctcttcagcagcaagtctgctgaggtgtgcaagcaggacagccccttcagccgggtgcccaggaaggtgcagcccggctaccctgtggtgcctgctgagaagaggagcagcggggagcgggcccgggagactggaggagctgagggcactggagatgctgtgctgggggagaaggtgctggaggaggccctgctgagccgggagcacgtgctggagctggagaacagcaagggccccagcctggccagcctggagggggaggaggacaagggcaagagcagcagcagccaggtggtgggccctgtgcaggaggaggagtatgtggccgagaagctgcccagccgcttcatcgagagcgcccacacagagctggccaaggatgatgctgccccagcccctcctgtggctgatgccaaggcccaggacagaggagtggagggggagctgggcaatgaggagagcctggacagaaatgaggagggcctggacagaaatgaggagggcctggacagaaatgaggagagcctggacagaaatgaggagggcctggacagaaatgaggagatcaagagagctgccttccagatcatcagccaggtgatcagcgaggccacagagcaggtgctggccaccaccgtgggcaaggtggccggccgggtgtgccaggccagccagctgcagggccagaaggaggagagctgtgtgcctgtgcaccagaagacagtgctgggccctgacacagctgagcccgccacagctgaggccgctgtggcccccccagatgctggcctgcccctgcccggcctgcctgctgagggcagccccccacccaagacctacgtgtcctgcctgaagagcctgctgagcagccccaccaaggacagcaagcccaacatcagcgcccaccacatcagcctggccagctgcctggccctgaccaccccatctgaggagctgcctgaccgggccggcatcctggtggaggatgccacctgtgtgacctgcatgtctgacagcagccagagcgtgcccctggtggccagccctggccactgcagcgacagcttcagcaccagcggcctggaggacagctgcacagagaccagcagcagcccccgggacaaggccatcaccccacccctgcctgagagcacagtgcccttcagcaatggagtgctgaagggggagctgagtgacctgggcgcagaagatggctggaccatggatgctgaggccgaccacagcggcggcagtgacagaaattccatggacagcgtggacagctgctgcagcctgaagaagacagagagcttccagaatgcccaggccggcagcaaccccaagaaggtggacctgatcatctgggagattgaggtgcccaagcacctggtgggccgcctgattggcaagcagggccgctacgtgtccttcctgaagcagaccagcggggccaagatctacatcagcaccctgccctacacccagagcgtgcagatctgccacatcgagggcagccagcaccacgtggacaaggccctgaacctgattggcaagaagttcaaggagctgaacctgaccaacatctatgccccacccctgcccagcctggccctgcccagcctgcccatgacctcctggctgatgctgcctgatggcatcaccgtggaggtgattgtggtgaaccaggtgaatgccggccacctgtttgtgcagcagcacacccaccccaccttccacgccctgcggagcctggaccagcagatgtacctgtgctacagccagcccggcatccccaccctgcccacccctgtggagatcaccgtcatctgtgccgcccctggagcagatggagcctggtggagggcccaggtggtggccagctatgaggagaccaatgaggtggagatccgctacgtggactatggaggctacaagagggtgaaggtggatgtgctgcggcagatccgcagtgactttgtgaccctgcccttccagggcgctgaggtgctgctggacagcgtgatgcccctgagtgatgatgaccagttcagccctgaggctgatgctgccatgtctgagatgacaggcaacacagccctgctggcccaggtgaccagctacagccccaccggcctgcccctcatccagctgtggagcgtggtgggagatgaggtggtgctgatcaacagaagcctggtggagcggggcctggcccagtgggtggacagctactacaccagcctgtag

SEQ ID NO: 138684 - DNA, 2712 bp, Artificial Sequence
  derived and/or modified sequence
atggccatccagttccggagcctgttccccctggccctgcccggcatgctcgctctcctgggctggtggtggttcttctcaagaaagaagggacacgtaagctcacacgatgagcagcaagtagaagccggggccgtgcagctgagagcagatccggctatcaaggaaccactgcctgtggaggacgtgtgtcctaaggtcgtttccacaccaccgtcggttaccgaacctcccgagaaggagctctcgaccgtgagtaaattgcccgccgagccgccagcccttctgcaaacccaccccccctgccggcgatctgaaagctctggcatactacctaataccactgacatgagactgagacctggcacacgtcgtgatgattccactaaactagaactggcacttacagggggggaggccaaaagcattccgctcgaatgcccattgtcaagtccaaagggcgttctcttcagtagtaagagcgcagaggtgtgtaagcaagatagccccttcagcagggtccccaggaaggttcaacccggatatcctgtggtgcctgccgagaagaggagcagtggcgaacgagccagggagaccggcggcgcggaagggacaggggatgccgtgttgggagagaaggtgctggaggaagccctactgtcccgagagcacgtcctggagcttgaaaatagtaaggggccatctctggccagcctggagggggaggaagacaaaggcaagagctcttcaagtcaggtggtggggcccgtgcaggaggaggagtacgtggctgaaaaacttccatcgaggttcattgaatcagcccataccgagctcgccaaagatgacgccgccccggcgccaccagtagctgacgcaaaggcccaggataggggagttgaaggcgaactgggcaatgaagagagcctcgaccggaatgaggagggactggatagaaatgaagagggactagaccgaaacgaggagtccctcgaccgcaatgaggaagggctcgatcgcaatgaagaaattaagcgagccgctttccaaatcatatctcaggtgatctctgaggctactgaacaagtgctagccactacggtgggaaaagtagctggtcgcgtctgccaagcctcacagctgcagggtcaaaaggaggagagctgcgtgcccgtgcaccaaaagactgtgcttggacctgatactgctgagcctgccacggcagaagctgccgttgctcctcccgatgccggcctgccattgccaggtttgccggccgaaggctctccgccacccaagacctacgtcagctgcttaaagtctctcctgtccagtccgaccaaagacagcaagcctaatatttcagctcatcatataagccttgcctcctgtctcgctctgaccacccccagtgaagagctgcctgatagggcagggattctcgtggaagatgccacatgcgtcacatgtatgtcagacagctctcaaagcgtgcctttggtcgcctctcctggacattgctccgacagtttcagcacgtcagggttggaggattcctgcaccgagactagcagctcccctagagataaagccatcaccccccctttgcccgagtcgactgtacctttctccaatggcgtattgaaaggagagttgagtgaccttggtgccgaggacgggtggacaatggacgcggaggcagatcattcgggtggctcagatcgaaattccatggactctgtggacagctgctgctcgctgaagaagaccgaatccttccagaatgctcaggccggctccaaccctaaaaaggtggacctgatcatctgggaaattgaggtcccgaaacatctggtggggcggctgattggcaaacagggtagatatgtttcttttctgaaacaaacctccggcgccaagatctacatatctactctcccttacacccaatcagttcagatttgccatatcgaagggagccagcatcacgtcgacaaagcactcaacctgatcggaaaaaagtttaaggaactgaatttaacgaacatttacgctcccccattgcccagcctcgcgctgccctccctgccaatgaccagttggctaatgctacctgatggcatcactgtagaagtcatcgtcgtaaatcaggtgaacgccggccacctattcgtgcaacaacacactcaccccacttttcacgccctgcggtctcttgaccaacagatgtatctttgttatagccagcctggtatcccaactctaccaactccggtggagatcacagtcatctgcgcagctcctggggccgatggggcctggtggcgggctcaggtggtggcctcttacgaagagaccaatgaggtggaaattagatacgtggactacgggggttataaacgggtgaaggtggatgtgctgcgccagatccgctccgactttgtcacccttccttttcagggtgcagaggtgctgctggatagcgttatgcctctgagtgacgatgatcagttctcacctgaagctgatgccgccatgtccgaaatgacggggaacacagcactgcttgcccaggtgactagctatagcccaacagggttacccttaatccagctgtggagcgtcgtgggcgatgaggtcgtgctgatcaataggtcattggtggagagagggctggcacagtgggtggattcttattacacctcactgtag

SEQ ID NO: 138685 - DNA, 2838 bp, Artificial Sequence
  derived and/or modified sequence
atgggcgccctgggcgtgagcggcagcagcagccccggcggctgcccagggtggagacgactacctgcagctgtcaataccaaccctgtggacttcgctcctggcgtaatcacacaggcttcacggatggcgatccagtttagaagcctgttccccctcgccctgcctggtatgctcgcccttctgggatggtggtggttttttagtcgcaaaaagggacacgttagcagtcatgatgagcagcaagtggaggcaggagccgtccaactaagagcagatcctgctataaaagagcccctgcctgtggaagatgtctgccccaaagtggtctcaaccccccccagcgtcacggaaccccctgaaaaagagctttctactgtaagcaagctgcctgctgaaccccccgctcttctgcagacccaccctccttgccgacgctcagagagctccgggatcttacctaacactacggatatgcgcttacggcctggaactcggagagatgatagcacaaaattggaattggctctcacaggaggcgaagctaagtcaattcctcttgagtgccctctgtcatctcccaaaggggttctgttcagttccaagagcgctgaggtgtgcaagcaggacagcccgttctctcgggtccccagaaaggtgcaacctgggtacccagtcgtccccgcggagaaacggtcatccggggagagggctcgagaaactggaggcgcagaagggacaggagacgctgtgctgggcgaaaaagtactagaggaggccctgctgtcccgcgaacacgtcttggagctcgaaaatagtaaggggccttccctggcaagcctggaaggggaagaggacaaggggaaatcgtcgtcctcccaggtcgtgggaccagtccaggaggaggagtacgtagctgaaaaactgccctcccggttcattgaaagcgcgcacaccgaactagctaaggatgatgctgcccctgctccaccagtggcggacgccaaagcccaagataggggggttgagggagagctggggaacgaggagtcgctcgacaggaatgaggaaggcctagaccgaaatgaggaggggttggatcgcaacgaagagtctctcgatcggaatgaagaaggactcgacaggaacgaagagatcaaacgggcggcattccagattatttcgcaggtcatatccgaggccaccgaacaggtcctggcgactacagtgggtaaagtggccggccgcgtttgccaggcaagtcagttacagggacagaaagaagagtcctgtgtgcctgttcatcagaagacagtattgggccctgacactgcggaacccgctaccgcagaggctgcggtagccccaccagatgccgggctcccattgcccgggttaccggccgaaggctcccctccacccaagacatacgtcagctgtttaaagtccctgctgagttcccccacaaaggattccaagccaaatatctctgcccaccacatctctctggccagctgtctggcactaactaccccttcggaagaactgcccgaccgcgctggcattctggttgaggacgccacatgcgtgacgtgtatgtcggactctagccaaagcgtgccactcgtagcctctcccggacattgctcggattcctttagcactagcggacttgaggacagctgtactgaaacaagctccagccccagagataaagcaattacaccacctctcccagaaagtacagtcccattttcgaacggcgtgttaaagggggagctgtccgatctgggcgccgaggacggctggaccatggacgctgaggctgaccacagtggggggtctgatagaaatagcatggacagcgtcgattcatgttgttcccttaaaaagacggagtcctttcaaaatgctcaggctggaagtaaccccaaaaaagtggatctgattatatgggaaatagaagtgcccaaacaccttgtcggaaggcttattggcaagcagggacgatatgtgtcttttctcaagcaaacatcaggggccaagatttacatctccacactgccttatacacagtcagtccagatttgtcacattgagggctcgcagcaccatgttgataaggctctgaatctaataggtaaaaagtttaaggagttaaacctcactaacatttatgcccctccactgccctcccttgccctgcctagtttacccatgacatcttggctgatgctacccgacgggattactgttgaggttatcgtagttaaccaagtaaacgcgggccatcttttcgtacagcagcacacccaccctactttccacgcactgcggtccctggatcaacaaatgtacctctgctacagccaacccggtatcccaaccctgcctacacctgtcgaaataacggtaatttgcgctgcacctggagccgacggcgcgtggtggcgcgctcaggtagtggctagctatgaggaaacaaacgaagttgagatcagatacgtcgactatggggggtacaaacgcgtcaaggtggatgtgttaaggcaaatccgcagcgattttgtgaccctcccctttcagggtgcagaggtactgctggattctgttatgcccctctcagacgacgaccagttctcacctgaagcagacgcggccatgtctgaaatgactggtaacaccgccctcctggcccaggttacctcatactcccctacgggcctgccattgattcagctctggtcagttgtgggtgatgaagttgttctcattaatcgctctcttgtcgagagggggttagctcagtgggtggacagttattacacctccctatag

SEQ ID NO: 138686 - DNA, 2712 bp, Artificial Sequence
  derived and/or modified sequence
atggccatccagttccggagcctgttccccctggccctgcccggcatgctcgcgcttctgggatggtggtggtttttctcccggaagaaaggacacgtgagttctcatgacgagcagcaggtcgaggccggcgccgtccagcttcgggcagatccagctatcaaggagcctttgcctgtggaggacgtgtgcccaaaggttgtcagtactccaccttctgtgactgagcccccggagaaggagctgagtaccgtgtccaagctgcccgcagagcccccagctctattgcaaactcaccccccatgccgacgctcagagtccagcggcatactgccgaataccacagatatgcgccttagaccagggaccaggagagatgattctacaaaattagagctcgctttgaccggcggcgaggcaaaaagtatcccacttgagtgccccttgtcgtctcctaaaggcgtcctgttcagtagtaagtctgccgaggtgtgtaaacaagatagcccctttagtcgagtcccacggaaagtgcagccaggataccccgtcgtcccggctgagaagagatcatctggagaaagggctcgggaaaccggaggcgccgaaggcactggcgacgctgtgcttggtgaaaaagtgctggaggaagccctcctcagcagagagcatgtgctcgagcttgagaactcaaaaggcccttcactggcttcccttgaaggagaggaggacaagggcaagtcatcctcctctcaggtggtgggacccgttcaggaggaggaatacgttgccgagaaattaccaagtagatttattgagtctgcacacactgagctggctaaggatgacgcagcccctgcaccacccgtcgcggacgccaaggcccaagataggggcgtggaaggggagctggggaatgaagaatctttagatcgcaatgaagaaggcctggaccgcaacgaggaaggactggatcggaatgaagagtctctggaccgaaacgaggagggtttagaccggaacgaggaaattaagcgggcagctttccagatcatctcacaggtgatatcagaagccactgaacaggtgttggccactacagtaggcaaagtagccggccgggtgtgccaagcttcacagctgcagggtcaaaaggaggaaagctgtgtcccggtgcatcagaaaacagttctcggacctgacacggcagagcctgctacagccgaagcggccgttgctcctcctgatgctggcctgcccttgcccgggctgcctgctgaaggcagtccaccaccgaagacatatgtctcctgtctgaagtccctcctttcttctcctaccaaggattccaagcctaacattagtgctcatcacatcagtctggcgagctgtcttgccctcactacaccctctgaggagctgcctgaccgcgcaggtatcctcgtagaagatgcgacctgcgtcacttgtatgagcgattcttcccagagcgtgcctctggtggcatcgccaggccactgctccgactctttctcgaccagcggtctcgaggattcatgcacagagaccagctcctcccctagggataaagcaattacgcctccacttccggaatctaccgtcccttttagcaacggtgtgttaaagggcgaactgagcgacttgggcgcagaggacggttggaccatggacgccgaagcagaccactcaggagggagcgatagaaacagtatggacagtgttgacagctgctgttcactgaagaaaactgagtctttccagaacgcccaggcgggaagcaatcctaagaaggtcgacctgatcatatgggaaatcgaggtaccaaagcacttggttggtcggttgattggcaaacagggtcggtatgtgtccttcctcaagcagacctccggtgccaagatatatattagcacactgccctatacacagagcgtgcagatctgccacatagaagggagtcagcaccatgtcgacaaagccctcaatctgatcggcaagaagttcaaggagctcaatcttactaatatttatgccccaccacttccgagcctggcactccctagtctgcccatgactagttggttgatgctacctgacggcattacagtcgaggtgatagtggtcaaccaggtgaatgctggacacctgtttgtgcagcagcatactcatcctactttccacgctctgcggtctttagatcagcagatgtatctctgctattctcaacccggcattccgacactccccacgcccgtggagatcacagtgatttgtgcggctcccggcgccgacggagcctggtggcgggcacaggttgtggctagctatgaggagactaacgaagtagagataaggtacgtcgattacggtggatacaagcgagttaaggttgacgtgttacggcaaatacgctctgattttgtaacgctgccatttcagggggctgaggtgttgctggactccgtcatgccgctctctgacgatgaccagttctctcccgaggcggatgcagccatgtctgaaatgacaggaaacacagccctcttggcccaggtcaccagctactcacctacagggttacccctgattcaactatggtctgtggtcggggacgaagtggtcctcatcaaccggagccttgtggaaagaggactagctcagtgggtggacagctactatacatcactgtag

SEQ ID NO: 138687 - DNA, 2712 bp, Artificial Sequence
  derived and/or modified sequence
atggccatccagttcagatcccttttcccacttgcactgccagggatgctggcattactgggctggtggtggtttttttcccgcaaaaagggccacgtcagctctcatgacgaacagcaggttgaagcaggggctgtgcaactaagagcggatccagccataaaggaacctctccctgtcgaggatgtttgtcccaaggtcgtgagcacaccgccatctgtgacagaaccccctgagaaggaactctcgaccgtttccaaacttccagccgaacccccagcactgctgcagacgcaccccccttgtcggaggagcgagtcgagtggcatcctccctaatacaactgatatgcggctgcggcctggcacaaggcgcgacgacagtactaagttggagctggctctgactggaggggaggctaagagcattccactggaatgtcctctgagtagccccaagggcgttttgttcagctcaaaatcagccgaagtgtgcaagcaggattccccattctcgcgcgttcctcgcaaggtccagccaggctaccccgtggtgccagcagaaaagcgtagcagcggcgagagggctcgggagaccggaggagctgaggggacgggagacgcagtgctcggcgaaaaggtgctggaagaagctttactatctagagagcatgtgcttgaattggagaactcaaagggaccatcgctcgcctccctcgaaggagaagaagacaagggaaagagttccagctcccaggtcgtgggcccagtgcaggaagaggagtacgttgctgagaaattaccttcaagattcatcgagagtgcccacacagaactagcaaaagacgacgccgctcctgcccctcctgtggccgacgccaaagctcaagatagaggtgtggagggtgaactgggcaacgaggaatctctcgaccgaaacgaggagggactggatagaaatgaagaaggcctggatcgcaatgaggaatcattagaccgtaatgaggagggattggatagaaacgaagagattaaacgcgcagccttccaaattatctctcaagtgatctccgaagccaccgaacaggtcttggccactacagtaggcaaggttgccggaagagtttgtcaggccagccaactgcaaggacagaaggaagagagttgtgttcctgtccaccagaaaaccgttctgggaccagatacggccgaacccgctacagctgaagcagcggtcgccccaccggatgctgggctgcctctgcccggtttgcctgctgagggttctcctccgcctaaaacatacgtatcttgtctgaaatccttactgagttcccctaccaaagacagtaaaccaaacatatctgcccaccacatttcacttgcctcgtgccttgctctgaccaccccgtccgaagagctaccggatcgagctggcatcttagtggaggatgctacttgtgtgacatgtatgagcgacagtagccagtccgtgcccctcgtcgcttctcctggccactgctccgatagttttagcactagcgggttggaggattcctgcacggaaacctcttcgagcccccgtgataaggcgatcacacccccactgcctgaatcaactgtgcccttctcaaatggggtgttaaaaggagagctgtctgacttgggggcagaggacggttggacgatggatgcggaagccgaccacagcggcggtagtgaccggaactcaatggacagcgtggatagttgttgcagtttgaagaagactgaatccttccagaacgcgcaggccggttcaaaccctaagaaagtagatttgataatttgggagatcgaggtccccaagcaccttgttgggaggctgattgggaaacaaggacgctacgtgtcatttttgaagcagacaagcggcgctaagatctatatctctactctgccctacacccagtcagtacaaatctgtcatatcgaaggatctcagcaccacgtggataaagctttgaatttgatcggtaagaaatttaaagaactcaacctaacaaatatttatgcccctcctctgccaagtctggccctcccctctctgcccatgacctcttggttgatgctgccagatggaatcacagtggaggtgattgttgttaaccaagtgaacgccggtcatctgtttgtgcagcagcacactcatcccactttccacgccctgcgcagcctcgaccagcagatgtacctgtgttactcccaacccggaattcccacactcccaaccccagtagaaatcacagtgatttgcgccgcaccaggcgctgacggagcctggtggcgcgcacaggtcgtagcttcctacgaggagacgaatgaggtagagattaggtacgtcgactatggcggatataaacgggtcaaggtggacgtgctgaggcagatccgaagcgattttgtgactctgccattccaaggtgcagaggtcctgctggactctgtgatgcccctttccgatgacgaccaattcagccccgaggccgacgccgctatgagcgaaatgaccggcaatacagctctcttggctcaggtcacaagctattcccctactggtctgccactgatccagctgtggtcagtcgttggcgacgaggttgtgctcattaatagaagtctggtagaacggggactggctcaatgggtggattcctactacacctcattgtag

SEQ ID NO: 138688 - DNA, 2838 bp, Artificial Sequence
  derived and/or modified sequence
atgggggctctaggagtatctggaagctcaagccctggaggctgcccaggctggaggcggctccccgcagctgtaaataccaaccccgttgacttcgcgccaggtgttatcacgcaggcttcccgcatggctatacagttccgctcgctgttccctctcgccctccccggaatgcttgcactgctaggttggtggtggttcttcagtcgcaagaaaggccacgtgtcctcccatgacgagcagcaggtggaggccggagccgtgcaactgcgggctgaccccgctattaaggagcccctcccggtggaggacgtttgccccaaagtcgttagtacccctccctctgtaaccgaacccccagaaaaggagctgagcaccgtgtccaagctgcccgcagagccccctgctctgctgcagacccatcccccttgtaggagaagcgagtcaagcggcatacttcccaacaccactgatatgaggctgcgccctggcacaagacgtgacgactccacgaaactggaattagccctgaccggaggcgaagctaaatcaatccccttggagtgtcccctttccagtccgaagggagtgttgtttagctctaagtcagctgaggtatgcaagcaggatagcccattctcacgagtcccccgtaaggtacaacccggatacccagtcgtgcctgccgaaaaaagatcctccggagaacgtgcacgggagactggtggcgctgagggtacaggggacgctgtgctgggggagaaggtcctggaggaggcacttctgtctcgcgagcacgtcctagaactagagaactcaaaggggccttcccttgcctcactagaaggcgaagaggataaaggaaagagcagcagcagccaggtcgtgggcccagtccaagaggaggagtacgtcgctgaaaaacttccatcaagattcattgaatcagcccatacagaactggccaaagacgatgcggctccggcaccccctgttgcagacgctaaggcgcaggataggggggtcgaaggcgagctcgggaatgaggagtccttggacaggaacgaagaagggctggaccggaacgaggaggggttagaccgaaacgaggagtcgcttgaccggaacgaagagggtctggatagaaacgaagaaatcaaacgagctgcgttccagatcatcagccaggttatatcagaagcaactgagcaggtgctggccacaacagttggtaaggttgcgggaagggtgtgccaggcatctcagctacagggacagaaggaggagtcatgtgtgcctgtacatcagaaaactgtactgggacctgacaccgccgagcccgctaccgccgaagcagctgtcgcccctccagacgctggacttccactccctggcttgcctgcagagggatcgccacctccaaagacttacgtttcttgccttaagagccttctaagctctccaactaaggactcaaagcctaatattagtgctcaccacatcagtctggcatcatgtcttgctcttacgacccccagcgaggaactgcccgacagggcaggaatattagtggaagatgctacatgtgtcacctgtatgtctgactctagccaaagcgttccgctggtcgctagccccggacattgttccgattcctttagcacctcagggctggaagacagttgcacggaaactagtagctctcccagggacaaggctatcacaccacctctgccggaatcgaccgtgcccttttcaaacggggttcttaagggagagctgagcgacctcggcgcagaggatgggtggacaatggacgccgaggccgaccacagtgggggttctgataggaactctatggactcggttgatagctgttgctcgctcaagaagacggaatcctttcaaaacgctcaggcaggcagtaaccccaaaaaggttgatttgattatctgggaaatcgaggttccgaaacatcttgtgggaagactgatcgggaagcaggggagatacgtttcctttttgaaacaaacctccggtgccaagatatacatcagtactctgccatatacccaatcagtgcagatatgccacatcgagggaagccagcaccatgtcgacaaggcgttgaatttaatcggcaagaagttcaaggagctgaacttaactaacatctatgcacctcccctgccatctctggcacttccatctctgccaatgaccagttggctgatgctacccgacggcatcaccgtcgaagtgatagtcgtaaatcaggtaaatgctggacacttgtttgtacagcaacacactcaccctaccttccacgcactgcgctccctcgaccagcaaatgtatctctgttatagccagcctggcatccctacactaccaacccctgtggagattacagtcatttgcgccgcaccaggagctgacggggcttggtggagggcacaggttgtcgcctcgtacgaggaaacaaatgaagtggagatccggtacgtagactacggtgggtacaagcgagtcaaagtcgacgtgcttcggcagatccgcagcgacttcgtcactctaccctttcaaggtgctgaagtcctgctcgactctgtgatgccgctatctgatgatgaccaattctcgcctgaagcggacgcagcaatgagtgagatgacaggcaataccgcacttctcgcccaggtaacgtcgtactcacctaccggcctccccttgatccagctgtggtcagtggtgggagatgaagtggtcctgatcaacaggagccttgtcgagcgcggactggcccaatgggtggactcctactacacctccctctag

SEQ ID NO: 138689 - DNA, 2712 bp, Artificial Sequence
  derived and/or modified sequence
atggccatacagttcagaagcctctttcccttggcactcccaggtatgctggcgcttttgggttggtggtggttcttctccagaaaaaagggacatgtgagtagtcacgacgaacagcaggtcgaggctggggctgtgcagttgcgagcagatccagctatcaaagagccgctccccgtggaagacgtgtgccctaaggtggtttctacgcctccttccgtgaccgagcccccagagaaagaactgtcaactgtatcaaaactccccgctgagccacctgctctgctccaaactcaccctccgtgcagacgtagtgagagcagcgggattttgccaaacacgaccgatatgagattacgaccaggaaccaggcgggatgactctacaaaactggaactggcactcaccggcggtgaggccaaatctattcctctggaatgtcctctgtcctcacctaagggggtcttgttttcctctaaaagcgccgaggtttgtaagcaggattcaccttttagccgggtgcctaggaaagtgcagccaggataccccgtggtccccgctgagaaacggtcaagtggcgagagagccagagagaccggaggagccgagggcacaggggacgccgtccttggtgagaaagtgctagaggaagcactgcttagccgcgagcatgtattggaacttgagaattccaaaggaccttctctggcttccctggaaggggaagaagataagggcaagagcagctccagccaagtcgttggtcccgtgcaggaggaggaatatgtggccgagaaattgcccagccggttcattgagagcgcccataccgagctcgcaaaggacgatgcagcacctgctcccccagttgctgacgctaaggctcaggacagaggagtagagggggagctcggaaacgaggaatctttggacaggaacgaagagggcctagatagaaatgaggagggactcgaccgcaatgaagagagcctggatcgcaacgaggagggacttgacagaaatgaggagatcaagcgcgctgcattccagattattagccaggtaatctctgaggcaactgagcaggtcctggctaccactgtgggcaaagttgccggtcgcgtgtgtcaggcctcgcagctacagggacagaaagaggaatcctgtgtgccagtacaccagaagacagtgttaggcccagacaccgcggagcccgcaacggctgaagccgcagtcgccccaccagatgcaggactgcctctgcctgggctgcccgcagagggctctcctcctcctaagacctatgtgagttgtctgaagagcctactgtccagcccaactaaggatagcaagcccaatatctccgcccaccatatctccttagcctcttgtctggccttaacaacccccagcgaagaacttcctgatcgggcaggcatccttgtcgaggatgctacttgtgttacctgcatgagtgactcttcccagagcgtccccttggtagcgagtccaggtcactgctctgactcctttagcacctcaggcctggaggattcctgtactgaaacgtcatcctcacccagggacaaagctatcaccccaccattgcccgaatcaaccgtgccgttttccaacggtgtgttgaaaggggagctatctgatttgggcgctgaggacggatggaccatggatgccgaagcggaccactccggaggctcggatcgcaacagcatggactctgtggattcgtgttgttctctgaaaaagaccgagtcgttccaaaatgcccaggccggatctaaccccaagaaggtcgacctgataatctgggaaattgaggtgcctaagcaccttgtcggaaggctcattggcaagcaaggaaggtatgtgtcctttctgaaacagacctctggggcaaaaatctacatcagtaccttgccctacacacagagcgttcagatctgtcacatcgaggggagccagcatcatgtggacaaggcactgaatctgatcggaaaaaagttcaaggaattgaatttaactaatatctatgccccacctctgccctccctcgcactgccgagtcttcctatgacatcctggctgatgctgcccgacggaatcaccgtggaagtaattgtggtaaaccaagtcaatgccggacacttgtttgtgcaacagcatacccatcctacttttcatgctttacgaagccttgatcaacagatgtacctctgctattctcagccaggtatccctactctgccaactccagtcgagattactgtcatctgtgccgctcccggagccgacggtgcctggtggcgagcacaggtggttgcttcgtacgaggaaaccaatgaggtggaaattaggtacgttgattacggagggtacaaaagggtgaaggtcgacgtattacgtcaaatacgttccgactttgtcactctgcccttccagggcgctgaagtgctgctcgactcggtgatgcccctgtccgacgatgatcagttctctcccgaagcagatgccgcaatgtctgagatgactgggaacaccgcgttgctggcacaggtgacaagttacagccctaccgggctgccacttatccagctatggagcgtcgtcggcgacgaagtagttctaattaacagatctctagtggaacgcggactggcccagtgggtggattcatattacacatccctctag

SEQ ID NO: 138690 - DNA, 3970 bp, Artificial Sequence
  derived and/or modified sequence
acaagggcgaggggcggggcctgcgtcgcgctgcgggcacgtcgccgcgcgtcttcagtatttaatgtctctgtgttccacccgcctgggctagcacgtgggggagctgcggaagcgcggcgctgcgggccgggccgcggggcacagccgggggccggcggcggcgcgcggactccgcatcccgcaccccgatggtagccgaggagctggtgtaattacttcaagcctccaggatggcaatccagttccgttcgctcttccccttggcattgcctgggatgctggcgctcctcggctggtggtggtttttctctcgtaaaaaaggccatgtcagcagccatgatgagcagcaggtggaggctggtgctgtgcagctgagggctgaccctgccatcaaggaacctctccccgtggaagacgtctgtcccaaagtagtgtccacaccccccagtgtcacagagcctccagaaaaggaactgtccaccgtgagcaagctgcctgcagagcccccagcattgctccagacacacccaccttgccgaagatcagagtcctcgggcattcttcctaacaccacagacatgagattgcgaccaggaacacgcagagatgacagtacaaagctggagctagccctgacaggtggtgaagccaaatcgattcctctagagtgccccctttcatccccaaagggtgtactattctccagcaaatcagctgaggtgtgtaagcaagattcccccttcagcagggtgccaaggaaggtccagccaggctaccccgtagtccccgcagagaagcgtagctctggggagagggcaagagagacaggtggggccgaagggactggtgatgccgtgttgggggaaaaggtgcttgaagaagctctgttgtctcgggagcatgtcttggaattggagaacagcaagggccccagcctggcctctttagagggggaagaagataaggggaagagcagctcatcccaggtggtggggccagtgcaggaggaagagtatgtagcagagaagttgccaagtaggttcatcgagtcggctcacacagagctggcaaaggacgatgcggcgccagcacccccagtcgcagacgccaaagcccaggatagaggtgtcgagggagaactgggcaatgaggagagcttggatagaaatgaggagggcttggatagaaatgaggagggcttggatagaaatgaggagagcttggatagaaatgaggagggcttggatagaaatgaggagattaagcgggctgccttccagataatctcccaagtgatctcagaagcaaccgaacaggtgctggccaccacggttggcaaggttgcaggtcgtgtgtgtcaggccagtcagctccaagggcagaaggaagagagctgtgtcccagttcaccagaaaactgtcttgggcccagacactgcggagcctgccacagcagaggcagctgttgccccgccggatgctggcctccccttgccaggcctaccagcagagggctcaccaccaccaaagacctacgtgagctgcctgaagagccttctgtccagccccaccaaggacagtaagccaaatatctctgcacaccacatctccctggcctcctgcctggcactgaccacccccagtgaagagttgccggaccgggcaggcatcctggtggaagatgccacctgtgtcacctgcatgtcagacagcagccaaagtgtccctttggtggcttctccaggacactgctcagattctttcagcacttcagggcttgaagactcttgcacagagaccagctcgagccccagggacaaggccatcaccccgccactgccagaaagtactgtgcccttcagcaatggggtgctgaagggggagttgtcagacttgggggctgaggatggatggaccatggatgcggaagcagatcattcaggaggttctgacaggaacagcatggattccgtggatagctgttgcagtctcaagaagactgagagcttccaaaatgcccaggcaggctccaaccctaagaaggtcgacctcatcatctgggagatcgaggtgccaaagcacttagtcggtcggctaattggcaagcaggggcgctatgtgagttttctgaagcaaacatctggtgccaagatctacatttcaaccctgccttacacccagagcgtccagatctgccacatagaaggctctcaacatcatgtagacaaagcgctgaacttgattgggaagaagttcaaagagctgaacctcaccaatatctacgctcccccattgccttcactggcactgccttctctgccgatgacatcctggctcatgctgcctgatggcatcaccgtggaggtcattgtggtcaaccaggtcaatgccgggcacctgttcgtgcagcagcacacacaccctaccttccacgcgctgcgcagcctcgaccagcagatgtacctctgttactctcagcctggaatccccaccttgcccaccccagtggaaataacggtcatctgtgccgcccctggtgcggacggggcctggtggcgagcccaagtggttgcctcctacgaggagaccaacgaagtggagattcgatacgtggactacggcggatataagagggtgaaagtagacgtgctccggcaaatcaggtctgactttgtcaccctgccgtttcagggagcagaagtccttctggacagtgtgatgcccctgtcagacgatgaccagttttcaccggaagcagatgccgccatgagcgagatgacggggaatacagcactgcttgctcaggtgacaagttacagtccaactggtcttcctctgattcagctgtggagtgtggttggagatgaagtggtgttgataaaccggtccctggtggagcgaggccttgcccagtgggtagacagctactacacaagcctttgacccccatgctgcttcctgagagtctttttttgcactgttgaaattgggcttggcactcaagtcaaagatgaacatcggaataacaaacattgtcctctccagaaagtcctttctttctccatactgtagtcctattgagaagacatttcgtctctgagaaaaaaggatggaactatgggttctcttcgcaaagccaaaggatagtgtttaacaagccagctggcttatgctggttctcagctgtttaaaaaaaaaaaaaaaaaggaatagaaacagtttcaaccagattgtcctattccccctgttccattcccctcttcttccttctatctccttccccggcaaaaaccaaacaaactggcagacaggccagggatgtatgttgcttgcttgagagggtttcttttacttcaaaatctttcttcagggagcaagacatgaactgactaattggtatccactacttgtacagcttacataaatgagttgatgatatttaaccagtttttataaacttcatttaggtctctaaacacagactttttaaattgcaactgtaaatatgaaatggtcatcacatctgaccttggtcagtggggaggggaactggtatcctgccaagcctggttgtaatttgtaaccattttctatttgtgcaaactctgtaaatatgtgtttaaacaaatgtaatattttgtacaagatacactggagaacaaagggaactcaagattcttccagccacatgtcacctgtaggtagaagtaaactctgcagtgcagcttctgctcttggcccctctggccagggcccctgtggcttcctgcacactggacaggtgactgtatggtagagactgtgatctgggaactttttgctgtacaaatctgtttaaaaaaaaaaaaaagtaactcattgaattaacttgcagtggtgtgtttgattcttttttagactggcttcagcattgtgcagtttaaaaataagtaagtaacttacataaatcttcaattgtatgaactgca
